United States Patent Application Publication US 2012/0094332 A1 - sequence listing, part 2

SEQ ID NO: 1060 - DNA, 2792 bp, Artificial Sequence
  Description of Artificial Sequence: Synthetic Caldibacillus cellulovorans CompA.2 DNA Polymerase L822E
atgaaatacctgctgccgaccgctgctgctggtctgctgctcctcgctgcccagccggcgatggccatgggcaaactgattctggtcgacggaaacagcgtcgccaaccgggcgttttacgccgtccggctgctcagcacgcgcggcggcctgcacacaaacgcggtgtacggattcgccaacatgttgctcaagctgatcgaggaggaacggccgacgcattttctcgtcgcgttcgacgcgggcaaggcgacgttccgtcatcgcgaatacgaggcctacaaggcgggtcgcctgcagacgccgcccgagctgtccgagcagtttccgtacatccgggagctcgtccgggcgttcggcgtcgcgtccggcgagctggaggaatacgaggcggacgacatgatcggtacgctggcgaaacgggcggaggccgagggcgtcgacacgctggtcgtcaccggcgaccgcgatttgctccagctcgtatcggaccgcgtgaccgtcgcgctgacgcgcaagggcatcacggaaacggagcggtacgacccggcgcgcatccgcgaggaatacggcttcgatcccgaccgcatccgcgacctcaaagggctgatgggcgacgcgtctgacaatcttcccggcgttcccggcgtcggtgagaaaaccgcactgaaactgctcaggcagtacggttcgctggagagcgtcctggaacacgcgtcggaaatcgccggaaagctcggtgaaaatctgcgggcgcacgccgacgccgcccgattgagcaagcggctggcgacgatcgactgcgcggtaccgttgcagtcgggatgggactggctgcgcctcggcgaaccggaccgcgccgcgctcgcctcgctgttgcggcagctcgaattcaagtcgctgttgaaacggctcggactcgacggcacgtccgccgatgccgacgtcgacggcgtccgttcctccgcgcggccggcggacgagaaacggccgagggccgtcgccgtcgctgaggagggcgtcgacgtccgctgtccggatcgcccggaagaagtcgaagaagcgctgtcgcggctggaagccgcccagtcggtcgtcgtcgaggtgacgggcgacaacccgcacgacggcgaagtgcgcggcgtcgcatggtgggacggacatacggcgtatttcattccgtttgaacggctggtgcagtccgacatgcggccgctggccgactggctcgccgacgcgcgtcggccgaagcgtacgcacgactcccatcgcgctgaagtggcgctgttctggcacggccttgcgtttcgcggcacgtcgttctgcacgcatatcgccgcctatttgctcgaccccacggaatcgcgccatacgctggcggacctgtcgcgccgctacggtctgccgccggtaccggaagccgaggacgtttacggcaagggcgcgaagttcaaggttcccgatcgcgacacgctggcgcgttacgtcggccgcaaggccgccctagtcgcgcggctcgttccgctgctcgaggcggatttggcggcctgcggcatgcgttcgcttttttacgacctggagctgccgctttcatccgaactcgccgtcatggagacggtcggcgtccgcgtcgacgcggcggcgctcgccgcctacggcgaggaattgcgcgaggcggcggcgaaagtcgagcgggagatttacgagctggccgggacgacgttcaacatcggatcgacgaaacagctcggcgaaattttgttcgataagctggggctgcccgtcgtcaagaaaacgaaaaccggctattccaccgacgcagacgtgctggaggaactggcgccgtaccatccgatcgtcgaaaagattttgcattaccgccaactgacgaaattgcagtcgacctacatcgaggggcttttgaaagaaatccgtccgcaaaccggtaaaatccatacgtattatcagcagacgatcgcggcgacggggcggctgagcagtcagtttcccaatcttcagaacattccgatccgtctcgaagaggggcggaaaatccgcaaggcgttcgttccgtcagaaccgggatggctgatgctcgccgccgactattcgcagatcgaactgcgcgtgctcgcgcacgtttccggcgacgaacggctgaaggaagcgtttcggacaggcatggacatccacacgaagaccgcgatggacgtgttcggcgtttccgaagaccgcgtcgacgcgcgcatgcggcggcaggcgaaggcggtcaatttcggcatcatctacggcatcagcgatttcggactggcgcaaaacctgaacatttcccgcaaggaggcggcggagttcatccggcaatatttcgccgtcttttcgggcgtcaaggcgtaccgcgagcggatcgtcgagcaggcgcgccgcgacggttacgtgacgaccctgctcggtcgcaggcgctatgaaccggacatcaacgcgtcgaattacaacctccgctcgttcgcggagcggacggcgatgaatacgccgatccagggcacggccgccgacatcatcaagaccgcgatggtgcgtctgacgcggcggatgcgcgacgtcggactgaagagccgcatgctgctgcaggttcacgacgagctcgtgtttgaagtgccgccggacgagctcgacgcgatgcgggagcttgtgacggacgtcatggagtcggcggtcccgctcgacgtgccgctgaaggtcgacgtcagctggggcgccgactggtacgcggcgaagtgagggaagcgggatcc

SEQ ID NO: 1061 - DNA, 2792 bp, Artificial Sequence
  Description of Artificial Sequence: Synthetic Caldibacillus cellulovorans CompA.2 DNA Polymerase L822Q
atgaaatacctgctgccgaccgctgctgctggtctgctgctcctcgctgcccagccggcgatggccatgggcaaactgattctggtcgacggaaacagcgtcgccaaccgggcgttttacgccgtccggctgctcagcacgcgcggcggcctgcacacaaacgcggtgtacggattcgccaacatgttgctcaagctgatcgaggaggaacggccgacgcattttctcgtcgcgttcgacgcgggcaaggcgacgttccgtcatcgcgaatacgaggcctacaaggcgggtcgcctgcagacgccgcccgagctgtccgagcagtttccgtacatccgggagctcgtccgggcgttcggcgtcgcgtccggcgagctggaggaatacgaggcggacgacatgatcggtacgctggcgaaacgggcggaggccgagggcgtcgacacgctggtcgtcaccggcgaccgcgatttgctccagctcgtatcggaccgcgtgaccgtcgcgctgacgcgcaagggcatcacggaaacggagcggtacgacccggcgcgcatccgcgaggaatacggcttcgatcccgaccgcatccgcgacctcaaagggctgatgggcgacgcgtctgacaatcttcccggcgttcccggcgtcggtgagaaaaccgcactgaaactgctcaggcagtacggttcgctggagagcgtcctggaacacgcgtcggaaatcgccggaaagctcggtgaaaatctgcgggcgcacgccgacgccgcccgattgagcaagcggctggcgacgatcgactgcgcggtaccgttgcagtcgggatgggactggctgcgcctcggcgaaccggaccgcgccgcgctcgcctcgctgttgcggcagctcgaattcaagtcgctgttgaaacggctcggactcgacggcacgtccgccgatgccgacgtcgacggcgtccgttcctccgcgcggccggcggacgagaaacggccgagggccgtcgccgtcgctgaggagggcgtcgacgtccgctgtccggatcgcccggaagaagtcgaagaagcgctgtcgcggctggaagccgcccagtcggtcgtcgtcgaggtgacgggcgacaacccgcacgacggcgaagtgcgcggcgtcgcatggtgggacggacatacggcgtatttcattccgtttgaacggctggtgcagtccgacatgcggccgctggccgactggctcgccgacgcgcgtcggccgaagcgtacgcacgactcccatcgcgctgaagtggcgctgttctggcacggccttgcgtttcgcggcacgtcgttctgcacgcatatcgccgcctatttgctcgaccccacggaatcgcgccatacgctggcggacctgtcgcgccgctacggtctgccgccggtaccggaagccgaggacgtttacggcaagggcgcgaagttcaaggttcccgatcgcgacacgctggcgcgttacgtcggccgcaaggccgccctagtcgcgcggctcgttccgctgctcgaggcggatttggcggcctgcggcatgcgttcgcttttttacgacctggagctgccgctttcatccgaactcgccgtcatggagacggtcggcgtccgcgtcgacgcggcggcgctcgccgcctacggcgaggaattgcgcgaggcggcggcgaaagtcgagcgggagatttacgagctggccgggacgacgttcaacatcggatcgacgaaacagctcggcgaaattttgttcgataagctggggctgcccgtcgtcaagaaaacgaaaaccggctattccaccgacgcagacgtgctggaggaactggcgccgtaccatccgatcgtcgaaaagattttgcattaccgccaactgacgaaattgcagtcgacctacatcgaggggcttttgaaagaaatccgtccgcaaaccggtaaaatccatacgtattatcagcagacgatcgcggcgacggggcggctgagcagtcagtttcccaatcttcagaacattccgatccgtctcgaagaggggcggaaaatccgcaaggcgttcgttccgtcagaaccgggatggctgatgctcgccgccgactattcgcagatcgaactgcgcgtgctcgcgcacgtttccggcgacgaacggctgaaggaagcgtttcggacaggcatggacatccacacgaagaccgcgatggacgtgttcggcgtttccgaagaccgcgtcgacgcgcgcatgcggcggcaggcgaaggcggtcaatttcggcatcatctacggcatcagcgatttcggactggcgcaaaacctgaacatttcccgcaaggaggcggcggagttcatccggcaatatttcgccgtcttttcgggcgtcaaggcgtaccgcgagcggatcgtcgagcaggcgcgccgcgacggttacgtgacgaccctgctcggtcgcaggcgctatcaaccggacatcaacgcgtcgaattacaacctccgctcgttcgcggagcggacggcgatgaatacgccgatccagggcacggccgccgacatcatcaagaccgcgatggtgcgtctgacgcggcggatgcgcgacgtcggactgaagagccgcatgctgctgcaggttcacgacgagctcgtgtttgaagtgccgccggacgagctcgacgcgatgcgggagcttgtgacggacgtcatggagtcggcggtcccgctcgacgtgccgctgaaggtcgacgtcagctggggcgccgactggtacgcggcgaagtgagggaagcgggatcc

SEQ ID NO: 1062 - DNA, 2792 bp, Artificial Sequence
  Description of Artificial Sequence: Synthetic Caldibacillus cellulovorans CompA.2 DNA Polymerase L822G
atgaaatacctgctgccgaccgctgctgctggtctgctgctcctcgctgcccagccggcgatggccatgggcaaactgattctggtcgacggaaacagcgtcgccaaccgggcgttttacgccgtccggctgctcagcacgcgcggcggcctgcacacaaacgcggtgtacggattcgccaacatgttgctcaagctgatcgaggaggaacggccgacgcattttctcgtcgcgttcgacgcgggcaaggcgacgttccgtcatcgcgaatacgaggcctacaaggcgggtcgcctgcagacgccgcccgagctgtccgagcagtttccgtacatccgggagctcgtccgggcgttcggcgtcgcgtccggcgagctggaggaatacgaggcggacgacatgatcggtacgctggcgaaacgggcggaggccgagggcgtcgacacgctggtcgtcaccggcgaccgcgatttgctccagctcgtatcggaccgcgtgaccgtcgcgctgacgcgcaagggcatcacggaaacggagcggtacgacccggcgcgcatccgcgaggaatacggcttcgatcccgaccgcatccgcgacctcaaagggctgatgggcgacgcgtctgacaatcttcccggcgttcccggcgtcggtgagaaaaccgcactgaaactgctcaggcagtacggttcgctggagagcgtcctggaacacgcgtcggaaatcgccggaaagctcggtgaaaatctgcgggcgcacgccgacgccgcccgattgagcaagcggctggcgacgatcgactgcgcggtaccgttgcagtcgggatgggactggctgcgcctcggcgaaccggaccgcgccgcgctcgcctcgctgttgcggcagctcgaattcaagtcgctgttgaaacggctcggactcgacggcacgtccgccgatgccgacgtcgacggcgtccgttcctccgcgcggccggcggacgagaaacggccgagggccgtcgccgtcgctgaggagggcgtcgacgtccgctgtccggatcgcccggaagaagtcgaagaagcgctgtcgcggctggaagccgcccagtcggtcgtcgtcgaggtgacgggcgacaacccgcacgacggcgaagtgcgcggcgtcgcatggtgggacggacatacggcgtatttcattccgtttgaacggctggtgcagtccgacatgcggccgctggccgactggctcgccgacgcgcgtcggccgaagcgtacgcacgactcccatcgcgctgaagtggcgctgttctggcacggccttgcgtttcgcggcacgtcgttctgcacgcatatcgccgcctatttgctcgaccccacggaatcgcgccatacgctggcggacctgtcgcgccgctacggtctgccgccggtaccggaagccgaggacgtttacggcaagggcgcgaagttcaaggttcccgatcgcgacacgctggcgcgttacgtcggccgcaaggccgccctagtcgcgcggctcgttccgctgctcgaggcggatttggcggcctgcggcatgcgttcgcttttttacgacctggagctgccgctttcatccgaactcgccgtcatggagacggtcggcgtccgcgtcgacgcggcggcgctcgccgcctacggcgaggaattgcgcgaggcggcggcgaaagtcgagcgggagatttacgagctggccgggacgacgttcaacatcggatcgacgaaacagctcggcgaaattttgttcgataagctggggctgcccgtcgtcaagaaaacgaaaaccggctattccaccgacgcagacgtgctggaggaactggcgccgtaccatccgatcgtcgaaaagattttgcattaccgccaactgacgaaattgcagtcgacctacatcgaggggcttttgaaagaaatccgtccgcaaaccggtaaaatccatacgtattatcagcagacgatcgcggcgacggggcggctgagcagtcagtttcccaatcttcagaacattccgatccgtctcgaagaggggcggaaaatccgcaaggcgttcgttccgtcagaaccgggatggctgatgctcgccgccgactattcgcagatcgaactgcgcgtgctcgcgcacgtttccggcgacgaacggctgaaggaagcgtttcggacaggcatggacatccacacgaagaccgcgatggacgtgttcggcgtttccgaagaccgcgtcgacgcgcgcatgcggcggcaggcgaaggcggtcaatttcggcatcatctacggcatcagcgatttcggactggcgcaaaacctgaacatttcccgcaaggaggcggcggagttcatccggcaatatttcgccgtcttttcgggcgtcaaggcgtaccgcgagcggatcgtcgagcaggcgcgccgcgacggttacgtgacgaccctgctcggtcgcaggcgctatggtccggacatcaacgcgtcgaattacaacctccgctcgttcgcggagcggacggcgatgaatacgccgatccagggcacggccgccgacatcatcaagaccgcgatggtgcgtctgacgcggcggatgcgcgacgtcggactgaagagccgcatgctgctgcaggttcacgacgagctcgtgtttgaagtgccgccggacgagctcgacgcgatgcgggagcttgtgacggacgtcatggagtcggcggtcccgctcgacgtgccgctgaaggtcgacgtcagctggggcgccgactggtacgcggcgaagtgagggaagcgggatcc

SEQ ID NO: 1063 - DNA, 2792 bp, Artificial Sequence
  Description of Artificial Sequence: Synthetic Caldibacillus cellulovorans CompA.2 DNA Polymerase L822H
atgaaatacctgctgccgaccgctgctgctggtctgctgctcctcgctgcccagccggcgatggccatgggcaaactgattctggtcgacggaaacagcgtcgccaaccgggcgttttacgccgtccggctgctcagcacgcgcggcggcctgcacacaaacgcggtgtacggattcgccaacatgttgctcaagctgatcgaggaggaacggccgacgcattttctcgtcgcgttcgacgcgggcaaggcgacgttccgtcatcgcgaatacgaggcctacaaggcgggtcgcctgcagacgccgcccgagctgtccgagcagtttccgtacatccgggagctcgtccgggcgttcggcgtcgcgtccggcgagctggaggaatacgaggcggacgacatgatcggtacgctggcgaaacgggcggaggccgagggcgtcgacacgctggtcgtcaccggcgaccgcgatttgctccagctcgtatcggaccgcgtgaccgtcgcgctgacgcgcaagggcatcacggaaacggagcggtacgacccggcgcgcatccgcgaggaatacggcttcgatcccgaccgcatccgcgacctcaaagggctgatgggcgacgcgtctgacaatcttcccggcgttcccggcgtcggtgagaaaaccgcactgaaactgctcaggcagtacggttcgctggagagcgtcctggaacacgcgtcggaaatcgccggaaagctcggtgaaaatctgcgggcgcacgccgacgccgcccgattgagcaagcggctggcgacgatcgactgcgcggtaccgttgcagtcgggatgggactggctgcgcctcggcgaaccggaccgcgccgcgctcgcctcgctgttgcggcagctcgaattcaagtcgctgttgaaacggctcggactcgacggcacgtccgccgatgccgacgtcgacggcgtccgttcctccgcgcggccggcggacgagaaacggccgagggccgtcgccgtcgctgaggagggcgtcgacgtccgctgtccggatcgcccggaagaagtcgaagaagcgctgtcgcggctggaagccgcccagtcggtcgtcgtcgaggtgacgggcgacaacccgcacgacggcgaagtgcgcggcgtcgcatggtgggacggacatacggcgtatttcattccgtttgaacggctggtgcagtccgacatgcggccgctggccgactggctcgccgacgcgcgtcggccgaagcgtacgcacgactcccatcgcgctgaagtggcgctgttctggcacggccttgcgtttcgcggcacgtcgttctgcacgcatatcgccgcctatttgctcgaccccacggaatcgcgccatacgctggcggacctgtcgcgccgctacggtctgccgccggtaccggaagccgaggacgtttacggcaagggcgcgaagttcaaggttcccgatcgcgacacgctggcgcgttacgtcggccgcaaggccgccctagtcgcgcggctcgttccgctgctcgaggcggatttggcggcctgcggcatgcgttcgcttttttacgacctggagctgccgctttcatccgaactcgccgtcatggagacggtcggcgtccgcgtcgacgcggcggcgctcgccgcctacggcgaggaattgcgcgaggcggcggcgaaagtcgagcgggagatttacgagctggccgggacgacgttcaacatcggatcgacgaaacagctcggcgaaattttgttcgataagctggggctgcccgtcgtcaagaaaacgaaaaccggctattccaccgacgcagacgtgctggaggaactggcgccgtaccatccgatcgtcgaaaagattttgcattaccgccaactgacgaaattgcagtcgacctacatcgaggggcttttgaaagaaatccgtccgcaaaccggtaaaatccatacgtattatcagcagacgatcgcggcgacggggcggctgagcagtcagtttcccaatcttcagaacattccgatccgtctcgaagaggggcggaaaatccgcaaggcgttcgttccgtcagaaccgggatggctgatgctcgccgccgactattcgcagatcgaactgcgcgtgctcgcgcacgtttccggcgacgaacggctgaaggaagcgtttcggacaggcatggacatccacacgaagaccgcgatggacgtgttcggcgtttccgaagaccgcgtcgacgcgcgcatgcggcggcaggcgaaggcggtcaatttcggcatcatctacggcatcagcgatttcggactggcgcaaaacctgaacatttcccgcaaggaggcggcggagttcatccggcaatatttcgccgtcttttcgggcgtcaaggcgtaccgcgagcggatcgtcgagcaggcgcgccgcgacggttacgtgacgaccctgctcggtcgcaggcgctatcatccggacatcaacgcgtcgaattacaacctccgctcgttcgcggagcggacggcgatgaatacgccgatccagggcacggccgccgacatcatcaagaccgcgatggtgcgtctgacgcggcggatgcgcgacgtcggactgaagagccgcatgctgctgcaggttcacgacgagctcgtgtttgaagtgccgccggacgagctcgacgcgatgcgggagcttgtgacggacgtcatggagtcggcggtcccgctcgacgtgccgctgaaggtcgacgtcagctggggcgccgactggtacgcggcgaagtgagggaagcgggatcc

SEQ ID NO: 1064 - DNA, 2792 bp, Artificial Sequence
  Description of Artificial Sequence: Synthetic Caldibacillus cellulovorans CompA.2 DNA Polymerase L822I
atgaaatacctgctgccgaccgctgctgctggtctgctgctcctcgctgcccagccggcgatggccatgggcaaactgattctggtcgacggaaacagcgtcgccaaccgggcgttttacgccgtccggctgctcagcacgcgcggcggcctgcacacaaacgcggtgtacggattcgccaacatgttgctcaagctgatcgaggaggaacggccgacgcattttctcgtcgcgttcgacgcgggcaaggcgacgttccgtcatcgcgaatacgaggcctacaaggcgggtcgcctgcagacgccgcccgagctgtccgagcagtttccgtacatccgggagctcgtccgggcgttcggcgtcgcgtccggcgagctggaggaatacgaggcggacgacatgatcggtacgctggcgaaacgggcggaggccgagggcgtcgacacgctggtcgtcaccggcgaccgcgatttgctccagctcgtatcggaccgcgtgaccgtcgcgctgacgcgcaagggcatcacggaaacggagcggtacgacccggcgcgcatccgcgaggaatacggcttcgatcccgaccgcatccgcgacctcaaagggctgatgggcgacgcgtctgacaatcttcccggcgttcccggcgtcggtgagaaaaccgcactgaaactgctcaggcagtacggttcgctggagagcgtcctggaacacgcgtcggaaatcgccggaaagctcggtgaaaatctgcgggcgcacgccgacgccgcccgattgagcaagcggctggcgacgatcgactgcgcggtaccgttgcagtcgggatgggactggctgcgcctcggcgaaccggaccgcgccgcgctcgcctcgctgttgcggcagctcgaattcaagtcgctgttgaaacggctcggactcgacggcacgtccgccgatgccgacgtcgacggcgtccgttcctccgcgcggccggcggacgagaaacggccgagggccgtcgccgtcgctgaggagggcgtcgacgtccgctgtccggatcgcccggaagaagtcgaagaagcgctgtcgcggctggaagccgcccagtcggtcgtcgtcgaggtgacgggcgacaacccgcacgacggcgaagtgcgcggcgtcgcatggtgggacggacatacggcgtatttcattccgtttgaacggctggtgcagtccgacatgcggccgctggccgactggctcgccgacgcgcgtcggccgaagcgtacgcacgactcccatcgcgctgaagtggcgctgttctggcacggccttgcgtttcgcggcacgtcgttctgcacgcatatcgccgcctatttgctcgaccccacggaatcgcgccatacgctggcggacctgtcgcgccgctacggtctgccgccggtaccggaagccgaggacgtttacggcaagggcgcgaagttcaaggttcccgatcgcgacacgctggcgcgttacgtcggccgcaaggccgccctagtcgcgcggctcgttccgctgctcgaggcggatttggcggcctgcggcatgcgttcgcttttttacgacctggagctgccgctttcatccgaactcgccgtcatggagacggtcggcgtccgcgtcgacgcggcggcgctcgccgcctacggcgaggaattgcgcgaggcggcggcgaaagtcgagcgggagatttacgagctggccgggacgacgttcaacatcggatcgacgaaacagctcggcgaaattttgttcgataagctggggctgcccgtcgtcaagaaaacgaaaaccggctattccaccgacgcagacgtgctggaggaactggcgccgtaccatccgatcgtcgaaaagattttgcattaccgccaactgacgaaattgcagtcgacctacatcgaggggcttttgaaagaaatccgtccgcaaaccggtaaaatccatacgtattatcagcagacgatcgcggcgacggggcggctgagcagtcagtttcccaatcttcagaacattccgatccgtctcgaagaggggcggaaaatccgcaaggcgttcgttccgtcagaaccgggatggctgatgctcgccgccgactattcgcagatcgaactgcgcgtgctcgcgcacgtttccggcgacgaacggctgaaggaagcgtttcggacaggcatggacatccacacgaagaccgcgatggacgtgttcggcgtttccgaagaccgcgtcgacgcgcgcatgcggcggcaggcgaaggcggtcaatttcggcatcatctacggcatcagcgatttcggactggcgcaaaacctgaacatttcccgcaaggaggcggcggagttcatccggcaatatttcgccgtcttttcgggcgtcaaggcgtaccgcgagcggatcgtcgagcaggcgcgccgcgacggttacgtgacgaccctgctcggtcgcaggcgctatattccggacatcaacgcgtcgaattacaacctccgctcgttcgcggagcggacggcgatgaatacgccgatccagggcacggccgccgacatcatcaagaccgcgatggtgcgtctgacgcggcggatgcgcgacgtcggactgaagagccgcatgctgctgcaggttcacgacgagctcgtgtttgaagtgccgccggacgagctcgacgcgatgcgggagcttgtgacggacgtcatggagtcggcggtcccgctcgacgtgccgctgaaggtcgacgtcagctggggcgccgactggtacgcggcgaagtgagggaagcgggatcc

SEQ ID NO: 1065 - DNA, 2792 bp, Artificial Sequence
  Description of Artificial Sequence: Synthetic Caldibacillus cellulovorans CompA.2 DNA Polymerase L822K
atgaaatacctgctgccgaccgctgctgctggtctgctgctcctcgctgcccagccggcgatggccatgggcaaactgattctggtcgacggaaacagcgtcgccaaccgggcgttttacgccgtccggctgctcagcacgcgcggcggcctgcacacaaacgcggtgtacggattcgccaacatgttgctcaagctgatcgaggaggaacggccgacgcattttctcgtcgcgttcgacgcgggcaaggcgacgttccgtcatcgcgaatacgaggcctacaaggcgggtcgcctgcagacgccgcccgagctgtccgagcagtttccgtacatccgggagctcgtccgggcgttcggcgtcgcgtccggcgagctggaggaatacgaggcggacgacatgatcggtacgctggcgaaacgggcggaggccgagggcgtcgacacgctggtcgtcaccggcgaccgcgatttgctccagctcgtatcggaccgcgtgaccgtcgcgctgacgcgcaagggcatcacggaaacggagcggtacgacccggcgcgcatccgcgaggaatacggcttcgatcccgaccgcatccgcgacctcaaagggctgatgggcgacgcgtctgacaatcttcccggcgttcccggcgtcggtgagaaaaccgcactgaaactgctcaggcagtacggttcgctggagagcgtcctggaacacgcgtcggaaatcgccggaaagctcggtgaaaatctgcgggcgcacgccgacgccgcccgattgagcaagcggctggcgacgatcgactgcgcggtaccgttgcagtcgggatgggactggctgcgcctcggcgaaccggaccgcgccgcgctcgcctcgctgttgcggcagctcgaattcaagtcgctgttgaaacggctcggactcgacggcacgtccgccgatgccgacgtcgacggcgtccgttcctccgcgcggccggcggacgagaaacggccgagggccgtcgccgtcgctgaggagggcgtcgacgtccgctgtccggatcgcccggaagaagtcgaagaagcgctgtcgcggctggaagccgcccagtcggtcgtcgtcgaggtgacgggcgacaacccgcacgacggcgaagtgcgcggcgtcgcatggtgggacggacatacggcgtatttcattccgtttgaacggctggtgcagtccgacatgcggccgctggccgactggctcgccgacgcgcgtcggccgaagcgtacgcacgactcccatcgcgctgaagtggcgctgttctggcacggccttgcgtttcgcggcacgtcgttctgcacgcatatcgccgcctatttgctcgaccccacggaatcgcgccatacgctggcggacctgtcgcgccgctacggtctgccgccggtaccggaagccgaggacgtttacggcaagggcgcgaagttcaaggttcccgatcgcgacacgctggcgcgttacgtcggccgcaaggccgccctagtcgcgcggctcgttccgctgctcgaggcggatttggcggcctgcggcatgcgttcgcttttttacgacctggagctgccgctttcatccgaactcgccgtcatggagacggtcggcgtccgcgtcgacgcggcggcgctcgccgcctacggcgaggaattgcgcgaggcggcggcgaaagtcgagcgggagatttacgagctggccgggacgacgttcaacatcggatcgacgaaacagctcggcgaaattttgttcgataagctggggctgcccgtcgtcaagaaaacgaaaaccggctattccaccgacgcagacgtgctggaggaactggcgccgtaccatccgatcgtcgaaaagattttgcattaccgccaactgacgaaattgcagtcgacctacatcgaggggcttttgaaagaaatccgtccgcaaaccggtaaaatccatacgtattatcagcagacgatcgcggcgacggggcggctgagcagtcagtttcccaatcttcagaacattccgatccgtctcgaagaggggcggaaaatccgcaaggcgttcgttccgtcagaaccgggatggctgatgctcgccgccgactattcgcagatcgaactgcgcgtgctcgcgcacgtttccggcgacgaacggctgaaggaagcgtttcggacaggcatggacatccacacgaagaccgcgatggacgtgttcggcgtttccgaagaccgcgtcgacgcgcgcatgcggcggcaggcgaaggcggtcaatttcggcatcatctacggcatcagcgatttcggactggcgcaaaacctgaacatttcccgcaaggaggcggcggagttcatccggcaatatttcgccgtcttttcgggcgtcaaggcgtaccgcgagcggatcgtcgagcaggcgcgccgcgacggttacgtgacgaccctgctcggtcgcaggcgctataaaccggacatcaacgcgtcgaattacaacctccgctcgttcgcggagcggacggcgatgaatacgccgatccagggcacggccgccgacatcatcaagaccgcgatggtgcgtctgacgcggcggatgcgcgacgtcggactgaagagccgcatgctgctgcaggttcacgacgagctcgtgtttgaagtgccgccggacgagctcgacgcgatgcgggagcttgtgacggacgtcatggagtcggcggtcccgctcgacgtgccgctgaaggtcgacgtcagctggggcgccgactggtacgcggcgaagtgagggaagcgggatcc

SEQ ID NO: 1066 - DNA, 2792 bp, Artificial Sequence
  Description of Artificial Sequence: Synthetic Caldibacillus cellulovorans CompA.2 DNA Polymerase L822M
atgaaatacctgctgccgaccgctgctgctggtctgctgctcctcgctgcccagccggcgatggccatgggcaaactgattctggtcgacggaaacagcgtcgccaaccgggcgttttacgccgtccggctgctcagcacgcgcggcggcctgcacacaaacgcggtgtacggattcgccaacatgttgctcaagctgatcgaggaggaacggccgacgcattttctcgtcgcgttcgacgcgggcaaggcgacgttccgtcatcgcgaatacgaggcctacaaggcgggtcgcctgcagacgccgcccgagctgtccgagcagtttccgtacatccgggagctcgtccgggcgttcggcgtcgcgtccggcgagctggaggaatacgaggcggacgacatgatcggtacgctggcgaaacgggcggaggccgagggcgtcgacacgctggtcgtcaccggcgaccgcgatttgctccagctcgtatcggaccgcgtgaccgtcgcgctgacgcgcaagggcatcacggaaacggagcggtacgacccggcgcgcatccgcgaggaatacggcttcgatcccgaccgcatccgcgacctcaaagggctgatgggcgacgcgtctgacaatcttcccggcgttcccggcgtcggtgagaaaaccgcactgaaactgctcaggcagtacggttcgctggagagcgtcctggaacacgcgtcggaaatcgccggaaagctcggtgaaaatctgcgggcgcacgccgacgccgcccgattgagcaagcggctggcgacgatcgactgcgcggtaccgttgcagtcgggatgggactggctgcgcctcggcgaaccggaccgcgccgcgctcgcctcgctgttgcggcagctcgaattcaagtcgctgttgaaacggctcggactcgacggcacgtccgccgatgccgacgtcgacggcgtccgttcctccgcgcggccggcggacgagaaacggccgagggccgtcgccgtcgctgaggagggcgtcgacgtccgctgtccggatcgcccggaagaagtcgaagaagcgctgtcgcggctggaagccgcccagtcggtcgtcgtcgaggtgacgggcgacaacccgcacgacggcgaagtgcgcggcgtcgcatggtgggacggacatacggcgtatttcattccgtttgaacggctggtgcagtccgacatgcggccgctggccgactggctcgccgacgcgcgtcggccgaagcgtacgcacgactcccatcgcgctgaagtggcgctgttctggcacggccttgcgtttcgcggcacgtcgttctgcacgcatatcgccgcctatttgctcgaccccacggaatcgcgccatacgctggcggacctgtcgcgccgctacggtctgccgccggtaccggaagccgaggacgtttacggcaagggcgcgaagttcaaggttcccgatcgcgacacgctggcgcgttacgtcggccgcaaggccgccctagtcgcgcggctcgttccgctgctcgaggcggatttggcggcctgcggcatgcgttcgcttttttacgacctggagctgccgctttcatccgaactcgccgtcatggagacggtcggcgtccgcgtcgacgcggcggcgctcgccgcctacggcgaggaattgcgcgaggcggcggcgaaagtcgagcgggagatttacgagctggccgggacgacgttcaacatcggatcgacgaaacagctcggcgaaattttgttcgataagctggggctgcccgtcgtcaagaaaacgaaaaccggctattccaccgacgcagacgtgctggaggaactggcgccgtaccatccgatcgtcgaaaagattttgcattaccgccaactgacgaaattgcagtcgacctacatcgaggggcttttgaaagaaatccgtccgcaaaccggtaaaatccatacgtattatcagcagacgatcgcggcgacggggcggctgagcagtcagtttcccaatcttcagaacattccgatccgtctcgaagaggggcggaaaatccgcaaggcgttcgttccgtcagaaccgggatggctgatgctcgccgccgactattcgcagatcgaactgcgcgtgctcgcgcacgtttccggcgacgaacggctgaaggaagcgtttcggacaggcatggacatccacacgaagaccgcgatggacgtgttcggcgtttccgaagaccgcgtcgacgcgcgcatgcggcggcaggcgaaggcggtcaatttcggcatcatctacggcatcagcgatttcggactggcgcaaaacctgaacatttcccgcaaggaggcggcggagttcatccggcaatatttcgccgtcttttcgggcgtcaaggcgtaccgcgagcggatcgtcgagcaggcgcgccgcgacggttacgtgacgaccctgctcggtcgcaggcgctatatgccggacatcaacgcgtcgaattacaacctccgctcgttcgcggagcggacggcgatgaatacgccgatccagggcacggccgccgacatcatcaagaccgcgatggtgcgtctgacgcggcggatgcgcgacgtcggactgaagagccgcatgctgctgcaggttcacgacgagctcgtgtttgaagtgccgccggacgagctcgacgcgatgcgggagcttgtgacggacgtcatggagtcggcggtcccgctcgacgtgccgctgaaggtcgacgtcagctggggcgccgactggtacgcggcgaagtgagggaagcgggatcc

SEQ ID NO: 1067 - DNA, 2792 bp, Artificial Sequence
  Description of Artificial Sequence: Synthetic Caldibacillus cellulovorans CompA.2 DNA Polymerase L822F
atgaaatacctgctgccgaccgctgctgctggtctgctgctcctcgctgcccagccggcgatggccatgggcaaactgattctggtcgacggaaacagcgtcgccaaccgggcgttttacgccgtccggctgctcagcacgcgcggcggcctgcacacaaacgcggtgtacggattcgccaacatgttgctcaagctgatcgaggaggaacggccgacgcattttctcgtcgcgttcgacgcgggcaaggcgacgttccgtcatcgcgaatacgaggcctacaaggcgggtcgcctgcagacgccgcccgagctgtccgagcagtttccgtacatccgggagctcgtccgggcgttcggcgtcgcgtccggcgagctggaggaatacgaggcggacgacatgatcggtacgctggcgaaacgggcggaggccgagggcgtcgacacgctggtcgtcaccggcgaccgcgatttgctccagctcgtatcggaccgcgtgaccgtcgcgctgacgcgcaagggcatcacggaaacggagcggtacgacccggcgcgcatccgcgaggaatacggcttcgatcccgaccgcatccgcgacctcaaagggctgatgggcgacgcgtctgacaatcttcccggcgttcccggcgtcggtgagaaaaccgcactgaaactgctcaggcagtacggttcgctggagagcgtcctggaacacgcgtcggaaatcgccggaaagctcggtgaaaatctgcgggcgcacgccgacgccgcccgattgagcaagcggctggcgacgatcgactgcgcggtaccgttgcagtcgggatgggactggctgcgcctcggcgaaccggaccgcgccgcgctcgcctcgctgttgcggcagctcgaattcaagtcgctgttgaaacggctcggactcgacggcacgtccgccgatgccgacgtcgacggcgtccgttcctccgcgcggccggcggacgagaaacggccgagggccgtcgccgtcgctgaggagggcgtcgacgtccgctgtccggatcgcccggaagaagtcgaagaagcgctgtcgcggctggaagccgcccagtcggtcgtcgtcgaggtgacgggcgacaacccgcacgacggcgaagtgcgcggcgtcgcatggtgggacggacatacggcgtatttcattccgtttgaacggctggtgcagtccgacatgcggccgctggccgactggctcgccgacgcgcgtcggccgaagcgtacgcacgactcccatcgcgctgaagtggcgctgttctggcacggccttgcgtttcgcggcacgtcgttctgcacgcatatcgccgcctatttgctcgaccccacggaatcgcgccatacgctggcggacctgtcgcgccgctacggtctgccgccggtaccggaagccgaggacgtttacggcaagggcgcgaagttcaaggttcccgatcgcgacacgctggcgcgttacgtcggccgcaaggccgccctagtcgcgcggctcgttccgctgctcgaggcggatttggcggcctgcggcatgcgttcgcttttttacgacctggagctgccgctttcatccgaactcgccgtcatggagacggtcggcgtccgcgtcgacgcggcggcgctcgccgcctacggcgaggaattgcgcgaggcggcggcgaaagtcgagcgggagatttacgagctggccgggacgacgttcaacatcggatcgacgaaacagctcggcgaaattttgttcgataagctggggctgcccgtcgtcaagaaaacgaaaaccggctattccaccgacgcagacgtgctggaggaactggcgccgtaccatccgatcgtcgaaaagattttgcattaccgccaactgacgaaattgcagtcgacctacatcgaggggcttttgaaagaaatccgtccgcaaaccggtaaaatccatacgtattatcagcagacgatcgcggcgacggggcggctgagcagtcagtttcccaatcttcagaacattccgatccgtctcgaagaggggcggaaaatccgcaaggcgttcgttccgtcagaaccgggatggctgatgctcgccgccgactattcgcagatcgaactgcgcgtgctcgcgcacgtttccggcgacgaacggctgaaggaagcgtttcggacaggcatggacatccacacgaagaccgcgatggacgtgttcggcgtttccgaagaccgcgtcgacgcgcgcatgcggcggcaggcgaaggcggtcaatttcggcatcatctacggcatcagcgatttcggactggcgcaaaacctgaacatttcccgcaaggaggcggcggagttcatccggcaatatttcgccgtcttttcgggcgtcaaggcgtaccgcgagcggatcgtcgagcaggcgcgccgcgacggttacgtgacgaccctgctcggtcgcaggcgctattttccggacatcaacgcgtcgaattacaacctccgctcgttcgcggagcggacggcgatgaatacgccgatccagggcacggccgccgacatcatcaagaccgcgatggtgcgtctgacgcggcggatgcgcgacgtcggactgaagagccgcatgctgctgcaggttcacgacgagctcgtgtttgaagtgccgccggacgagctcgacgcgatgcgggagcttgtgacggacgtcatggagtcggcggtcccgctcgacgtgccgctgaaggtcgacgtcagctggggcgccgactggtacgcggcgaagtgagggaagcgggatcc

SEQ ID NO: 1068 - DNA, 2792 bp, Artificial Sequence
  Description of Artificial Sequence: Synthetic Caldibacillus cellulovorans CompA.2 DNA Polymerase L822P
atgaaatacctgctgccgaccgctgctgctggtctgctgctcctcgctgcccagccggcgatggccatgggcaaactgattctggtcgacggaaacagcgtcgccaaccgggcgttttacgccgtccggctgctcagcacgcgcggcggcctgcacacaaacgcggtgtacggattcgccaacatgttgctcaagctgatcgaggaggaacggccgacgcattttctcgtcgcgttcgacgcgggcaaggcgacgttccgtcatcgcgaatacgaggcctacaaggcgggtcgcctgcagacgccgcccgagctgtccgagcagtttccgtacatccgggagctcgtccgggcgttcggcgtcgcgtccggcgagctggaggaatacgaggcggacgacatgatcggtacgctggcgaaacgggcggaggccgagggcgtcgacacgctggtcgtcaccggcgaccgcgatttgctccagctcgtatcggaccgcgtgaccgtcgcgctgacgcgcaagggcatcacggaaacggagcggtacgacccggcgcgcatccgcgaggaatacggcttcgatcccgaccgcatccgcgacctcaaagggctgatgggcgacgcgtctgacaatcttcccggcgttcccggcgtcggtgagaaaaccgcactgaaactgctcaggcagtacggttcgctggagagcgtcctggaacacgcgtcggaaatcgccggaaagctcggtgaaaatctgcgggcgcacgccgacgccgcccgattgagcaagcggctggcgacgatcgactgcgcggtaccgttgcagtcgggatgggactggctgcgcctcggcgaaccggaccgcgccgcgctcgcctcgctgttgcggcagctcgaattcaagtcgctgttgaaacggctcggactcgacggcacgtccgccgatgccgacgtcgacggcgtccgttcctccgcgcggccggcggacgagaaacggccgagggccgtcgccgtcgctgaggagggcgtcgacgtccgctgtccggatcgcccggaagaagtcgaagaagcgctgtcgcggctggaagccgcccagtcggtcgtcgtcgaggtgacgggcgacaacccgcacgacggcgaagtgcgcggcgtcgcatggtgggacggacatacggcgtatttcattccgtttgaacggctggtgcagtccgacatgcggccgctggccgactggctcgccgacgcgcgtcggccgaagcgtacgcacgactcccatcgcgctgaagtggcgctgttctggcacggccttgcgtttcgcggcacgtcgttctgcacgcatatcgccgcctatttgctcgaccccacggaatcgcgccatacgctggcggacctgtcgcgccgctacggtctgccgccggtaccggaagccgaggacgtttacggcaagggcgcgaagttcaaggttcccgatcgcgacacgctggcgcgttacgtcggccgcaaggccgccctagtcgcgcggctcgttccgctgctcgaggcggatttggcggcctgcggcatgcgttcgcttttttacgacctggagctgccgctttcatccgaactcgccgtcatggagacggtcggcgtccgcgtcgacgcggcggcgctcgccgcctacggcgaggaattgcgcgaggcggcggcgaaagtcgagcgggagatttacgagctggccgggacgacgttcaacatcggatcgacgaaacagctcggcgaaattttgttcgataagctggggctgcccgtcgtcaagaaaacgaaaaccggctattccaccgacgcagacgtgctggaggaactggcgccgtaccatccgatcgtcgaaaagattttgcattaccgccaactgacgaaattgcagtcgacctacatcgaggggcttttgaaagaaatccgtccgcaaaccggtaaaatccatacgtattatcagcagacgatcgcggcgacggggcggctgagcagtcagtttcccaatcttcagaacattccgatccgtctcgaagaggggcggaaaatccgcaaggcgttcgttccgtcagaaccgggatggctgatgctcgccgccgactattcgcagatcgaactgcgcgtgctcgcgcacgtttccggcgacgaacggctgaaggaagcgtttcggacaggcatggacatccacacgaagaccgcgatggacgtgttcggcgtttccgaagaccgcgtcgacgcgcgcatgcggcggcaggcgaaggcggtcaatttcggcatcatctacggcatcagcgatttcggactggcgcaaaacctgaacatttcccgcaaggaggcggcggagttcatccggcaatatttcgccgtcttttcgggcgtcaaggcgtaccgcgagcggatcgtcgagcaggcgcgccgcgacggttacgtgacgaccctgctcggtcgcaggcgctatcctccggacatcaacgcgtcgaattacaacctccgctcgttcgcggagcggacggcgatgaatacgccgatccagggcacggccgccgacatcatcaagaccgcgatggtgcgtctgacgcggcggatgcgcgacgtcggactgaagagccgcatgctgctgcaggttcacgacgagctcgtgtttgaagtgccgccggacgagctcgacgcgatgcgggagcttgtgacggacgtcatggagtcggcggtcccgctcgacgtgccgctgaaggtcgacgtcagctggggcgccgactggtacgcggcgaagtgagggaagcgggatcc

SEQ ID NO: 1069 - DNA, 2792 bp, Artificial Sequence
  Description of Artificial Sequence: Synthetic Caldibacillus cellulovorans CompA.2 DNA Polymerase L822S
atgaaatacctgctgccgaccgctgctgctggtctgctgctcctcgctgcccagccggcgatggccatgggcaaactgattctggtcgacggaaacagcgtcgccaaccgggcgttttacgccgtccggctgctcagcacgcgcggcggcctgcacacaaacgcggtgtacggattcgccaacatgttgctcaagctgatcgaggaggaacggccgacgcattttctcgtcgcgttcgacgcgggcaaggcgacgttccgtcatcgcgaatacgaggcctacaaggcgggtcgcctgcagacgccgcccgagctgtccgagcagtttccgtacatccgggagctcgtccgggcgttcggcgtcgcgtccggcgagctggaggaatacgaggcggacgacatgatcggtacgctggcgaaacgggcggaggccgagggcgtcgacacgctggtcgtcaccggcgaccgcgatttgctccagctcgtatcggaccgcgtgaccgtcgcgctgacgcgcaagggcatcacggaaacggagcggtacgacccggcgcgcatccgcgaggaatacggcttcgatcccgaccgcatccgcgacctcaaagggctgatgggcgacgcgtctgacaatcttcccggcgttcccggcgtcggtgagaaaaccgcactgaaactgctcaggcagtacggttcgctggagagcgtcctggaacacgcgtcggaaatcgccggaaagctcggtgaaaatctgcgggcgcacgccgacgccgcccgattgagcaagcggctggcgacgatcgactgcgcggtaccgttgcagtcgggatgggactggctgcgcctcggcgaaccggaccgcgccgcgctcgcctcgctgttgcggcagctcgaattcaagtcgctgttgaaacggctcggactcgacggcacgtccgccgatgccgacgtcgacggcgtccgttcctccgcgcggccggcggacgagaaacggccgagggccgtcgccgtcgctgaggagggcgtcgacgtccgctgtccggatcgcccggaagaagtcgaagaagcgctgtcgcggctggaagccgcccagtcggtcgtcgtcgaggtgacgggcgacaacccgcacgacggcgaagtgcgcggcgtcgcatggtgggacggacatacggcgtatttcattccgtttgaacggctggtgcagtccgacatgcggccgctggccgactggctcgccgacgcgcgtcggccgaagcgtacgcacgactcccatcgcgctgaagtggcgctgttctggcacggccttgcgtttcgcggcacgtcgttctgcacgcatatcgccgcctatttgctcgaccccacggaatcgcgccatacgctggcggacctgtcgcgccgctacggtctgccgccggtaccggaagccgaggacgtttacggcaagggcgcgaagttcaaggttcccgatcgcgacacgctggcgcgttacgtcggccgcaaggccgccctagtcgcgcggctcgttccgctgctcgaggcggatttggcggcctgcggcatgcgttcgcttttttacgacctggagctgccgctttcatccgaactcgccgtcatggagacggtcggcgtccgcgtcgacgcggcggcgctcgccgcctacggcgaggaattgcgcgaggcggcggcgaaagtcgagcgggagatttacgagctggccgggacgacgttcaacatcggatcgacgaaacagctcggcgaaattttgttcgataagctggggctgcccgtcgtcaagaaaacgaaaaccggctattccaccgacgcagacgtgctggaggaactggcgccgtaccatccgatcgtcgaaaagattttgcattaccgccaactgacgaaattgcagtcgacctacatcgaggggcttttgaaagaaatccgtccgcaaaccggtaaaatccatacgtattatcagcagacgatcgcggcgacggggcggctgagcagtcagtttcccaatcttcagaacattccgatccgtctcgaagaggggcggaaaatccgcaaggcgttcgttccgtcagaaccgggatggctgatgctcgccgccgactattcgcagatcgaactgcgcgtgctcgcgcacgtttccggcgacgaacggctgaaggaagcgtttcggacaggcatggacatccacacgaagaccgcgatggacgtgttcggcgtttccgaagaccgcgtcgacgcgcgcatgcggcggcaggcgaaggcggtcaatttcggcatcatctacggcatcagcgatttcggactggcgcaaaacctgaacatttcccgcaaggaggcggcggagttcatccggcaatatttcgccgtcttttcgggcgtcaaggcgtaccgcgagcggatcgtcgagcaggcgcgccgcgacggttacgtgacgaccctgctcggtcgcaggcgctattctccggacatcaacgcgtcgaattacaacctccgctcgttcgcggagcggacggcgatgaatacgccgatccagggcacggccgccgacatcatcaagaccgcgatggtgcgtctgacgcggcggatgcgcgacgtcggactgaagagccgcatgctgctgcaggttcacgacgagctcgtgtttgaagtgccgccggacgagctcgacgcgatgcgggagcttgtgacggacgtcatggagtcggcggtcccgctcgacgtgccgctgaaggtcgacgtcagctggggcgccgactggtacgcggcgaagtgagggaagcgggatcc

SEQ ID NO: 1070 - DNA, 2792 bp, Artificial Sequence
  Description of Artificial Sequence: Synthetic Caldibacillus cellulovorans CompA.2 DNA Polymerase L822T
atgaaatacctgctgccgaccgctgctgctggtctgctgctcctcgctgcccagccggcgatggccatgggcaaactgattctggtcgacggaaacagcgtcgccaaccgggcgttttacgccgtccggctgctcagcacgcgcggcggcctgcacacaaacgcggtgtacggattcgccaacatgttgctcaagctgatcgaggaggaacggccgacgcattttctcgtcgcgttcgacgcgggcaaggcgacgttccgtcatcgcgaatacgaggcctacaaggcgggtcgcctgcagacgccgcccgagctgtccgagcagtttccgtacatccgggagctcgtccgggcgttcggcgtcgcgtccggcgagctggaggaatacgaggcggacgacatgatcggtacgctggcgaaacgggcggaggccgagggcgtcgacacgctggtcgtcaccggcgaccgcgatttgctccagctcgtatcggaccgcgtgaccgtcgcgctgacgcgcaagggcatcacggaaacggagcggtacgacccggcgcgcatccgcgaggaatacggcttcgatcccgaccgcatccgcgacctcaaagggctgatgggcgacgcgtctgacaatcttcccggcgttcccggcgtcggtgagaaaaccgcactgaaactgctcaggcagtacggttcgctggagagcgtcctggaacacgcgtcggaaatcgccggaaagctcggtgaaaatctgcgggcgcacgccgacgccgcccgattgagcaagcggctggcgacgatcgactgcgcggtaccgttgcagtcgggatgggactggctgcgcctcggcgaaccggaccgcgccgcgctcgcctcgctgttgcggcagctcgaattcaagtcgctgttgaaacggctcggactcgacggcacgtccgccgatgccgacgtcgacggcgtccgttcctccgcgcggccggcggacgagaaacggccgagggccgtcgccgtcgctgaggagggcgtcgacgtccgctgtccggatcgcccggaagaagtcgaagaagcgctgtcgcggctggaagccgcccagtcggtcgtcgtcgaggtgacgggcgacaacccgcacgacggcgaagtgcgcggcgtcgcatggtgggacggacatacggcgtatttcattccgtttgaacggctggtgcagtccgacatgcggccgctggccgactggctcgccgacgcgcgtcggccgaagcgtacgcacgactcccatcgcgctgaagtggcgctgttctggcacggccttgcgtttcgcggcacgtcgttctgcacgcatatcgccgcctatttgctcgaccccacggaatcgcgccatacgctggcggacctgtcgcgccgctacggtctgccgccggtaccggaagccgaggacgtttacggcaagggcgcgaagttcaaggttcccgatcgcgacacgctggcgcgttacgtcggccgcaaggccgccctagtcgcgcggctcgttccgctgctcgaggcggatttggcggcctgcggcatgcgttcgcttttttacgacctggagctgccgctttcatccgaactcgccgtcatggagacggtcggcgtccgcgtcgacgcggcggcgctcgccgcctacggcgaggaattgcgcgaggcggcggcgaaagtcgagcgggagatttacgagctggccgggacgacgttcaacatcggatcgacgaaacagctcggcgaaattttgttcgataagctggggctgcccgtcgtcaagaaaacgaaaaccggctattccaccgacgcagacgtgctggaggaactggcgccgtaccatccgatcgtcgaaaagattttgcattaccgccaactgacgaaattgcagtcgacctacatcgaggggcttttgaaagaaatccgtccgcaaaccggtaaaatccatacgtattatcagcagacgatcgcggcgacggggcggctgagcagtcagtttcccaatcttcagaacattccgatccgtctcgaagaggggcggaaaatccgcaaggcgttcgttccgtcagaaccgggatggctgatgctcgccgccgactattcgcagatcgaactgcgcgtgctcgcgcacgtttccggcgacgaacggctgaaggaagcgtttcggacaggcatggacatccacacgaagaccgcgatggacgtgttcggcgtttccgaagaccgcgtcgacgcgcgcatgcggcggcaggcgaaggcggtcaatttcggcatcatctacggcatcagcgatttcggactggcgcaaaacctgaacatttcccgcaaggaggcggcggagttcatccggcaatatttcgccgtcttttcgggcgtcaaggcgtaccgcgagcggatcgtcgagcaggcgcgccgcgacggttacgtgacgaccctgctcggtcgcaggcgctatactccggacatcaacgcgtcgaattacaacctccgctcgttcgcggagcggacggcgatgaatacgccgatccagggcacggccgccgacatcatcaagaccgcgatggtgcgtctgacgcggcggatgcgcgacgtcggactgaagagccgcatgctgctgcaggttcacgacgagctcgtgtttgaagtgccgccggacgagctcgacgcgatgcgggagcttgtgacggacgtcatggagtcggcggtcccgctcgacgtgccgctgaaggtcgacgtcagctggggcgccgactggtacgcggcgaagtgagggaagcgggatcc

SEQ ID NO: 1071 - DNA, 2792 bp, Artificial Sequence
  Description of Artificial Sequence: Synthetic Caldibacillus cellulovorans CompA.2 DNA Polymerase L822W
atgaaatacctgctgccgaccgctgctgctggtctgctgctcctcgctgcccagccggcgatggccatgggcaaactgattctggtcgacggaaacagcgtcgccaaccgggcgttttacgccgtccggctgctcagcacgcgcggcggcctgcacacaaacgcggtgtacggattcgccaacatgttgctcaagctgatcgaggaggaacggccgacgcattttctcgtcgcgttcgacgcgggcaaggcgacgttccgtcatcgcgaatacgaggcctacaaggcgggtcgcctgcagacgccgcccgagctgtccgagcagtttccgtacatccgggagctcgtccgggcgttcggcgtcgcgtccggcgagctggaggaatacgaggcggacgacatgatcggtacgctggcgaaacgggcggaggccgagggcgtcgacacgctggtcgtcaccggcgaccgcgatttgctccagctcgtatcggaccgcgtgaccgtcgcgctgacgcgcaagggcatcacggaaacggagcggtacgacccggcgcgcatccgcgaggaatacggcttcgatcccgaccgcatccgcgacctcaaagggctgatgggcgacgcgtctgacaatcttcccggcgttcccggcgtcggtgagaaaaccgcactgaaactgctcaggcagtacggttcgctggagagcgtcctggaacacgcgtcggaaatcgccggaaagctcggtgaaaatctgcgggcgcacgccgacgccgcccgattgagcaagcggctggcgacgatcgactgcgcggtaccgttgcagtcgggatgggactggctgcgcctcggcgaaccggaccgcgccgcgctcgcctcgctgttgcggcagctcgaattcaagtcgctgttgaaacggctcggactcgacggcacgtccgccgatgccgacgtcgacggcgtccgttcctccgcgcggccggcggacgagaaacggccgagggccgtcgccgtcgctgaggagggcgtcgacgtccgctgtccggatcgcccggaagaagtcgaagaagcgctgtcgcggctggaagccgcccagtcggtcgtcgtcgaggtgacgggcgacaacccgcacgacggcgaagtgcgcggcgtcgcatggtgggacggacatacggcgtatttcattccgtttgaacggctggtgcagtccgacatgcggccgctggccgactggctcgccgacgcgcgtcggccgaagcgtacgcacgactcccatcgcgctgaagtggcgctgttctggcacggccttgcgtttcgcggcacgtcgttctgcacgcatatcgccgcctatttgctcgaccccacggaatcgcgccatacgctggcggacctgtcgcgccgctacggtctgccgccggtaccggaagccgaggacgtttacggcaagggcgcgaagttcaaggttcccgatcgcgacacgctggcgcgttacgtcggccgcaaggccgccctagtcgcgcggctcgttccgctgctcgaggcggatttggcggcctgcggcatgcgttcgcttttttacgacctggagctgccgctttcatccgaactcgccgtcatggagacggtcggcgtccgcgtcgacgcggcggcgctcgccgcctacggcgaggaattgcgcgaggcggcggcgaaagtcgagcgggagatttacgagctggccgggacgacgttcaacatcggatcgacgaaacagctcggcgaaattttgttcgataagctggggctgcccgtcgtcaagaaaacgaaaaccggctattccaccgacgcagacgtgctggaggaactggcgccgtaccatccgatcgtcgaaaagattttgcattaccgccaactgacgaaattgcagtcgacctacatcgaggggcttttgaaagaaatccgtccgcaaaccggtaaaatccatacgtattatcagcagacgatcgcggcgacggggcggctgagcagtcagtttcccaatcttcagaacattccgatccgtctcgaagaggggcggaaaatccgcaaggcgttcgttccgtcagaaccgggatggctgatgctcgccgccgactattcgcagatcgaactgcgcgtgctcgcgcacgtttccggcgacgaacggctgaaggaagcgtttcggacaggcatggacatccacacgaagaccgcgatggacgtgttcggcgtttccgaagaccgcgtcgacgcgcgcatgcggcggcaggcgaaggcggtcaatttcggcatcatctacggcatcagcgatttcggactggcgcaaaacctgaacatttcccgcaaggaggcggcggagttcatccggcaatatttcgccgtcttttcgggcgtcaaggcgtaccgcgagcggatcgtcgagcaggcgcgccgcgacggttacgtgacgaccctgctcggtcgcaggcgctattggccggacatcaacgcgtcgaattacaacctccgctcgttcgcggagcggacggcgatgaatacgccgatccagggcacggccgccgacatcatcaagaccgcgatggtgcgtctgacgcggcggatgcgcgacgtcggactgaagagccgcatgctgctgcaggttcacgacgagctcgtgtttgaagtgccgccggacgagctcgacgcgatgcgggagcttgtgacggacgtcatggagtcggcggtcccgctcgacgtgccgctgaaggtcgacgtcagctggggcgccgactggtacgcggcgaagtgagggaagcgggatcc

SEQ ID NO: 1072 - DNA, 2792 bp, Artificial Sequence
  Description of Artificial Sequence: Synthetic Caldibacillus cellulovorans CompA.2 DNA Polymerase L822Y
atgaaatacctgctgccgaccgctgctgctggtctgctgctcctcgctgcccagccggcgatggccatgggcaaactgattctggtcgacggaaacagcgtcgccaaccgggcgttttacgccgtccggctgctcagcacgcgcggcggcctgcacacaaacgcggtgtacggattcgccaacatgttgctcaagctgatcgaggaggaacggccgacgcattttctcgtcgcgttcgacgcgggcaaggcgacgttccgtcatcgcgaatacgaggcctacaaggcgggtcgcctgcagacgccgcccgagctgtccgagcagtttccgtacatccgggagctcgtccgggcgttcggcgtcgcgtccggcgagctggaggaatacgaggcggacgacatgatcggtacgctggcgaaacgggcggaggccgagggcgtcgacacgctggtcgtcaccggcgaccgcgatttgctccagctcgtatcggaccgcgtgaccgtcgcgctgacgcgcaagggcatcacggaaacggagcggtacgacccggcgcgcatccgcgaggaatacggcttcgatcccgaccgcatccgcgacctcaaagggctgatgggcgacgcgtctgacaatcttcccggcgttcccggcgtcggtgagaaaaccgcactgaaactgctcaggcagtacggttcgctggagagcgtcctggaacacgcgtcggaaatcgccggaaagctcggtgaaaatctgcgggcgcacgccgacgccgcccgattgagcaagcggctggcgacgatcgactgcgcggtaccgttgcagtcgggatgggactggctgcgcctcggcgaaccggaccgcgccgcgctcgcctcgctgttgcggcagctcgaattcaagtcgctgttgaaacggctcggactcgacggcacgtccgccgatgccgacgtcgacggcgtccgttcctccgcgcggccggcggacgagaaacggccgagggccgtcgccgtcgctgaggagggcgtcgacgtccgctgtccggatcgcccggaagaagtcgaagaagcgctgtcgcggctggaagccgcccagtcggtcgtcgtcgaggtgacgggcgacaacccgcacgacggcgaagtgcgcggcgtcgcatggtgggacggacatacggcgtatttcattccgtttgaacggctggtgcagtccgacatgcggccgctggccgactggctcgccgacgcgcgtcggccgaagcgtacgcacgactcccatcgcgctgaagtggcgctgttctggcacggccttgcgtttcgcggcacgtcgttctgcacgcatatcgccgcctatttgctcgaccccacggaatcgcgccatacgctggcggacctgtcgcgccgctacggtctgccgccggtaccggaagccgaggacgtttacggcaagggcgcgaagttcaaggttcccgatcgcgacacgctggcgcgttacgtcggccgcaaggccgccctagtcgcgcggctcgttccgctgctcgaggcggatttggcggcctgcggcatgcgttcgcttttttacgacctggagctgccgctttcatccgaactcgccgtcatggagacggtcggcgtccgcgtcgacgcggcggcgctcgccgcctacggcgaggaattgcgcgaggcggcggcgaaagtcgagcgggagatttacgagctggccgggacgacgttcaacatcggatcgacgaaacagctcggcgaaattttgttcgataagctggggctgcccgtcgtcaagaaaacgaaaaccggctattccaccgacgcagacgtgctggaggaactggcgccgtaccatccgatcgtcgaaaagattttgcattaccgccaactgacgaaattgcagtcgacctacatcgaggggcttttgaaagaaatccgtccgcaaaccggtaaaatccatacgtattatcagcagacgatcgcggcgacggggcggctgagcagtcagtttcccaatcttcagaacattccgatccgtctcgaagaggggcggaaaatccgcaaggcgttcgttccgtcagaaccgggatggctgatgctcgccgccgactattcgcagatcgaactgcgcgtgctcgcgcacgtttccggcgacgaacggctgaaggaagcgtttcggacaggcatggacatccacacgaagaccgcgatggacgtgttcggcgtttccgaagaccgcgtcgacgcgcgcatgcggcggcaggcgaaggcggtcaatttcggcatcatctacggcatcagcgatttcggactggcgcaaaacctgaacatttcccgcaaggaggcggcggagttcatccggcaatatttcgccgtcttttcgggcgtcaaggcgtaccgcgagcggatcgtcgagcaggcgcgccgcgacggttacgtgacgaccctgctcggtcgcaggcgctattatccggacatcaacgcgtcgaattacaacctccgctcgttcgcggagcggacggcgatgaatacgccgatccagggcacggccgccgacatcatcaagaccgcgatggtgcgtctgacgcggcggatgcgcgacgtcggactgaagagccgcatgctgctgcaggttcacgacgagctcgtgtttgaagtgccgccggacgagctcgacgcgatgcgggagcttgtgacggacgtcatggagtcggcggtcccgctcgacgtgccgctgaaggtcgacgtcagctggggcgccgactggtacgcggcgaagtgagggaagcgggatcc

SEQ ID NO: 1073 - DNA, 2792 bp, Artificial Sequence
  Description of Artificial Sequence: Synthetic Caldibacillus cellulovorans CompA.2 DNA Polymerase L822V
atgaaatacctgctgccgaccgctgctgctggtctgctgctcctcgctgcccagccggcgatggccatgggcaaactgattctggtcgacggaaacagcgtcgccaaccgggcgttttacgccgtccggctgctcagcacgcgcggcggcctgcacacaaacgcggtgtacggattcgccaacatgttgctcaagctgatcgaggaggaacggccgacgcattttctcgtcgcgttcgacgcgggcaaggcgacgttccgtcatcgcgaatacgaggcctacaaggcgggtcgcctgcagacgccgcccgagctgtccgagcagtttccgtacatccgggagctcgtccgggcgttcggcgtcgcgtccggcgagctggaggaatacgaggcggacgacatgatcggtacgctggcgaaacgggcggaggccgagggcgtcgacacgctggtcgtcaccggcgaccgcgatttgctccagctcgtatcggaccgcgtgaccgtcgcgctgacgcgcaagggcatcacggaaacggagcggtacgacccggcgcgcatccgcgaggaatacggcttcgatcccgaccgcatccgcgacctcaaagggctgatgggcgacgcgtctgacaatcttcccggcgttcccggcgtcggtgagaaaaccgcactgaaactgctcaggcagtacggttcgctggagagcgtcctggaacacgcgtcggaaatcgccggaaagctcggtgaaaatctgcgggcgcacgccgacgccgcccgattgagcaagcggctggcgacgatcgactgcgcggtaccgttgcagtcgggatgggactggctgcgcctcggcgaaccggaccgcgccgcgctcgcctcgctgttgcggcagctcgaattcaagtcgctgttgaaacggctcggactcgacggcacgtccgccgatgccgacgtcgacggcgtccgttcctccgcgcggccggcggacgagaaacggccgagggccgtcgccgtcgctgaggagggcgtcgacgtccgctgtccggatcgcccggaagaagtcgaagaagcgctgtcgcggctggaagccgcccagtcggtcgtcgtcgaggtgacgggcgacaacccgcacgacggcgaagtgcgcggcgtcgcatggtgggacggacatacggcgtatttcattccgtttgaacggctggtgcagtccgacatgcggccgctggccgactggctcgccgacgcgcgtcggccgaagcgtacgcacgactcccatcgcgctgaagtggcgctgttctggcacggccttgcgtttcgcggcacgtcgttctgcacgcatatcgccgcctatttgctcgaccccacggaatcgcgccatacgctggcggacctgtcgcgccgctacggtctgccgccggtaccggaagccgaggacgtttacggcaagggcgcgaagttcaaggttcccgatcgcgacacgctggcgcgttacgtcggccgcaaggccgccctagtcgcgcggctcgttccgctgctcgaggcggatttggcggcctgcggcatgcgttcgcttttttacgacctggagctgccgctttcatccgaactcgccgtcatggagacggtcggcgtccgcgtcgacgcggcggcgctcgccgcctacggcgaggaattgcgcgaggcggcggcgaaagtcgagcgggagatttacgagctggccgggacgacgttcaacatcggatcgacgaaacagctcggcgaaattttgttcgataagctggggctgcccgtcgtcaagaaaacgaaaaccggctattccaccgacgcagacgtgctggaggaactggcgccgtaccatccgatcgtcgaaaagattttgcattaccgccaactgacgaaattgcagtcgacctacatcgaggggcttttgaaagaaatccgtccgcaaaccggtaaaatccatacgtattatcagcagacgatcgcggcgacggggcggctgagcagtcagtttcccaatcttcagaacattccgatccgtctcgaagaggggcggaaaatccgcaaggcgttcgttccgtcagaaccgggatggctgatgctcgccgccgactattcgcagatcgaactgcgcgtgctcgcgcacgtttccggcgacgaacggctgaaggaagcgtttcggacaggcatggacatccacacgaagaccgcgatggacgtgttcggcgtttccgaagaccgcgtcgacgcgcgcatgcggcggcaggcgaaggcggtcaatttcggcatcatctacggcatcagcgatttcggactggcgcaaaacctgaacatttcccgcaaggaggcggcggagttcatccggcaatatttcgccgtcttttcgggcgtcaaggcgtaccgcgagcggatcgtcgagcaggcgcgccgcgacggttacgtgacgaccctgctcggtcgcaggcgctatgttccggacatcaacgcgtcgaattacaacctccgctcgttcgcggagcggacggcgatgaatacgccgatccagggcacggccgccgacatcatcaagaccgcgatggtgcgtctgacgcggcggatgcgcgacgtcggactgaagagccgcatgctgctgcaggttcacgacgagctcgtgtttgaagtgccgccggacgagctcgacgcgatgcgggagcttgtgacggacgtcatggagtcggcggtcccgctcgacgtgccgctgaaggtcgacgtcagctggggcgccgactggtacgcggcgaagtgagggaagcgggatcc

SEQ ID NO: 1074 - DNA, 2792 bp, Artificial Sequence
  Description of Artificial Sequence: Synthetic Caldibacillus cellulovorans CompA.2 DNA Polymerase P823A
atgaaatacctgctgccgaccgctgctgctggtctgctgctcctcgctgcccagccggcgatggccatgggcaaactgattctggtcgacggaaacagcgtcgccaaccgggcgttttacgccgtccggctgctcagcacgcgcggcggcctgcacacaaacgcggtgtacggattcgccaacatgttgctcaagctgatcgaggaggaacggccgacgcattttctcgtcgcgttcgacgcgggcaaggcgacgttccgtcatcgcgaatacgaggcctacaaggcgggtcgcctgcagacgccgcccgagctgtccgagcagtttccgtacatccgggagctcgtccgggcgttcggcgtcgcgtccggcgagctggaggaatacgaggcggacgacatgatcggtacgctggcgaaacgggcggaggccgagggcgtcgacacgctggtcgtcaccggcgaccgcgatttgctccagctcgtatcggaccgcgtgaccgtcgcgctgacgcgcaagggcatcacggaaacggagcggtacgacccggcgcgcatccgcgaggaatacggcttcgatcccgaccgcatccgcgacctcaaagggctgatgggcgacgcgtctgacaatcttcccggcgttcccggcgtcggtgagaaaaccgcactgaaactgctcaggcagtacggttcgctggagagcgtcctggaacacgcgtcggaaatcgccggaaagctcggtgaaaatctgcgggcgcacgccgacgccgcccgattgagcaagcggctggcgacgatcgactgcgcggtaccgttgcagtcgggatgggactggctgcgcctcggcgaaccggaccgcgccgcgctcgcctcgctgttgcggcagctcgaattcaagtcgctgttgaaacggctcggactcgacggcacgtccgccgatgccgacgtcgacggcgtccgttcctccgcgcggccggcggacgagaaacggccgagggccgtcgccgtcgctgaggagggcgtcgacgtccgctgtccggatcgcccggaagaagtcgaagaagcgctgtcgcggctggaagccgcccagtcggtcgtcgtcgaggtgacgggcgacaacccgcacgacggcgaagtgcgcggcgtcgcatggtgggacggacatacggcgtatttcattccgtttgaacggctggtgcagtccgacatgcggccgctggccgactggctcgccgacgcgcgtcggccgaagcgtacgcacgactcccatcgcgctgaagtggcgctgttctggcacggccttgcgtttcgcggcacgtcgttctgcacgcatatcgccgcctatttgctcgaccccacggaatcgcgccatacgctggcggacctgtcgcgccgctacggtctgccgccggtaccggaagccgaggacgtttacggcaagggcgcgaagttcaaggttcccgatcgcgacacgctggcgcgttacgtcggccgcaaggccgccctagtcgcgcggctcgttccgctgctcgaggcggatttggcggcctgcggcatgcgttcgcttttttacgacctggagctgccgctttcatccgaactcgccgtcatggagacggtcggcgtccgcgtcgacgcggcggcgctcgccgcctacggcgaggaattgcgcgaggcggcggcgaaagtcgagcgggagatttacgagctggccgggacgacgttcaacatcggatcgacgaaacagctcggcgaaattttgttcgataagctggggctgcccgtcgtcaagaaaacgaaaaccggctattccaccgacgcagacgtgctggaggaactggcgccgtaccatccgatcgtcgaaaagattttgcattaccgccaactgacgaaattgcagtcgacctacatcgaggggcttttgaaagaaatccgtccgcaaaccggtaaaatccatacgtattatcagcagacgatcgcggcgacggggcggctgagcagtcagtttcccaatcttcagaacattccgatccgtctcgaagaggggcggaaaatccgcaaggcgttcgttccgtcagaaccgggatggctgatgctcgccgccgactattcgcagatcgaactgcgcgtgctcgcgcacgtttccggcgacgaacggctgaaggaagcgtttcggacaggcatggacatccacacgaagaccgcgatggacgtgttcggcgtttccgaagaccgcgtcgacgcgcgcatgcggcggcaggcgaaggcggtcaatttcggcatcatctacggcatcagcgatttcggactggcgcaaaacctgaacatttcccgcaaggaggcggcggagttcatccggcaatatttcgccgtcttttcgggcgtcaaggcgtaccgcgagcggatcgtcgagcaggcgcgccgcgacggttacgtgacgaccctgctcggtcgcaggcgctatttggctgacatcaacgcgtcgaattacaacctccgctcgttcgcggagcggacggcgatgaatacgccgatccagggcacggccgccgacatcatcaagaccgcgatggtgcgtctgacgcggcggatgcgcgacgtcggactgaagagccgcatgctgctgcaggttcacgacgagctcgtgtttgaagtgccgccggacgagctcgacgcgatgcgggagcttgtgacggacgtcatggagtcggcggtcccgctcgacgtgccgctgaaggtcgacgtcagctggggcgccgactggtacgcggcgaagtgagggaagcgggatcc

SEQ ID NO: 1075 - DNA, 2792 bp, Artificial Sequence
  Description of Artificial Sequence: Synthetic Caldibacillus cellulovorans CompA.2 DNA Polymerase P823R
atgaaatacctgctgccgaccgctgctgctggtctgctgctcctcgctgcccagccggcgatggccatgggcaaactgattctggtcgacggaaacagcgtcgccaaccgggcgttttacgccgtccggctgctcagcacgcgcggcggcctgcacacaaacgcggtgtacggattcgccaacatgttgctcaagctgatcgaggaggaacggccgacgcattttctcgtcgcgttcgacgcgggcaaggcgacgttccgtcatcgcgaatacgaggcctacaaggcgggtcgcctgcagacgccgcccgagctgtccgagcagtttccgtacatccgggagctcgtccgggcgttcggcgtcgcgtccggcgagctggaggaatacgaggcggacgacatgatcggtacgctggcgaaacgggcggaggccgagggcgtcgacacgctggtcgtcaccggcgaccgcgatttgctccagctcgtatcggaccgcgtgaccgtcgcgctgacgcgcaagggcatcacggaaacggagcggtacgacccggcgcgcatccgcgaggaatacggcttcgatcccgaccgcatccgcgacctcaaagggctgatgggcgacgcgtctgacaatcttcccggcgttcccggcgtcggtgagaaaaccgcactgaaactgctcaggcagtacggttcgctggagagcgtcctggaacacgcgtcggaaatcgccggaaagctcggtgaaaatctgcgggcgcacgccgacgccgcccgattgagcaagcggctggcgacgatcgactgcgcggtaccgttgcagtcgggatgggactggctgcgcctcggcgaaccggaccgcgccgcgctcgcctcgctgttgcggcagctcgaattcaagtcgctgttgaaacggctcggactcgacggcacgtccgccgatgccgacgtcgacggcgtccgttcctccgcgcggccggcggacgagaaacggccgagggccgtcgccgtcgctgaggagggcgtcgacgtccgctgtccggatcgcccggaagaagtcgaagaagcgctgtcgcggctggaagccgcccagtcggtcgtcgtcgaggtgacgggcgacaacccgcacgacggcgaagtgcgcggcgtcgcatggtgggacggacatacggcgtatttcattccgtttgaacggctggtgcagtccgacatgcggccgctggccgactggctcgccgacgcgcgtcggccgaagcgtacgcacgactcccatcgcgctgaagtggcgctgttctggcacggccttgcgtttcgcggcacgtcgttctgcacgcatatcgccgcctatttgctcgaccccacggaatcgcgccatacgctggcggacctgtcgcgccgctacggtctgccgccggtaccggaagccgaggacgtttacggcaagggcgcgaagttcaaggttcccgatcgcgacacgctggcgcgttacgtcggccgcaaggccgccctagtcgcgcggctcgttccgctgctcgaggcggatttggcggcctgcggcatgcgttcgcttttttacgacctggagctgccgctttcatccgaactcgccgtcatggagacggtcggcgtccgcgtcgacgcggcggcgctcgccgcctacggcgaggaattgcgcgaggcggcggcgaaagtcgagcgggagatttacgagctggccgggacgacgttcaacatcggatcgacgaaacagctcggcgaaattttgttcgataagctggggctgcccgtcgtcaagaaaacgaaaaccggctattccaccgacgcagacgtgctggaggaactggcgccgtaccatccgatcgtcgaaaagattttgcattaccgccaactgacgaaattgcagtcgacctacatcgaggggcttttgaaagaaatccgtccgcaaaccggtaaaatccatacgtattatcagcagacgatcgcggcgacggggcggctgagcagtcagtttcccaatcttcagaacattccgatccgtctcgaagaggggcggaaaatccgcaaggcgttcgttccgtcagaaccgggatggctgatgctcgccgccgactattcgcagatcgaactgcgcgtgctcgcgcacgtttccggcgacgaacggctgaaggaagcgtttcggacaggcatggacatccacacgaagaccgcgatggacgtgttcggcgtttccgaagaccgcgtcgacgcgcgcatgcggcggcaggcgaaggcggtcaatttcggcatcatctacggcatcagcgatttcggactggcgcaaaacctgaacatttcccgcaaggaggcggcggagttcatccggcaatatttcgccgtcttttcgggcgtcaaggcgtaccgcgagcggatcgtcgagcaggcgcgccgcgacggttacgtgacgaccctgctcggtcgcaggcgctatttgcgtgacatcaacgcgtcgaattacaacctccgctcgttcgcggagcggacggcgatgaatacgccgatccagggcacggccgccgacatcatcaagaccgcgatggtgcgtctgacgcggcggatgcgcgacgtcggactgaagagccgcatgctgctgcaggttcacgacgagctcgtgtttgaagtgccgccggacgagctcgacgcgatgcgggagcttgtgacggacgtcatggagtcggcggtcccgctcgacgtgccgctgaaggtcgacgtcagctggggcgccgactggtacgcggcgaagtgagggaagcgggatcc

SEQ ID NO: 1076 - DNA, 2792 bp, Artificial Sequence
  Description of Artificial Sequence: Synthetic Caldibacillus cellulovorans CompA.2 DNA Polymerase P823N
atgaaatacctgctgccgaccgctgctgctggtctgctgctcctcgctgcccagccggcgatggccatgggcaaactgattctggtcgacggaaacagcgtcgccaaccgggcgttttacgccgtccggctgctcagcacgcgcggcggcctgcacacaaacgcggtgtacggattcgccaacatgttgctcaagctgatcgaggaggaacggccgacgcattttctcgtcgcgttcgacgcgggcaaggcgacgttccgtcatcgcgaatacgaggcctacaaggcgggtcgcctgcagacgccgcccgagctgtccgagcagtttccgtacatccgggagctcgtccgggcgttcggcgtcgcgtccggcgagctggaggaatacgaggcggacgacatgatcggtacgctggcgaaacgggcggaggccgagggcgtcgacacgctggtcgtcaccggcgaccgcgatttgctccagctcgtatcggaccgcgtgaccgtcgcgctgacgcgcaagggcatcacggaaacggagcggtacgacccggcgcgcatccgcgaggaatacggcttcgatcccgaccgcatccgcgacctcaaagggctgatgggcgacgcgtctgacaatcttcccggcgttcccggcgtcggtgagaaaaccgcactgaaactgctcaggcagtacggttcgctggagagcgtcctggaacacgcgtcggaaatcgccggaaagctcggtgaaaatctgcgggcgcacgccgacgccgcccgattgagcaagcggctggcgacgatcgactgcgcggtaccgttgcagtcgggatgggactggctgcgcctcggcgaaccggaccgcgccgcgctcgcctcgctgttgcggcagctcgaattcaagtcgctgttgaaacggctcggactcgacggcacgtccgccgatgccgacgtcgacggcgtccgttcctccgcgcggccggcggacgagaaacggccgagggccgtcgccgtcgctgaggagggcgtcgacgtccgctgtccggatcgcccggaagaagtcgaagaagcgctgtcgcggctggaagccgcccagtcggtcgtcgtcgaggtgacgggcgacaacccgcacgacggcgaagtgcgcggcgtcgcatggtgggacggacatacggcgtatttcattccgtttgaacggctggtgcagtccgacatgcggccgctggccgactggctcgccgacgcgcgtcggccgaagcgtacgcacgactcccatcgcgctgaagtggcgctgttctggcacggccttgcgtttcgcggcacgtcgttctgcacgcatatcgccgcctatttgctcgaccccacggaatcgcgccatacgctggcggacctgtcgcgccgctacggtctgccgccggtaccggaagccgaggacgtttacggcaagggcgcgaagttcaaggttcccgatcgcgacacgctggcgcgttacgtcggccgcaaggccgccctagtcgcgcggctcgttccgctgctcgaggcggatttggcggcctgcggcatgcgttcgcttttttacgacctggagctgccgctttcatccgaactcgccgtcatggagacggtcggcgtccgcgtcgacgcggcggcgctcgccgcctacggcgaggaattgcgcgaggcggcggcgaaagtcgagcgggagatttacgagctggccgggacgacgttcaacatcggatcgacgaaacagctcggcgaaattttgttcgataagctggggctgcccgtcgtcaagaaaacgaaaaccggctattccaccgacgcagacgtgctggaggaactggcgccgtaccatccgatcgtcgaaaagattttgcattaccgccaactgacgaaattgcagtcgacctacatcgaggggcttttgaaagaaatccgtccgcaaaccggtaaaatccatacgtattatcagcagacgatcgcggcgacggggcggctgagcagtcagtttcccaatcttcagaacattccgatccgtctcgaagaggggcggaaaatccgcaaggcgttcgttccgtcagaaccgggatggctgatgctcgccgccgactattcgcagatcgaactgcgcgtgctcgcgcacgtttccggcgacgaacggctgaaggaagcgtttcggacaggcatggacatccacacgaagaccgcgatggacgtgttcggcgtttccgaagaccgcgtcgacgcgcgcatgcggcggcaggcgaaggcggtcaatttcggcatcatctacggcatcagcgatttcggactggcgcaaaacctgaacatttcccgcaaggaggcggcggagttcatccggcaatatttcgccgtcttttcgggcgtcaaggcgtaccgcgagcggatcgtcgagcaggcgcgccgcgacggttacgtgacgaccctgctcggtcgcaggcgctatttgaatgacatcaacgcgtcgaattacaacctccgctcgttcgcggagcggacggcgatgaatacgccgatccagggcacggccgccgacatcatcaagaccgcgatggtgcgtctgacgcggcggatgcgcgacgtcggactgaagagccgcatgctgctgcaggttcacgacgagctcgtgtttgaagtgccgccggacgagctcgacgcgatgcgggagcttgtgacggacgtcatggagtcggcggtcccgctcgacgtgccgctgaaggtcgacgtcagctggggcgccgactggtacgcggcgaagtgagggaagcgggatcc

SEQ ID NO: 1077 - DNA, 2792 bp, Artificial Sequence
  Description of Artificial Sequence: Synthetic Caldibacillus cellulovorans CompA.2 DNA Polymerase P823D
atgaaatacctgctgccgaccgctgctgctggtctgctgctcctcgctgcccagccggcgatggccatgggcaaactgattctggtcgacggaaacagcgtcgccaaccgggcgttttacgccgtccggctgctcagcacgcgcggcggcctgcacacaaacgcggtgtacggattcgccaacatgttgctcaagctgatcgaggaggaacggccgacgcattttctcgtcgcgttcgacgcgggcaaggcgacgttccgtcatcgcgaatacgaggcctacaaggcgggtcgcctgcagacgccgcccgagctgtccgagcagtttccgtacatccgggagctcgtccgggcgttcggcgtcgcgtccggcgagctggaggaatacgaggcggacgacatgatcggtacgctggcgaaacgggcggaggccgagggcgtcgacacgctggtcgtcaccggcgaccgcgatttgctccagctcgtatcggaccgcgtgaccgtcgcgctgacgcgcaagggcatcacggaaacggagcggtacgacccggcgcgcatccgcgaggaatacggcttcgatcccgaccgcatccgcgacctcaaagggctgatgggcgacgcgtctgacaatcttcccggcgttcccggcgtcggtgagaaaaccgcactgaaactgctcaggcagtacggttcgctggagagcgtcctggaacacgcgtcggaaatcgccggaaagctcggtgaaaatctgcgggcgcacgccgacgccgcccgattgagcaagcggctggcgacgatcgactgcgcggtaccgttgcagtcgggatgggactggctgcgcctcggcgaaccggaccgcgccgcgctcgcctcgctgttgcggcagctcgaattcaagtcgctgttgaaacggctcggactcgacggcacgtccgccgatgccgacgtcgacggcgtccgttcctccgcgcggccggcggacgagaaacggccgagggccgtcgccgtcgctgaggagggcgtcgacgtccgctgtccggatcgcccggaagaagtcgaagaagcgctgtcgcggctggaagccgcccagtcggtcgtcgtcgaggtgacgggcgacaacccgcacgacggcgaagtgcgcggcgtcgcatggtgggacggacatacggcgtatttcattccgtttgaacggctggtgcagtccgacatgcggccgctggccgactggctcgccgacgcgcgtcggccgaagcgtacgcacgactcccatcgcgctgaagtggcgctgttctggcacggccttgcgtttcgcggcacgtcgttctgcacgcatatcgccgcctatttgctcgaccccacggaatcgcgccatacgctggcggacctgtcgcgccgctacggtctgccgccggtaccggaagccgaggacgtttacggcaagggcgcgaagttcaaggttcccgatcgcgacacgctggcgcgttacgtcggccgcaaggccgccctagtcgcgcggctcgttccgctgctcgaggcggatttggcggcctgcggcatgcgttcgcttttttacgacctggagctgccgctttcatccgaactcgccgtcatggagacggtcggcgtccgcgtcgacgcggcggcgctcgccgcctacggcgaggaattgcgcgaggcggcggcgaaagtcgagcgggagatttacgagctggccgggacgacgttcaacatcggatcgacgaaacagctcggcgaaattttgttcgataagctggggctgcccgtcgtcaagaaaacgaaaaccggctattccaccgacgcagacgtgctggaggaactggcgccgtaccatccgatcgtcgaaaagattttgcattaccgccaactgacgaaattgcagtcgacctacatcgaggggcttttgaaagaaatccgtccgcaaaccggtaaaatccatacgtattatcagcagacgatcgcggcgacggggcggctgagcagtcagtttcccaatcttcagaacattccgatccgtctcgaagaggggcggaaaatccgcaaggcgttcgttccgtcagaaccgggatggctgatgctcgccgccgactattcgcagatcgaactgcgcgtgctcgcgcacgtttccggcgacgaacggctgaaggaagcgtttcggacaggcatggacatccacacgaagaccgcgatggacgtgttcggcgtttccgaagaccgcgtcgacgcgcgcatgcggcggcaggcgaaggcggtcaatttcggcatcatctacggcatcagcgatttcggactggcgcaaaacctgaacatttcccgcaaggaggcggcggagttcatccggcaatatttcgccgtcttttcgggcgtcaaggcgtaccgcgagcggatcgtcgagcaggcgcgccgcgacggttacgtgacgaccctgctcggtcgcaggcgctatttggatgacatcaacgcgtcgaattacaacctccgctcgttcgcggagcggacggcgatgaatacgccgatccagggcacggccgccgacatcatcaagaccgcgatggtgcgtctgacgcggcggatgcgcgacgtcggactgaagagccgcatgctgctgcaggttcacgacgagctcgtgtttgaagtgccgccggacgagctcgacgcgatgcgggagcttgtgacggacgtcatggagtcggcggtcccgctcgacgtgccgctgaaggtcgacgtcagctggggcgccgactggtacgcggcgaagtgagggaagcgggatcc

SEQ ID NO: 1078 - DNA, 2792 bp, Artificial Sequence
  Description of Artificial Sequence: Synthetic Caldibacillus cellulovorans CompA.2 DNA Polymerase P823C
atgaaatacctgctgccgaccgctgctgctggtctgctgctcctcgctgcccagccggcgatggccatgggcaaactgattctggtcgacggaaacagcgtcgccaaccgggcgttttacgccgtccggctgctcagcacgcgcggcggcctgcacacaaacgcggtgtacggattcgccaacatgttgctcaagctgatcgaggaggaacggccgacgcattttctcgtcgcgttcgacgcgggcaaggcgacgttccgtcatcgcgaatacgaggcctacaaggcgggtcgcctgcagacgccgcccgagctgtccgagcagtttccgtacatccgggagctcgtccgggcgttcggcgtcgcgtccggcgagctggaggaatacgaggcggacgacatgatcggtacgctggcgaaacgggcggaggccgagggcgtcgacacgctggtcgtcaccggcgaccgcgatttgctccagctcgtatcggaccgcgtgaccgtcgcgctgacgcgcaagggcatcacggaaacggagcggtacgacccggcgcgcatccgcgaggaatacggcttcgatcccgaccgcatccgcgacctcaaagggctgatgggcgacgcgtctgacaatcttcccggcgttcccggcgtcggtgagaaaaccgcactgaaactgctcaggcagtacggttcgctggagagcgtcctggaacacgcgtcggaaatcgccggaaagctcggtgaaaatctgcgggcgcacgccgacgccgcccgattgagcaagcggctggcgacgatcgactgcgcggtaccgttgcagtcgggatgggactggctgcgcctcggcgaaccggaccgcgccgcgctcgcctcgctgttgcggcagctcgaattcaagtcgctgttgaaacggctcggactcgacggcacgtccgccgatgccgacgtcgacggcgtccgttcctccgcgcggccggcggacgagaaacggccgagggccgtcgccgtcgctgaggagggcgtcgacgtccgctgtccggatcgcccggaagaagtcgaagaagcgctgtcgcggctggaagccgcccagtcggtcgtcgtcgaggtgacgggcgacaacccgcacgacggcgaagtgcgcggcgtcgcatggtgggacggacatacggcgtatttcattccgtttgaacggctggtgcagtccgacatgcggccgctggccgactggctcgccgacgcgcgtcggccgaagcgtacgcacgactcccatcgcgctgaagtggcgctgttctggcacggccttgcgtttcgcggcacgtcgttctgcacgcatatcgccgcctatttgctcgaccccacggaatcgcgccatacgctggcggacctgtcgcgccgctacggtctgccgccggtaccggaagccgaggacgtttacggcaagggcgcgaagttcaaggttcccgatcgcgacacgctggcgcgttacgtcggccgcaaggccgccctagtcgcgcggctcgttccgctgctcgaggcggatttggcggcctgcggcatgcgttcgcttttttacgacctggagctgccgctttcatccgaactcgccgtcatggagacggtcggcgtccgcgtcgacgcggcggcgctcgccgcctacggcgaggaattgcgcgaggcggcggcgaaagtcgagcgggagatttacgagctggccgggacgacgttcaacatcggatcgacgaaacagctcggcgaaattttgttcgataagctggggctgcccgtcgtcaagaaaacgaaaaccggctattccaccgacgcagacgtgctggaggaactggcgccgtaccatccgatcgtcgaaaagattttgcattaccgccaactgacgaaattgcagtcgacctacatcgaggggcttttgaaagaaatccgtccgcaaaccggtaaaatccatacgtattatcagcagacgatcgcggcgacggggcggctgagcagtcagtttcccaatcttcagaacattccgatccgtctcgaagaggggcggaaaatccgcaaggcgttcgttccgtcagaaccgggatggctgatgctcgccgccgactattcgcagatcgaactgcgcgtgctcgcgcacgtttccggcgacgaacggctgaaggaagcgtttcggacaggcatggacatccacacgaagaccgcgatggacgtgttcggcgtttccgaagaccgcgtcgacgcgcgcatgcggcggcaggcgaaggcggtcaatttcggcatcatctacggcatcagcgatttcggactggcgcaaaacctgaacatttcccgcaaggaggcggcggagttcatccggcaatatttcgccgtcttttcgggcgtcaaggcgtaccgcgagcggatcgtcgagcaggcgcgccgcgacggttacgtgacgaccctgctcggtcgcaggcgctatttgtgtgacatcaacgcgtcgaattacaacctccgctcgttcgcggagcggacggcgatgaatacgccgatccagggcacggccgccgacatcatcaagaccgcgatggtgcgtctgacgcggcggatgcgcgacgtcggactgaagagccgcatgctgctgcaggttcacgacgagctcgtgtttgaagtgccgccggacgagctcgacgcgatgcgggagcttgtgacggacgtcatggagtcggcggtcccgctcgacgtgccgctgaaggtcgacgtcagctggggcgccgactggtacgcggcgaagtgagggaagcgggatcc

SEQ ID NO: 1079 - DNA, 2792 bp, Artificial Sequence
  Description of Artificial Sequence: Synthetic Caldibacillus cellulovorans CompA.2 DNA Polymerase P823E
atgaaatacctgctgccgaccgctgctgctggtctgctgctcctcgctgcccagccggcgatggccatgggcaaactgattctggtcgacggaaacagcgtcgccaaccgggcgttttacgccgtccggctgctcagcacgcgcggcggcctgcacacaaacgcggtgtacggattcgccaacatgttgctcaagctgatcgaggaggaacggccgacgcattttctcgtcgcgttcgacgcgggcaaggcgacgttccgtcatcgcgaatacgaggcctacaaggcgggtcgcctgcagacgccgcccgagctgtccgagcagtttccgtacatccgggagctcgtccgggcgttcggcgtcgcgtccggcgagctggaggaatacgaggcggacgacatgatcggtacgctggcgaaacgggcggaggccgagggcgtcgacacgctggtcgtcaccggcgaccgcgatttgctccagctcgtatcggaccgcgtgaccgtcgcgctgacgcgcaagggcatcacggaaacggagcggtacgacccggcgcgcatccgcgaggaatacggcttcgatcccgaccgcatccgcgacctcaaagggctgatgggcgacgcgtctgacaatcttcccggcgttcccggcgtcggtgagaaaaccgcactgaaactgctcaggcagtacggttcgctggagagcgtcctggaacacgcgtcggaaatcgccggaaagctcggtgaaaatctgcgggcgcacgccgacgccgcccgattgagcaagcggctggcgacgatcgactgcgcggtaccgttgcagtcgggatgggactggctgcgcctcggcgaaccggaccgcgccgcgctcgcctcgctgttgcggcagctcgaattcaagtcgctgttgaaacggctcggactcgacggcacgtccgccgatgccgacgtcgacggcgtccgttcctccgcgcggccggcggacgagaaacggccgagggccgtcgccgtcgctgaggagggcgtcgacgtccgctgtccggatcgcccggaagaagtcgaagaagcgctgtcgcggctggaagccgcccagtcggtcgtcgtcgaggtgacgggcgacaacccgcacgacggcgaagtgcgcggcgtcgcatggtgggacggacatacggcgtatttcattccgtttgaacggctggtgcagtccgacatgcggccgctggccgactggctcgccgacgcgcgtcggccgaagcgtacgcacgactcccatcgcgctgaagtggcgctgttctggcacggccttgcgtttcgcggcacgtcgttctgcacgcatatcgccgcctatttgctcgaccccacggaatcgcgccatacgctggcggacctgtcgcgccgctacggtctgccgccggtaccggaagccgaggacgtttacggcaagggcgcgaagttcaaggttcccgatcgcgacacgctggcgcgttacgtcggccgcaaggccgccctagtcgcgcggctcgttccgctgctcgaggcggatttggcggcctgcggcatgcgttcgcttttttacgacctggagctgccgctttcatccgaactcgccgtcatggagacggtcggcgtccgcgtcgacgcggcggcgctcgccgcctacggcgaggaattgcgcgaggcggcggcgaaagtcgagcgggagatttacgagctggccgggacgacgttcaacatcggatcgacgaaacagctcggcgaaattttgttcgataagctggggctgcccgtcgtcaagaaaacgaaaaccggctattccaccgacgcagacgtgctggaggaactggcgccgtaccatccgatcgtcgaaaagattttgcattaccgccaactgacgaaattgcagtcgacctacatcgaggggcttttgaaagaaatccgtccgcaaaccggtaaaatccatacgtattatcagcagacgatcgcggcgacggggcggctgagcagtcagtttcccaatcttcagaacattccgatccgtctcgaagaggggcggaaaatccgcaaggcgttcgttccgtcagaaccgggatggctgatgctcgccgccgactattcgcagatcgaactgcgcgtgctcgcgcacgtttccggcgacgaacggctgaaggaagcgtttcggacaggcatggacatccacacgaagaccgcgatggacgtgttcggcgtttccgaagaccgcgtcgacgcgcgcatgcggcggcaggcgaaggcggtcaatttcggcatcatctacggcatcagcgatttcggactggcgcaaaacctgaacatttcccgcaaggaggcggcggagttcatccggcaatatttcgccgtcttttcgggcgtcaaggcgtaccgcgagcggatcgtcgagcaggcgcgccgcgacggttacgtgacgaccctgctcggtcgcaggcgctatttggaagacatcaacgcgtcgaattacaacctccgctcgttcgcggagcggacggcgatgaatacgccgatccagggcacggccgccgacatcatcaagaccgcgatggtgcgtctgacgcggcggatgcgcgacgtcggactgaagagccgcatgctgctgcaggttcacgacgagctcgtgtttgaagtgccgccggacgagctcgacgcgatgcgggagcttgtgacggacgtcatggagtcggcggtcccgctcgacgtgccgctgaaggtcgacgtcagctggggcgccgactggtacgcggcgaagtgagggaagcgggatcc

SEQ ID NO: 1080 - DNA, 2792 bp, Artificial Sequence
  Description of Artificial Sequence: Synthetic Caldibacillus cellulovorans CompA.2 DNA Polymerase P823Q
atgaaatacctgctgccgaccgctgctgctggtctgctgctcctcgctgcccagccggcgatggccatgggcaaactgattctggtcgacggaaacagcgtcgccaaccgggcgttttacgccgtccggctgctcagcacgcgcggcggcctgcacacaaacgcggtgtacggattcgccaacatgttgctcaagctgatcgaggaggaacggccgacgcattttctcgtcgcgttcgacgcgggcaaggcgacgttccgtcatcgcgaatacgaggcctacaaggcgggtcgcctgcagacgccgcccgagctgtccgagcagtttccgtacatccgggagctcgtccgggcgttcggcgtcgcgtccggcgagctggaggaatacgaggcggacgacatgatcggtacgctggcgaaacgggcggaggccgagggcgtcgacacgctggtcgtcaccggcgaccgcgatttgctccagctcgtatcggaccgcgtgaccgtcgcgctgacgcgcaagggcatcacggaaacggagcggtacgacccggcgcgcatccgcgaggaatacggcttcgatcccgaccgcatccgcgacctcaaagggctgatgggcgacgcgtctgacaatcttcccggcgttcccggcgtcggtgagaaaaccgcactgaaactgctcaggcagtacggttcgctggagagcgtcctggaacacgcgtcggaaatcgccggaaagctcggtgaaaatctgcgggcgcacgccgacgccgcccgattgagcaagcggctggcgacgatcgactgcgcggtaccgttgcagtcgggatgggactggctgcgcctcggcgaaccggaccgcgccgcgctcgcctcgctgttgcggcagctcgaattcaagtcgctgttgaaacggctcggactcgacggcacgtccgccgatgccgacgtcgacggcgtccgttcctccgcgcggccggcggacgagaaacggccgagggccgtcgccgtcgctgaggagggcgtcgacgtccgctgtccggatcgcccggaagaagtcgaagaagcgctgtcgcggctggaagccgcccagtcggtcgtcgtcgaggtgacgggcgacaacccgcacgacggcgaagtgcgcggcgtcgcatggtgggacggacatacggcgtatttcattccgtttgaacggctggtgcagtccgacatgcggccgctggccgactggctcgccgacgcgcgtcggccgaagcgtacgcacgactcccatcgcgctgaagtggcgctgttctggcacggccttgcgtttcgcggcacgtcgttctgcacgcatatcgccgcctatttgctcgaccccacggaatcgcgccatacgctggcggacctgtcgcgccgctacggtctgccgccggtaccggaagccgaggacgtttacggcaagggcgcgaagttcaaggttcccgatcgcgacacgctggcgcgttacgtcggccgcaaggccgccctagtcgcgcggctcgttccgctgctcgaggcggatttggcggcctgcggcatgcgttcgcttttttacgacctggagctgccgctttcatccgaactcgccgtcatggagacggtcggcgtccgcgtcgacgcggcggcgctcgccgcctacggcgaggaattgcgcgaggcggcggcgaaagtcgagcgggagatttacgagctggccgggacgacgttcaacatcggatcgacgaaacagctcggcgaaattttgttcgataagctggggctgcccgtcgtcaagaaaacgaaaaccggctattccaccgacgcagacgtgctggaggaactggcgccgtaccatccgatcgtcgaaaagattttgcattaccgccaactgacgaaattgcagtcgacctacatcgaggggcttttgaaagaaatccgtccgcaaaccggtaaaatccatacgtattatcagcagacgatcgcggcgacggggcggctgagcagtcagtttcccaatcttcagaacattccgatccgtctcgaagaggggcggaaaatccgcaaggcgttcgttccgtcagaaccgggatggctgatgctcgccgccgactattcgcagatcgaactgcgcgtgctcgcgcacgtttccggcgacgaacggctgaaggaagcgtttcggacaggcatggacatccacacgaagaccgcgatggacgtgttcggcgtttccgaagaccgcgtcgacgcgcgcatgcggcggcaggcgaaggcggtcaatttcggcatcatctacggcatcagcgatttcggactggcgcaaaacctgaacatttcccgcaaggaggcggcggagttcatccggcaatatttcgccgtcttttcgggcgtcaaggcgtaccgcgagcggatcgtcgagcaggcgcgccgcgacggttacgtgacgaccctgctcggtcgcaggcgctatttgcaagacatcaacgcgtcgaattacaacctccgctcgttcgcggagcggacggcgatgaatacgccgatccagggcacggccgccgacatcatcaagaccgcgatggtgcgtctgacgcggcggatgcgcgacgtcggactgaagagccgcatgctgctgcaggttcacgacgagctcgtgtttgaagtgccgccggacgagctcgacgcgatgcgggagcttgtgacggacgtcatggagtcggcggtcccgctcgacgtgccgctgaaggtcgacgtcagctggggcgccgactggtacgcggcgaagtgagggaagcgggatcc

SEQ ID NO: 1081 - DNA, 2792 bp, Artificial Sequence
  Description of Artificial Sequence: Synthetic Caldibacillus cellulovorans CompA.2 DNA Polymerase P823G
atgaaatacctgctgccgaccgctgctgctggtctgctgctcctcgctgcccagccggcgatggccatgggcaaactgattctggtcgacggaaacagcgtcgccaaccgggcgttttacgccgtccggctgctcagcacgcgcggcggcctgcacacaaacgcggtgtacggattcgccaacatgttgctcaagctgatcgaggaggaacggccgacgcattttctcgtcgcgttcgacgcgggcaaggcgacgttccgtcatcgcgaatacgaggcctacaaggcgggtcgcctgcagacgccgcccgagctgtccgagcagtttccgtacatccgggagctcgtccgggcgttcggcgtcgcgtccggcgagctggaggaatacgaggcggacgacatgatcggtacgctggcgaaacgggcggaggccgagggcgtcgacacgctggtcgtcaccggcgaccgcgatttgctccagctcgtatcggaccgcgtgaccgtcgcgctgacgcgcaagggcatcacggaaacggagcggtacgacccggcgcgcatccgcgaggaatacggcttcgatcccgaccgcatccgcgacctcaaagggctgatgggcgacgcgtctgacaatcttcccggcgttcccggcgtcggtgagaaaaccgcactgaaactgctcaggcagtacggttcgctggagagcgtcctggaacacgcgtcggaaatcgccggaaagctcggtgaaaatctgcgggcgcacgccgacgccgcccgattgagcaagcggctggcgacgatcgactgcgcggtaccgttgcagtcgggatgggactggctgcgcctcggcgaaccggaccgcgccgcgctcgcctcgctgttgcggcagctcgaattcaagtcgctgttgaaacggctcggactcgacggcacgtccgccgatgccgacgtcgacggcgtccgttcctccgcgcggccggcggacgagaaacggccgagggccgtcgccgtcgctgaggagggcgtcgacgtccgctgtccggatcgcccggaagaagtcgaagaagcgctgtcgcggctggaagccgcccagtcggtcgtcgtcgaggtgacgggcgacaacccgcacgacggcgaagtgcgcggcgtcgcatggtgggacggacatacggcgtatttcattccgtttgaacggctggtgcagtccgacatgcggccgctggccgactggctcgccgacgcgcgtcggccgaagcgtacgcacgactcccatcgcgctgaagtggcgctgttctggcacggccttgcgtttcgcggcacgtcgttctgcacgcatatcgccgcctatttgctcgaccccacggaatcgcgccatacgctggcggacctgtcgcgccgctacggtctgccgccggtaccggaagccgaggacgtttacggcaagggcgcgaagttcaaggttcccgatcgcgacacgctggcgcgttacgtcggccgcaaggccgccctagtcgcgcggctcgttccgctgctcgaggcggatttggcggcctgcggcatgcgttcgcttttttacgacctggagctgccgctttcatccgaactcgccgtcatggagacggtcggcgtccgcgtcgacgcggcggcgctcgccgcctacggcgaggaattgcgcgaggcggcggcgaaagtcgagcgggagatttacgagctggccgggacgacgttcaacatcggatcgacgaaacagctcggcgaaattttgttcgataagctggggctgcccgtcgtcaagaaaacgaaaaccggctattccaccgacgcagacgtgctggaggaactggcgccgtaccatccgatcgtcgaaaagattttgcattaccgccaactgacgaaattgcagtcgacctacatcgaggggcttttgaaagaaatccgtccgcaaaccggtaaaatccatacgtattatcagcagacgatcgcggcgacggggcggctgagcagtcagtttcccaatcttcagaacattccgatccgtctcgaagaggggcggaaaatccgcaaggcgttcgttccgtcagaaccgggatggctgatgctcgccgccgactattcgcagatcgaactgcgcgtgctcgcgcacgtttccggcgacgaacggctgaaggaagcgtttcggacaggcatggacatccacacgaagaccgcgatggacgtgttcggcgtttccgaagaccgcgtcgacgcgcgcatgcggcggcaggcgaaggcggtcaatttcggcatcatctacggcatcagcgatttcggactggcgcaaaacctgaacatttcccgcaaggaggcggcggagttcatccggcaatatttcgccgtcttttcgggcgtcaaggcgtaccgcgagcggatcgtcgagcaggcgcgccgcgacggttacgtgacgaccctgctcggtcgcaggcgctatttgggtgacatcaacgcgtcgaattacaacctccgctcgttcgcggagcggacggcgatgaatacgccgatccagggcacggccgccgacatcatcaagaccgcgatggtgcgtctgacgcggcggatgcgcgacgtcggactgaagagccgcatgctgctgcaggttcacgacgagctcgtgtttgaagtgccgccggacgagctcgacgcgatgcgggagcttgtgacggacgtcatggagtcggcggtcccgctcgacgtgccgctgaaggtcgacgtcagctggggcgccgactggtacgcggcgaagtgagggaagcgggatcc

SEQ ID NO: 1082 - DNA, 2792 bp, Artificial Sequence
  Description of Artificial Sequence: Synthetic Caldibacillus cellulovorans CompA.2 DNA Polymerase P823H
atgaaatacctgctgccgaccgctgctgctggtctgctgctcctcgctgcccagccggcgatggccatgggcaaactgattctggtcgacggaaacagcgtcgccaaccgggcgttttacgccgtccggctgctcagcacgcgcggcggcctgcacacaaacgcggtgtacggattcgccaacatgttgctcaagctgatcgaggaggaacggccgacgcattttctcgtcgcgttcgacgcgggcaaggcgacgttccgtcatcgcgaatacgaggcctacaaggcgggtcgcctgcagacgccgcccgagctgtccgagcagtttccgtacatccgggagctcgtccgggcgttcggcgtcgcgtccggcgagctggaggaatacgaggcggacgacatgatcggtacgctggcgaaacgggcggaggccgagggcgtcgacacgctggtcgtcaccggcgaccgcgatttgctccagctcgtatcggaccgcgtgaccgtcgcgctgacgcgcaagggcatcacggaaacggagcggtacgacccggcgcgcatccgcgaggaatacggcttcgatcccgaccgcatccgcgacctcaaagggctgatgggcgacgcgtctgacaatcttcccggcgttcccggcgtcggtgagaaaaccgcactgaaactgctcaggcagtacggttcgctggagagcgtcctggaacacgcgtcggaaatcgccggaaagctcggtgaaaatctgcgggcgcacgccgacgccgcccgattgagcaagcggctggcgacgatcgactgcgcggtaccgttgcagtcgggatgggactggctgcgcctcggcgaaccggaccgcgccgcgctcgcctcgctgttgcggcagctcgaattcaagtcgctgttgaaacggctcggactcgacggcacgtccgccgatgccgacgtcgacggcgtccgttcctccgcgcggccggcggacgagaaacggccgagggccgtcgccgtcgctgaggagggcgtcgacgtccgctgtccggatcgcccggaagaagtcgaagaagcgctgtcgcggctggaagccgcccagtcggtcgtcgtcgaggtgacgggcgacaacccgcacgacggcgaagtgcgcggcgtcgcatggtgggacggacatacggcgtatttcattccgtttgaacggctggtgcagtccgacatgcggccgctggccgactggctcgccgacgcgcgtcggccgaagcgtacgcacgactcccatcgcgctgaagtggcgctgttctggcacggccttgcgtttcgcggcacgtcgttctgcacgcatatcgccgcctatttgctcgaccccacggaatcgcgccatacgctggcggacctgtcgcgccgctacggtctgccgccggtaccggaagccgaggacgtttacggcaagggcgcgaagttcaaggttcccgatcgcgacacgctggcgcgttacgtcggccgcaaggccgccctagtcgcgcggctcgttccgctgctcgaggcggatttggcggcctgcggcatgcgttcgcttttttacgacctggagctgccgctttcatccgaactcgccgtcatggagacggtcggcgtccgcgtcgacgcggcggcgctcgccgcctacggcgaggaattgcgcgaggcggcggcgaaagtcgagcgggagatttacgagctggccgggacgacgttcaacatcggatcgacgaaacagctcggcgaaattttgttcgataagctggggctgcccgtcgtcaagaaaacgaaaaccggctattccaccgacgcagacgtgctggaggaactggcgccgtaccatccgatcgtcgaaaagattttgcattaccgccaactgacgaaattgcagtcgacctacatcgaggggcttttgaaagaaatccgtccgcaaaccggtaaaatccatacgtattatcagcagacgatcgcggcgacggggcggctgagcagtcagtttcccaatcttcagaacattccgatccgtctcgaagaggggcggaaaatccgcaaggcgttcgttccgtcagaaccgggatggctgatgctcgccgccgactattcgcagatcgaactgcgcgtgctcgcgcacgtttccggcgacgaacggctgaaggaagcgtttcggacaggcatggacatccacacgaagaccgcgatggacgtgttcggcgtttccgaagaccgcgtcgacgcgcgcatgcggcggcaggcgaaggcggtcaatttcggcatcatctacggcatcagcgatttcggactggcgcaaaacctgaacatttcccgcaaggaggcggcggagttcatccggcaatatttcgccgtcttttcgggcgtcaaggcgtaccgcgagcggatcgtcgagcaggcgcgccgcgacggttacgtgacgaccctgctcggtcgcaggcgctatttgcatgacatcaacgcgtcgaattacaacctccgctcgttcgcggagcggacggcgatgaatacgccgatccagggcacggccgccgacatcatcaagaccgcgatggtgcgtctgacgcggcggatgcgcgacgtcggactgaagagccgcatgctgctgcaggttcacgacgagctcgtgtttgaagtgccgccggacgagctcgacgcgatgcgggagcttgtgacggacgtcatggagtcggcggtcccgctcgacgtgccgctgaaggtcgacgtcagctggggcgccgactggtacgcggcgaagtgagggaagcgggatcc

SEQ ID NO: 1083 - DNA, 2792 bp, Artificial Sequence
  Description of Artificial Sequence: Synthetic Caldibacillus cellulovorans CompA.2 DNA Polymerase P823I
atgaaatacctgctgccgaccgctgctgctggtctgctgctcctcgctgcccagccggcgatggccatgggcaaactgattctggtcgacggaaacagcgtcgccaaccgggcgttttacgccgtccggctgctcagcacgcgcggcggcctgcacacaaacgcggtgtacggattcgccaacatgttgctcaagctgatcgaggaggaacggccgacgcattttctcgtcgcgttcgacgcgggcaaggcgacgttccgtcatcgcgaatacgaggcctacaaggcgggtcgcctgcagacgccgcccgagctgtccgagcagtttccgtacatccgggagctcgtccgggcgttcggcgtcgcgtccggcgagctggaggaatacgaggcggacgacatgatcggtacgctggcgaaacgggcggaggccgagggcgtcgacacgctggtcgtcaccggcgaccgcgatttgctccagctcgtatcggaccgcgtgaccgtcgcgctgacgcgcaagggcatcacggaaacggagcggtacgacccggcgcgcatccgcgaggaatacggcttcgatcccgaccgcatccgcgacctcaaagggctgatgggcgacgcgtctgacaatcttcccggcgttcccggcgtcggtgagaaaaccgcactgaaactgctcaggcagtacggttcgctggagagcgtcctggaacacgcgtcggaaatcgccggaaagctcggtgaaaatctgcgggcgcacgccgacgccgcccgattgagcaagcggctggcgacgatcgactgcgcggtaccgttgcagtcgggatgggactggctgcgcctcggcgaaccggaccgcgccgcgctcgcctcgctgttgcggcagctcgaattcaagtcgctgttgaaacggctcggactcgacggcacgtccgccgatgccgacgtcgacggcgtccgttcctccgcgcggccggcggacgagaaacggccgagggccgtcgccgtcgctgaggagggcgtcgacgtccgctgtccggatcgcccggaagaagtcgaagaagcgctgtcgcggctggaagccgcccagtcggtcgtcgtcgaggtgacgggcgacaacccgcacgacggcgaagtgcgcggcgtcgcatggtgggacggacatacggcgtatttcattccgtttgaacggctggtgcagtccgacatgcggccgctggccgactggctcgccgacgcgcgtcggccgaagcgtacgcacgactcccatcgcgctgaagtggcgctgttctggcacggccttgcgtttcgcggcacgtcgttctgcacgcatatcgccgcctatttgctcgaccccacggaatcgcgccatacgctggcggacctgtcgcgccgctacggtctgccgccggtaccggaagccgaggacgtttacggcaagggcgcgaagttcaaggttcccgatcgcgacacgctggcgcgttacgtcggccgcaaggccgccctagtcgcgcggctcgttccgctgctcgaggcggatttggcggcctgcggcatgcgttcgcttttttacgacctggagctgccgctttcatccgaactcgccgtcatggagacggtcggcgtccgcgtcgacgcggcggcgctcgccgcctacggcgaggaattgcgcgaggcggcggcgaaagtcgagcgggagatttacgagctggccgggacgacgttcaacatcggatcgacgaaacagctcggcgaaattttgttcgataagctggggctgcccgtcgtcaagaaaacgaaaaccggctattccaccgacgcagacgtgctggaggaactggcgccgtaccatccgatcgtcgaaaagattttgcattaccgccaactgacgaaattgcagtcgacctacatcgaggggcttttgaaagaaatccgtccgcaaaccggtaaaatccatacgtattatcagcagacgatcgcggcgacggggcggctgagcagtcagtttcccaatcttcagaacattccgatccgtctcgaagaggggcggaaaatccgcaaggcgttcgttccgtcagaaccgggatggctgatgctcgccgccgactattcgcagatcgaactgcgcgtgctcgcgcacgtttccggcgacgaacggctgaaggaagcgtttcggacaggcatggacatccacacgaagaccgcgatggacgtgttcggcgtttccgaagaccgcgtcgacgcgcgcatgcggcggcaggcgaaggcggtcaatttcggcatcatctacggcatcagcgatttcggactggcgcaaaacctgaacatttcccgcaaggaggcggcggagttcatccggcaatatttcgccgtcttttcgggcgtcaaggcgtaccgcgagcggatcgtcgagcaggcgcgccgcgacggttacgtgacgaccctgctcggtcgcaggcgctatttgattgacatcaacgcgtcgaattacaacctccgctcgttcgcggagcggacggcgatgaatacgccgatccagggcacggccgccgacatcatcaagaccgcgatggtgcgtctgacgcggcggatgcgcgacgtcggactgaagagccgcatgctgctgcaggttcacgacgagctcgtgtttgaagtgccgccggacgagctcgacgcgatgcgggagcttgtgacggacgtcatggagtcggcggtcccgctcgacgtgccgctgaaggtcgacgtcagctggggcgccgactggtacgcggcgaagtgagggaagcgggatcc

SEQ ID NO: 1084 - DNA, 2792 bp, Artificial Sequence
  Description of Artificial Sequence: Synthetic Caldibacillus cellulovorans CompA.2 DNA Polymerase P823L
atgaaatacctgctgccgaccgctgctgctggtctgctgctcctcgctgcccagccggcgatggccatgggcaaactgattctggtcgacggaaacagcgtcgccaaccgggcgttttacgccgtccggctgctcagcacgcgcggcggcctgcacacaaacgcggtgtacggattcgccaacatgttgctcaagctgatcgaggaggaacggccgacgcattttctcgtcgcgttcgacgcgggcaaggcgacgttccgtcatcgcgaatacgaggcctacaaggcgggtcgcctgcagacgccgcccgagctgtccgagcagtttccgtacatccgggagctcgtccgggcgttcggcgtcgcgtccggcgagctggaggaatacgaggcggacgacatgatcggtacgctggcgaaacgggcggaggccgagggcgtcgacacgctggtcgtcaccggcgaccgcgatttgctccagctcgtatcggaccgcgtgaccgtcgcgctgacgcgcaagggcatcacggaaacggagcggtacgacccggcgcgcatccgcgaggaatacggcttcgatcccgaccgcatccgcgacctcaaagggctgatgggcgacgcgtctgacaatcttcccggcgttcccggcgtcggtgagaaaaccgcactgaaactgctcaggcagtacggttcgctggagagcgtcctggaacacgcgtcggaaatcgccggaaagctcggtgaaaatctgcgggcgcacgccgacgccgcccgattgagcaagcggctggcgacgatcgactgcgcggtaccgttgcagtcgggatgggactggctgcgcctcggcgaaccggaccgcgccgcgctcgcctcgctgttgcggcagctcgaattcaagtcgctgttgaaacggctcggactcgacggcacgtccgccgatgccgacgtcgacggcgtccgttcctccgcgcggccggcggacgagaaacggccgagggccgtcgccgtcgctgaggagggcgtcgacgtccgctgtccggatcgcccggaagaagtcgaagaagcgctgtcgcggctggaagccgcccagtcggtcgtcgtcgaggtgacgggcgacaacccgcacgacggcgaagtgcgcggcgtcgcatggtgggacggacatacggcgtatttcattccgtttgaacggctggtgcagtccgacatgcggccgctggccgactggctcgccgacgcgcgtcggccgaagcgtacgcacgactcccatcgcgctgaagtggcgctgttctggcacggccttgcgtttcgcggcacgtcgttctgcacgcatatcgccgcctatttgctcgaccccacggaatcgcgccatacgctggcggacctgtcgcgccgctacggtctgccgccggtaccggaagccgaggacgtttacggcaagggcgcgaagttcaaggttcccgatcgcgacacgctggcgcgttacgtcggccgcaaggccgccctagtcgcgcggctcgttccgctgctcgaggcggatttggcggcctgcggcatgcgttcgcttttttacgacctggagctgccgctttcatccgaactcgccgtcatggagacggtcggcgtccgcgtcgacgcggcggcgctcgccgcctacggcgaggaattgcgcgaggcggcggcgaaagtcgagcgggagatttacgagctggccgggacgacgttcaacatcggatcgacgaaacagctcggcgaaattttgttcgataagctggggctgcccgtcgtcaagaaaacgaaaaccggctattccaccgacgcagacgtgctggaggaactggcgccgtaccatccgatcgtcgaaaagattttgcattaccgccaactgacgaaattgcagtcgacctacatcgaggggcttttgaaagaaatccgtccgcaaaccggtaaaatccatacgtattatcagcagacgatcgcggcgacggggcggctgagcagtcagtttcccaatcttcagaacattccgatccgtctcgaagaggggcggaaaatccgcaaggcgttcgttccgtcagaaccgggatggctgatgctcgccgccgactattcgcagatcgaactgcgcgtgctcgcgcacgtttccggcgacgaacggctgaaggaagcgtttcggacaggcatggacatccacacgaagaccgcgatggacgtgttcggcgtttccgaagaccgcgtcgacgcgcgcatgcggcggcaggcgaaggcggtcaatttcggcatcatctacggcatcagcgatttcggactggcgcaaaacctgaacatttcccgcaaggaggcggcggagttcatccggcaatatttcgccgtcttttcgggcgtcaaggcgtaccgcgagcggatcgtcgagcaggcgcgccgcgacggttacgtgacgaccctgctcggtcgcaggcgctatttgcttgacatcaacgcgtcgaattacaacctccgctcgttcgcggagcggacggcgatgaatacgccgatccagggcacggccgccgacatcatcaagaccgcgatggtgcgtctgacgcggcggatgcgcgacgtcggactgaagagccgcatgctgctgcaggttcacgacgagctcgtgtttgaagtgccgccggacgagctcgacgcgatgcgggagcttgtgacggacgtcatggagtcggcggtcccgctcgacgtgccgctgaaggtcgacgtcagctggggcgccgactggtacgcggcgaagtgagggaagcgggatcc

SEQ ID NO: 1085 - DNA, 2792 bp, Artificial Sequence
  Description of Artificial Sequence: Synthetic Caldibacillus cellulovorans CompA.2 DNA Polymerase P823K
atgaaatacctgctgccgaccgctgctgctggtctgctgctcctcgctgcccagccggcgatggccatgggcaaactgattctggtcgacggaaacagcgtcgccaaccgggcgttttacgccgtccggctgctcagcacgcgcggcggcctgcacacaaacgcggtgtacggattcgccaacatgttgctcaagctgatcgaggaggaacggccgacgcattttctcgtcgcgttcgacgcgggcaaggcgacgttccgtcatcgcgaatacgaggcctacaaggcgggtcgcctgcagacgccgcccgagctgtccgagcagtttccgtacatccgggagctcgtccgggcgttcggcgtcgcgtccggcgagctggaggaatacgaggcggacgacatgatcggtacgctggcgaaacgggcggaggccgagggcgtcgacacgctggtcgtcaccggcgaccgcgatttgctccagctcgtatcggaccgcgtgaccgtcgcgctgacgcgcaagggcatcacggaaacggagcggtacgacccggcgcgcatccgcgaggaatacggcttcgatcccgaccgcatccgcgacctcaaagggctgatgggcgacgcgtctgacaatcttcccggcgttcccggcgtcggtgagaaaaccgcactgaaactgctcaggcagtacggttcgctggagagcgtcctggaacacgcgtcggaaatcgccggaaagctcggtgaaaatctgcgggcgcacgccgacgccgcccgattgagcaagcggctggcgacgatcgactgcgcggtaccgttgcagtcgggatgggactggctgcgcctcggcgaaccggaccgcgccgcgctcgcctcgctgttgcggcagctcgaattcaagtcgctgttgaaacggctcggactcgacggcacgtccgccgatgccgacgtcgacggcgtccgttcctccgcgcggccggcggacgagaaacggccgagggccgtcgccgtcgctgaggagggcgtcgacgtccgctgtccggatcgcccggaagaagtcgaagaagcgctgtcgcggctggaagccgcccagtcggtcgtcgtcgaggtgacgggcgacaacccgcacgacggcgaagtgcgcggcgtcgcatggtgggacggacatacggcgtatttcattccgtttgaacggctggtgcagtccgacatgcggccgctggccgactggctcgccgacgcgcgtcggccgaagcgtacgcacgactcccatcgcgctgaagtggcgctgttctggcacggccttgcgtttcgcggcacgtcgttctgcacgcatatcgccgcctatttgctcgaccccacggaatcgcgccatacgctggcggacctgtcgcgccgctacggtctgccgccggtaccggaagccgaggacgtttacggcaagggcgcgaagttcaaggttcccgatcgcgacacgctggcgcgttacgtcggccgcaaggccgccctagtcgcgcggctcgttccgctgctcgaggcggatttggcggcctgcggcatgcgttcgcttttttacgacctggagctgccgctttcatccgaactcgccgtcatggagacggtcggcgtccgcgtcgacgcggcggcgctcgccgcctacggcgaggaattgcgcgaggcggcggcgaaagtcgagcgggagatttacgagctggccgggacgacgttcaacatcggatcgacgaaacagctcggcgaaattttgttcgataagctggggctgcccgtcgtcaagaaaacgaaaaccggctattccaccgacgcagacgtgctggaggaactggcgccgtaccatccgatcgtcgaaaagattttgcattaccgccaactgacgaaattgcagtcgacctacatcgaggggcttttgaaagaaatccgtccgcaaaccggtaaaatccatacgtattatcagcagacgatcgcggcgacggggcggctgagcagtcagtttcccaatcttcagaacattccgatccgtctcgaagaggggcggaaaatccgcaaggcgttcgttccgtcagaaccgggatggctgatgctcgccgccgactattcgcagatcgaactgcgcgtgctcgcgcacgtttccggcgacgaacggctgaaggaagcgtttcggacaggcatggacatccacacgaagaccgcgatggacgtgttcggcgtttccgaagaccgcgtcgacgcgcgcatgcggcggcaggcgaaggcggtcaatttcggcatcatctacggcatcagcgatttcggactggcgcaaaacctgaacatttcccgcaaggaggcggcggagttcatccggcaatatttcgccgtcttttcgggcgtcaaggcgtaccgcgagcggatcgtcgagcaggcgcgccgcgacggttacgtgacgaccctgctcggtcgcaggcgctatttgaaagacatcaacgcgtcgaattacaacctccgctcgttcgcggagcggacggcgatgaatacgccgatccagggcacggccgccgacatcatcaagaccgcgatggtgcgtctgacgcggcggatgcgcgacgtcggactgaagagccgcatgctgctgcaggttcacgacgagctcgtgtttgaagtgccgccggacgagctcgacgcgatgcgggagcttgtgacggacgtcatggagtcggcggtcccgctcgacgtgccgctgaaggtcgacgtcagctggggcgccgactggtacgcggcgaagtgagggaagcgggatcc

SEQ ID NO: 1086 - DNA, 2792 bp, Artificial Sequence
  Description of Artificial Sequence: Synthetic Caldibacillus cellulovorans CompA.2 DNA Polymerase P823M
atgaaatacctgctgccgaccgctgctgctggtctgctgctcctcgctgcccagccggcgatggccatgggcaaactgattctggtcgacggaaacagcgtcgccaaccgggcgttttacgccgtccggctgctcagcacgcgcggcggcctgcacacaaacgcggtgtacggattcgccaacatgttgctcaagctgatcgaggaggaacggccgacgcattttctcgtcgcgttcgacgcgggcaaggcgacgttccgtcatcgcgaatacgaggcctacaaggcgggtcgcctgcagacgccgcccgagctgtccgagcagtttccgtacatccgggagctcgtccgggcgttcggcgtcgcgtccggcgagctggaggaatacgaggcggacgacatgatcggtacgctggcgaaacgggcggaggccgagggcgtcgacacgctggtcgtcaccggcgaccgcgatttgctccagctcgtatcggaccgcgtgaccgtcgcgctgacgcgcaagggcatcacggaaacggagcggtacgacccggcgcgcatccgcgaggaatacggcttcgatcccgaccgcatccgcgacctcaaagggctgatgggcgacgcgtctgacaatcttcccggcgttcccggcgtcggtgagaaaaccgcactgaaactgctcaggcagtacggttcgctggagagcgtcctggaacacgcgtcggaaatcgccggaaagctcggtgaaaatctgcgggcgcacgccgacgccgcccgattgagcaagcggctggcgacgatcgactgcgcggtaccgttgcagtcgggatgggactggctgcgcctcggcgaaccggaccgcgccgcgctcgcctcgctgttgcggcagctcgaattcaagtcgctgttgaaacggctcggactcgacggcacgtccgccgatgccgacgtcgacggcgtccgttcctccgcgcggccggcggacgagaaacggccgagggccgtcgccgtcgctgaggagggcgtcgacgtccgctgtccggatcgcccggaagaagtcgaagaagcgctgtcgcggctggaagccgcccagtcggtcgtcgtcgaggtgacgggcgacaacccgcacgacggcgaagtgcgcggcgtcgcatggtgggacggacatacggcgtatttcattccgtttgaacggctggtgcagtccgacatgcggccgctggccgactggctcgccgacgcgcgtcggccgaagcgtacgcacgactcccatcgcgctgaagtggcgctgttctggcacggccttgcgtttcgcggcacgtcgttctgcacgcatatcgccgcctatttgctcgaccccacggaatcgcgccatacgctggcggacctgtcgcgccgctacggtctgccgccggtaccggaagccgaggacgtttacggcaagggcgcgaagttcaaggttcccgatcgcgacacgctggcgcgttacgtcggccgcaaggccgccctagtcgcgcggctcgttccgctgctcgaggcggatttggcggcctgcggcatgcgttcgcttttttacgacctggagctgccgctttcatccgaactcgccgtcatggagacggtcggcgtccgcgtcgacgcggcggcgctcgccgcctacggcgaggaattgcgcgaggcggcggcgaaagtcgagcgggagatttacgagctggccgggacgacgttcaacatcggatcgacgaaacagctcggcgaaattttgttcgataagctggggctgcccgtcgtcaagaaaacgaaaaccggctattccaccgacgcagacgtgctggaggaactggcgccgtaccatccgatcgtcgaaaagattttgcattaccgccaactgacgaaattgcagtcgacctacatcgaggggcttttgaaagaaatccgtccgcaaaccggtaaaatccatacgtattatcagcagacgatcgcggcgacggggcggctgagcagtcagtttcccaatcttcagaacattccgatccgtctcgaagaggggcggaaaatccgcaaggcgttcgttccgtcagaaccgggatggctgatgctcgccgccgactattcgcagatcgaactgcgcgtgctcgcgcacgtttccggcgacgaacggctgaaggaagcgtttcggacaggcatggacatccacacgaagaccgcgatggacgtgttcggcgtttccgaagaccgcgtcgacgcgcgcatgcggcggcaggcgaaggcggtcaatttcggcatcatctacggcatcagcgatttcggactggcgcaaaacctgaacatttcccgcaaggaggcggcggagttcatccggcaatatttcgccgtcttttcgggcgtcaaggcgtaccgcgagcggatcgtcgagcaggcgcgccgcgacggttacgtgacgaccctgctcggtcgcaggcgctatttgatggacatcaacgcgtcgaattacaacctccgctcgttcgcggagcggacggcgatgaatacgccgatccagggcacggccgccgacatcatcaagaccgcgatggtgcgtctgacgcggcggatgcgcgacgtcggactgaagagccgcatgctgctgcaggttcacgacgagctcgtgtttgaagtgccgccggacgagctcgacgcgatgcgggagcttgtgacggacgtcatggagtcggcggtcccgctcgacgtgccgctgaaggtcgacgtcagctggggcgccgactggtacgcggcgaagtgagggaagcgggatcc

SEQ ID NO: 1087 - DNA, 2792 bp, Artificial Sequence
  Description of Artificial Sequence: Synthetic Caldibacillus cellulovorans CompA.2 DNA Polymerase P823F
atgaaatacctgctgccgaccgctgctgctggtctgctgctcctcgctgcccagccggcgatggccatgggcaaactgattctggtcgacggaaacagcgtcgccaaccgggcgttttacgccgtccggctgctcagcacgcgcggcggcctgcacacaaacgcggtgtacggattcgccaacatgttgctcaagctgatcgaggaggaacggccgacgcattttctcgtcgcgttcgacgcgggcaaggcgacgttccgtcatcgcgaatacgaggcctacaaggcgggtcgcctgcagacgccgcccgagctgtccgagcagtttccgtacatccgggagctcgtccgggcgttcggcgtcgcgtccggcgagctggaggaatacgaggcggacgacatgatcggtacgctggcgaaacgggcggaggccgagggcgtcgacacgctggtcgtcaccggcgaccgcgatttgctccagctcgtatcggaccgcgtgaccgtcgcgctgacgcgcaagggcatcacggaaacggagcggtacgacccggcgcgcatccgcgaggaatacggcttcgatcccgaccgcatccgcgacctcaaagggctgatgggcgacgcgtctgacaatcttcccggcgttcccggcgtcggtgagaaaaccgcactgaaactgctcaggcagtacggttcgctggagagcgtcctggaacacgcgtcggaaatcgccggaaagctcggtgaaaatctgcgggcgcacgccgacgccgcccgattgagcaagcggctggcgacgatcgactgcgcggtaccgttgcagtcgggatgggactggctgcgcctcggcgaaccggaccgcgccgcgctcgcctcgctgttgcggcagctcgaattcaagtcgctgttgaaacggctcggactcgacggcacgtccgccgatgccgacgtcgacggcgtccgttcctccgcgcggccggcggacgagaaacggccgagggccgtcgccgtcgctgaggagggcgtcgacgtccgctgtccggatcgcccggaagaagtcgaagaagcgctgtcgcggctggaagccgcccagtcggtcgtcgtcgaggtgacgggcgacaacccgcacgacggcgaagtgcgcggcgtcgcatggtgggacggacatacggcgtatttcattccgtttgaacggctggtgcagtccgacatgcggccgctggccgactggctcgccgacgcgcgtcggccgaagcgtacgcacgactcccatcgcgctgaagtggcgctgttctggcacggccttgcgtttcgcggcacgtcgttctgcacgcatatcgccgcctatttgctcgaccccacggaatcgcgccatacgctggcggacctgtcgcgccgctacggtctgccgccggtaccggaagccgaggacgtttacggcaagggcgcgaagttcaaggttcccgatcgcgacacgctggcgcgttacgtcggccgcaaggccgccctagtcgcgcggctcgttccgctgctcgaggcggatttggcggcctgcggcatgcgttcgcttttttacgacctggagctgccgctttcatccgaactcgccgtcatggagacggtcggcgtccgcgtcgacgcggcggcgctcgccgcctacggcgaggaattgcgcgaggcggcggcgaaagtcgagcgggagatttacgagctggccgggacgacgttcaacatcggatcgacgaaacagctcggcgaaattttgttcgataagctggggctgcccgtcgtcaagaaaacgaaaaccggctattccaccgacgcagacgtgctggaggaactggcgccgtaccatccgatcgtcgaaaagattttgcattaccgccaactgacgaaattgcagtcgacctacatcgaggggcttttgaaagaaatccgtccgcaaaccggtaaaatccatacgtattatcagcagacgatcgcggcgacggggcggctgagcagtcagtttcccaatcttcagaacattccgatccgtctcgaagaggggcggaaaatccgcaaggcgttcgttccgtcagaaccgggatggctgatgctcgccgccgactattcgcagatcgaactgcgcgtgctcgcgcacgtttccggcgacgaacggctgaaggaagcgtttcggacaggcatggacatccacacgaagaccgcgatggacgtgttcggcgtttccgaagaccgcgtcgacgcgcgcatgcggcggcaggcgaaggcggtcaatttcggcatcatctacggcatcagcgatttcggactggcgcaaaacctgaacatttcccgcaaggaggcggcggagttcatccggcaatatttcgccgtcttttcgggcgtcaaggcgtaccgcgagcggatcgtcgagcaggcgcgccgcgacggttacgtgacgaccctgctcggtcgcaggcgctatttgtttgacatcaacgcgtcgaattacaacctccgctcgttcgcggagcggacggcgatgaatacgccgatccagggcacggccgccgacatcatcaagaccgcgatggtgcgtctgacgcggcggatgcgcgacgtcggactgaagagccgcatgctgctgcaggttcacgacgagctcgtgtttgaagtgccgccggacgagctcgacgcgatgcgggagcttgtgacggacgtcatggagtcggcggtcccgctcgacgtgccgctgaaggtcgacgtcagctggggcgccgactggtacgcggcgaagtgagggaagcgggatcc

SEQ ID NO: 1088 - DNA, 2792 bp, Artificial Sequence
  Description of Artificial Sequence: Synthetic Caldibacillus cellulovorans CompA.2 DNA Polymerase P823S
atgaaatacctgctgccgaccgctgctgctggtctgctgctcctcgctgcccagccggcgatggccatgggcaaactgattctggtcgacggaaacagcgtcgccaaccgggcgttttacgccgtccggctgctcagcacgcgcggcggcctgcacacaaacgcggtgtacggattcgccaacatgttgctcaagctgatcgaggaggaacggccgacgcattttctcgtcgcgttcgacgcgggcaaggcgacgttccgtcatcgcgaatacgaggcctacaaggcgggtcgcctgcagacgccgcccgagctgtccgagcagtttccgtacatccgggagctcgtccgggcgttcggcgtcgcgtccggcgagctggaggaatacgaggcggacgacatgatcggtacgctggcgaaacgggcggaggccgagggcgtcgacacgctggtcgtcaccggcgaccgcgatttgctccagctcgtatcggaccgcgtgaccgtcgcgctgacgcgcaagggcatcacggaaacggagcggtacgacccggcgcgcatccgcgaggaatacggcttcgatcccgaccgcatccgcgacctcaaagggctgatgggcgacgcgtctgacaatcttcccggcgttcccggcgtcggtgagaaaaccgcactgaaactgctcaggcagtacggttcgctggagagcgtcctggaacacgcgtcggaaatcgccggaaagctcggtgaaaatctgcgggcgcacgccgacgccgcccgattgagcaagcggctggcgacgatcgactgcgcggtaccgttgcagtcgggatgggactggctgcgcctcggcgaaccggaccgcgccgcgctcgcctcgctgttgcggcagctcgaattcaagtcgctgttgaaacggctcggactcgacggcacgtccgccgatgccgacgtcgacggcgtccgttcctccgcgcggccggcggacgagaaacggccgagggccgtcgccgtcgctgaggagggcgtcgacgtccgctgtccggatcgcccggaagaagtcgaagaagcgctgtcgcggctggaagccgcccagtcggtcgtcgtcgaggtgacgggcgacaacccgcacgacggcgaagtgcgcggcgtcgcatggtgggacggacatacggcgtatttcattccgtttgaacggctggtgcagtccgacatgcggccgctggccgactggctcgccgacgcgcgtcggccgaagcgtacgcacgactcccatcgcgctgaagtggcgctgttctggcacggccttgcgtttcgcggcacgtcgttctgcacgcatatcgccgcctatttgctcgaccccacggaatcgcgccatacgctggcggacctgtcgcgccgctacggtctgccgccggtaccggaagccgaggacgtttacggcaagggcgcgaagttcaaggttcccgatcgcgacacgctggcgcgttacgtcggccgcaaggccgccctagtcgcgcggctcgttccgctgctcgaggcggatttggcggcctgcggcatgcgttcgcttttttacgacctggagctgccgctttcatccgaactcgccgtcatggagacggtcggcgtccgcgtcgacgcggcggcgctcgccgcctacggcgaggaattgcgcgaggcggcggcgaaagtcgagcgggagatttacgagctggccgggacgacgttcaacatcggatcgacgaaacagctcggcgaaattttgttcgataagctggggctgcccgtcgtcaagaaaacgaaaaccggctattccaccgacgcagacgtgctggaggaactggcgccgtaccatccgatcgtcgaaaagattttgcattaccgccaactgacgaaattgcagtcgacctacatcgaggggcttttgaaagaaatccgtccgcaaaccggtaaaatccatacgtattatcagcagacgatcgcggcgacggggcggctgagcagtcagtttcccaatcttcagaacattccgatccgtctcgaagaggggcggaaaatccgcaaggcgttcgttccgtcagaaccgggatggctgatgctcgccgccgactattcgcagatcgaactgcgcgtgctcgcgcacgtttccggcgacgaacggctgaaggaagcgtttcggacaggcatggacatccacacgaagaccgcgatggacgtgttcggcgtttccgaagaccgcgtcgacgcgcgcatgcggcggcaggcgaaggcggtcaatttcggcatcatctacggcatcagcgatttcggactggcgcaaaacctgaacatttcccgcaaggaggcggcggagttcatccggcaatatttcgccgtcttttcgggcgtcaaggcgtaccgcgagcggatcgtcgagcaggcgcgccgcgacggttacgtgacgaccctgctcggtcgcaggcgctatttgtctgacatcaacgcgtcgaattacaacctccgctcgttcgcggagcggacggcgatgaatacgccgatccagggcacggccgccgacatcatcaagaccgcgatggtgcgtctgacgcggcggatgcgcgacgtcggactgaagagccgcatgctgctgcaggttcacgacgagctcgtgtttgaagtgccgccggacgagctcgacgcgatgcgggagcttgtgacggacgtcatggagtcggcggtcccgctcgacgtgccgctgaaggtcgacgtcagctggggcgccgactggtacgcggcgaagtgagggaagcgggatcc

SEQ ID NO: 1089 - DNA, 2792 bp, Artificial Sequence
  Description of Artificial Sequence: Synthetic Caldibacillus cellulovorans CompA.2 DNA Polymerase P823T
atgaaatacctgctgccgaccgctgctgctggtctgctgctcctcgctgcccagccggcgatggccatgggcaaactgattctggtcgacggaaacagcgtcgccaaccgggcgttttacgccgtccggctgctcagcacgcgcggcggcctgcacacaaacgcggtgtacggattcgccaacatgttgctcaagctgatcgaggaggaacggccgacgcattttctcgtcgcgttcgacgcgggcaaggcgacgttccgtcatcgcgaatacgaggcctacaaggcgggtcgcctgcagacgccgcccgagctgtccgagcagtttccgtacatccgggagctcgtccgggcgttcggcgtcgcgtccggcgagctggaggaatacgaggcggacgacatgatcggtacgctggcgaaacgggcggaggccgagggcgtcgacacgctggtcgtcaccggcgaccgcgatttgctccagctcgtatcggaccgcgtgaccgtcgcgctgacgcgcaagggcatcacggaaacggagcggtacgacccggcgcgcatccgcgaggaatacggcttcgatcccgaccgcatccgcgacctcaaagggctgatgggcgacgcgtctgacaatcttcccggcgttcccggcgtcggtgagaaaaccgcactgaaactgctcaggcagtacggttcgctggagagcgtcctggaacacgcgtcggaaatcgccggaaagctcggtgaaaatctgcgggcgcacgccgacgccgcccgattgagcaagcggctggcgacgatcgactgcgcggtaccgttgcagtcgggatgggactggctgcgcctcggcgaaccggaccgcgccgcgctcgcctcgctgttgcggcagctcgaattcaagtcgctgttgaaacggctcggactcgacggcacgtccgccgatgccgacgtcgacggcgtccgttcctccgcgcggccggcggacgagaaacggccgagggccgtcgccgtcgctgaggagggcgtcgacgtccgctgtccggatcgcccggaagaagtcgaagaagcgctgtcgcggctggaagccgcccagtcggtcgtcgtcgaggtgacgggcgacaacccgcacgacggcgaagtgcgcggcgtcgcatggtgggacggacatacggcgtatttcattccgtttgaacggctggtgcagtccgacatgcggccgctggccgactggctcgccgacgcgcgtcggccgaagcgtacgcacgactcccatcgcgctgaagtggcgctgttctggcacggccttgcgtttcgcggcacgtcgttctgcacgcatatcgccgcctatttgctcgaccccacggaatcgcgccatacgctggcggacctgtcgcgccgctacggtctgccgccggtaccggaagccgaggacgtttacggcaagggcgcgaagttcaaggttcccgatcgcgacacgctggcgcgttacgtcggccgcaaggccgccctagtcgcgcggctcgttccgctgctcgaggcggatttggcggcctgcggcatgcgttcgcttttttacgacctggagctgccgctttcatccgaactcgccgtcatggagacggtcggcgtccgcgtcgacgcggcggcgctcgccgcctacggcgaggaattgcgcgaggcggcggcgaaagtcgagcgggagatttacgagctggccgggacgacgttcaacatcggatcgacgaaacagctcggcgaaattttgttcgataagctggggctgcccgtcgtcaagaaaacgaaaaccggctattccaccgacgcagacgtgctggaggaactggcgccgtaccatccgatcgtcgaaaagattttgcattaccgccaactgacgaaattgcagtcgacctacatcgaggggcttttgaaagaaatccgtccgcaaaccggtaaaatccatacgtattatcagcagacgatcgcggcgacggggcggctgagcagtcagtttcccaatcttcagaacattccgatccgtctcgaagaggggcggaaaatccgcaaggcgttcgttccgtcagaaccgggatggctgatgctcgccgccgactattcgcagatcgaactgcgcgtgctcgcgcacgtttccggcgacgaacggctgaaggaagcgtttcggacaggcatggacatccacacgaagaccgcgatggacgtgttcggcgtttccgaagaccgcgtcgacgcgcgcatgcggcggcaggcgaaggcggtcaatttcggcatcatctacggcatcagcgatttcggactggcgcaaaacctgaacatttcccgcaaggaggcggcggagttcatccggcaatatttcgccgtcttttcgggcgtcaaggcgtaccgcgagcggatcgtcgagcaggcgcgccgcgacggttacgtgacgaccctgctcggtcgcaggcgctatttgactgacatcaacgcgtcgaattacaacctccgctcgttcgcggagcggacggcgatgaatacgccgatccagggcacggccgccgacatcatcaagaccgcgatggtgcgtctgacgcggcggatgcgcgacgtcggactgaagagccgcatgctgctgcaggttcacgacgagctcgtgtttgaagtgccgccggacgagctcgacgcgatgcgggagcttgtgacggacgtcatggagtcggcggtcccgctcgacgtgccgctgaaggtcgacgtcagctggggcgccgactggtacgcggcgaagtgagggaagcgggatcc

SEQ ID NO: 1090 - DNA, 2792 bp, Artificial Sequence
  Description of Artificial Sequence: Synthetic Caldibacillus cellulovorans CompA.2 DNA Polymerase P823W
atgaaatacctgctgccgaccgctgctgctggtctgctgctcctcgctgcccagccggcgatggccatgggcaaactgattctggtcgacggaaacagcgtcgccaaccgggcgttttacgccgtccggctgctcagcacgcgcggcggcctgcacacaaacgcggtgtacggattcgccaacatgttgctcaagctgatcgaggaggaacggccgacgcattttctcgtcgcgttcgacgcgggcaaggcgacgttccgtcatcgcgaatacgaggcctacaaggcgggtcgcctgcagacgccgcccgagctgtccgagcagtttccgtacatccgggagctcgtccgggcgttcggcgtcgcgtccggcgagctggaggaatacgaggcggacgacatgatcggtacgctggcgaaacgggcggaggccgagggcgtcgacacgctggtcgtcaccggcgaccgcgatttgctccagctcgtatcggaccgcgtgaccgtcgcgctgacgcgcaagggcatcacggaaacggagcggtacgacccggcgcgcatccgcgaggaatacggcttcgatcccgaccgcatccgcgacctcaaagggctgatgggcgacgcgtctgacaatcttcccggcgttcccggcgtcggtgagaaaaccgcactgaaactgctcaggcagtacggttcgctggagagcgtcctggaacacgcgtcggaaatcgccggaaagctcggtgaaaatctgcgggcgcacgccgacgccgcccgattgagcaagcggctggcgacgatcgactgcgcggtaccgttgcagtcgggatgggactggctgcgcctcggcgaaccggaccgcgccgcgctcgcctcgctgttgcggcagctcgaattcaagtcgctgttgaaacggctcggactcgacggcacgtccgccgatgccgacgtcgacggcgtccgttcctccgcgcggccggcggacgagaaacggccgagggccgtcgccgtcgctgaggagggcgtcgacgtccgctgtccggatcgcccggaagaagtcgaagaagcgctgtcgcggctggaagccgcccagtcggtcgtcgtcgaggtgacgggcgacaacccgcacgacggcgaagtgcgcggcgtcgcatggtgggacggacatacggcgtatttcattccgtttgaacggctggtgcagtccgacatgcggccgctggccgactggctcgccgacgcgcgtcggccgaagcgtacgcacgactcccatcgcgctgaagtggcgctgttctggcacggccttgcgtttcgcggcacgtcgttctgcacgcatatcgccgcctatttgctcgaccccacggaatcgcgccatacgctggcggacctgtcgcgccgctacggtctgccgccggtaccggaagccgaggacgtttacggcaagggcgcgaagttcaaggttcccgatcgcgacacgctggcgcgttacgtcggccgcaaggccgccctagtcgcgcggctcgttccgctgctcgaggcggatttggcggcctgcggcatgcgttcgcttttttacgacctggagctgccgctttcatccgaactcgccgtcatggagacggtcggcgtccgcgtcgacgcggcggcgctcgccgcctacggcgaggaattgcgcgaggcggcggcgaaagtcgagcgggagatttacgagctggccgggacgacgttcaacatcggatcgacgaaacagctcggcgaaattttgttcgataagctggggctgcccgtcgtcaagaaaacgaaaaccggctattccaccgacgcagacgtgctggaggaactggcgccgtaccatccgatcgtcgaaaagattttgcattaccgccaactgacgaaattgcagtcgacctacatcgaggggcttttgaaagaaatccgtccgcaaaccggtaaaatccatacgtattatcagcagacgatcgcggcgacggggcggctgagcagtcagtttcccaatcttcagaacattccgatccgtctcgaagaggggcggaaaatccgcaaggcgttcgttccgtcagaaccgggatggctgatgctcgccgccgactattcgcagatcgaactgcgcgtgctcgcgcacgtttccggcgacgaacggctgaaggaagcgtttcggacaggcatggacatccacacgaagaccgcgatggacgtgttcggcgtttccgaagaccgcgtcgacgcgcgcatgcggcggcaggcgaaggcggtcaatttcggcatcatctacggcatcagcgatttcggactggcgcaaaacctgaacatttcccgcaaggaggcggcggagttcatccggcaatatttcgccgtcttttcgggcgtcaaggcgtaccgcgagcggatcgtcgagcaggcgcgccgcgacggttacgtgacgaccctgctcggtcgcaggcgctatttgtgggacatcaacgcgtcgaattacaacctccgctcgttcgcggagcggacggcgatgaatacgccgatccagggcacggccgccgacatcatcaagaccgcgatggtgcgtctgacgcggcggatgcgcgacgtcggactgaagagccgcatgctgctgcaggttcacgacgagctcgtgtttgaagtgccgccggacgagctcgacgcgatgcgggagcttgtgacggacgtcatggagtcggcggtcccgctcgacgtgccgctgaaggtcgacgtcagctggggcgccgactggtacgcggcgaagtgagggaagcgggatcc

SEQ ID NO: 1091 - DNA, 2792 bp, Artificial Sequence
  Description of Artificial Sequence: Synthetic Caldibacillus cellulovorans CompA.2 DNA Polymerase P823Y
atgaaatacctgctgccgaccgctgctgctggtctgctgctcctcgctgcccagccggcgatggccatgggcaaactgattctggtcgacggaaacagcgtcgccaaccgggcgttttacgccgtccggctgctcagcacgcgcggcggcctgcacacaaacgcggtgtacggattcgccaacatgttgctcaagctgatcgaggaggaacggccgacgcattttctcgtcgcgttcgacgcgggcaaggcgacgttccgtcatcgcgaatacgaggcctacaaggcgggtcgcctgcagacgccgcccgagctgtccgagcagtttccgtacatccgggagctcgtccgggcgttcggcgtcgcgtccggcgagctggaggaatacgaggcggacgacatgatcggtacgctggcgaaacgggcggaggccgagggcgtcgacacgctggtcgtcaccggcgaccgcgatttgctccagctcgtatcggaccgcgtgaccgtcgcgctgacgcgcaagggcatcacggaaacggagcggtacgacccggcgcgcatccgcgaggaatacggcttcgatcccgaccgcatccgcgacctcaaagggctgatgggcgacgcgtctgacaatcttcccggcgttcccggcgtcggtgagaaaaccgcactgaaactgctcaggcagtacggttcgctggagagcgtcctggaacacgcgtcggaaatcgccggaaagctcggtgaaaatctgcgggcgcacgccgacgccgcccgattgagcaagcggctggcgacgatcgactgcgcggtaccgttgcagtcgggatgggactggctgcgcctcggcgaaccggaccgcgccgcgctcgcctcgctgttgcggcagctcgaattcaagtcgctgttgaaacggctcggactcgacggcacgtccgccgatgccgacgtcgacggcgtccgttcctccgcgcggccggcggacgagaaacggccgagggccgtcgccgtcgctgaggagggcgtcgacgtccgctgtccggatcgcccggaagaagtcgaagaagcgctgtcgcggctggaagccgcccagtcggtcgtcgtcgaggtgacgggcgacaacccgcacgacggcgaagtgcgcggcgtcgcatggtgggacggacatacggcgtatttcattccgtttgaacggctggtgcagtccgacatgcggccgctggccgactggctcgccgacgcgcgtcggccgaagcgtacgcacgactcccatcgcgctgaagtggcgctgttctggcacggccttgcgtttcgcggcacgtcgttctgcacgcatatcgccgcctatttgctcgaccccacggaatcgcgccatacgctggcggacctgtcgcgccgctacggtctgccgccggtaccggaagccgaggacgtttacggcaagggcgcgaagttcaaggttcccgatcgcgacacgctggcgcgttacgtcggccgcaaggccgccctagtcgcgcggctcgttccgctgctcgaggcggatttggcggcctgcggcatgcgttcgcttttttacgacctggagctgccgctttcatccgaactcgccgtcatggagacggtcggcgtccgcgtcgacgcggcggcgctcgccgcctacggcgaggaattgcgcgaggcggcggcgaaagtcgagcgggagatttacgagctggccgggacgacgttcaacatcggatcgacgaaacagctcggcgaaattttgttcgataagctggggctgcccgtcgtcaagaaaacgaaaaccggctattccaccgacgcagacgtgctggaggaactggcgccgtaccatccgatcgtcgaaaagattttgcattaccgccaactgacgaaattgcagtcgacctacatcgaggggcttttgaaagaaatccgtccgcaaaccggtaaaatccatacgtattatcagcagacgatcgcggcgacggggcggctgagcagtcagtttcccaatcttcagaacattccgatccgtctcgaagaggggcggaaaatccgcaaggcgttcgttccgtcagaaccgggatggctgatgctcgccgccgactattcgcagatcgaactgcgcgtgctcgcgcacgtttccggcgacgaacggctgaaggaagcgtttcggacaggcatggacatccacacgaagaccgcgatggacgtgttcggcgtttccgaagaccgcgtcgacgcgcgcatgcggcggcaggcgaaggcggtcaatttcggcatcatctacggcatcagcgatttcggactggcgcaaaacctgaacatttcccgcaaggaggcggcggagttcatccggcaatatttcgccgtcttttcgggcgtcaaggcgtaccgcgagcggatcgtcgagcaggcgcgccgcgacggttacgtgacgaccctgctcggtcgcaggcgctatttgtatgacatcaacgcgtcgaattacaacctccgctcgttcgcggagcggacggcgatgaatacgccgatccagggcacggccgccgacatcatcaagaccgcgatggtgcgtctgacgcggcggatgcgcgacgtcggactgaagagccgcatgctgctgcaggttcacgacgagctcgtgtttgaagtgccgccggacgagctcgacgcgatgcgggagcttgtgacggacgtcatggagtcggcggtcccgctcgacgtgccgctgaaggtcgacgtcagctggggcgccgactggtacgcggcgaagtgagggaagcgggatcc

SEQ ID NO: 1092 - DNA, 2792 bp, Artificial Sequence
  Description of Artificial Sequence: Synthetic Caldibacillus cellulovorans CompA.2 DNA Polymerase P823V
atgaaatacctgctgccgaccgctgctgctggtctgctgctcctcgctgcccagccggcgatggccatgggcaaactgattctggtcgacggaaacagcgtcgccaaccgggcgttttacgccgtccggctgctcagcacgcgcggcggcctgcacacaaacgcggtgtacggattcgccaacatgttgctcaagctgatcgaggaggaacggccgacgcattttctcgtcgcgttcgacgcgggcaaggcgacgttccgtcatcgcgaatacgaggcctacaaggcgggtcgcctgcagacgccgcccgagctgtccgagcagtttccgtacatccgggagctcgtccgggcgttcggcgtcgcgtccggcgagctggaggaatacgaggcggacgacatgatcggtacgctggcgaaacgggcggaggccgagggcgtcgacacgctggtcgtcaccggcgaccgcgatttgctccagctcgtatcggaccgcgtgaccgtcgcgctgacgcgcaagggcatcacggaaacggagcggtacgacccggcgcgcatccgcgaggaatacggcttcgatcccgaccgcatccgcgacctcaaagggctgatgggcgacgcgtctgacaatcttcccggcgttcccggcgtcggtgagaaaaccgcactgaaactgctcaggcagtacggttcgctggagagcgtcctggaacacgcgtcggaaatcgccggaaagctcggtgaaaatctgcgggcgcacgccgacgccgcccgattgagcaagcggctggcgacgatcgactgcgcggtaccgttgcagtcgggatgggactggctgcgcctcggcgaaccggaccgcgccgcgctcgcctcgctgttgcggcagctcgaattcaagtcgctgttgaaacggctcggactcgacggcacgtccgccgatgccgacgtcgacggcgtccgttcctccgcgcggccggcggacgagaaacggccgagggccgtcgccgtcgctgaggagggcgtcgacgtccgctgtccggatcgcccggaagaagtcgaagaagcgctgtcgcggctggaagccgcccagtcggtcgtcgtcgaggtgacgggcgacaacccgcacgacggcgaagtgcgcggcgtcgcatggtgggacggacatacggcgtatttcattccgtttgaacggctggtgcagtccgacatgcggccgctggccgactggctcgccgacgcgcgtcggccgaagcgtacgcacgactcccatcgcgctgaagtggcgctgttctggcacggccttgcgtttcgcggcacgtcgttctgcacgcatatcgccgcctatttgctcgaccccacggaatcgcgccatacgctggcggacctgtcgcgccgctacggtctgccgccggtaccggaagccgaggacgtttacggcaagggcgcgaagttcaaggttcccgatcgcgacacgctggcgcgttacgtcggccgcaaggccgccctagtcgcgcggctcgttccgctgctcgaggcggatttggcggcctgcggcatgcgttcgcttttttacgacctggagctgccgctttcatccgaactcgccgtcatggagacggtcggcgtccgcgtcgacgcggcggcgctcgccgcctacggcgaggaattgcgcgaggcggcggcgaaagtcgagcgggagatttacgagctggccgggacgacgttcaacatcggatcgacgaaacagctcggcgaaattttgttcgataagctggggctgcccgtcgtcaagaaaacgaaaaccggctattccaccgacgcagacgtgctggaggaactggcgccgtaccatccgatcgtcgaaaagattttgcattaccgccaactgacgaaattgcagtcgacctacatcgaggggcttttgaaagaaatccgtccgcaaaccggtaaaatccatacgtattatcagcagacgatcgcggcgacggggcggctgagcagtcagtttcccaatcttcagaacattccgatccgtctcgaagaggggcggaaaatccgcaaggcgttcgttccgtcagaaccgggatggctgatgctcgccgccgactattcgcagatcgaactgcgcgtgctcgcgcacgtttccggcgacgaacggctgaaggaagcgtttcggacaggcatggacatccacacgaagaccgcgatggacgtgttcggcgtttccgaagaccgcgtcgacgcgcgcatgcggcggcaggcgaaggcggtcaatttcggcatcatctacggcatcagcgatttcggactggcgcaaaacctgaacatttcccgcaaggaggcggcggagttcatccggcaatatttcgccgtcttttcgggcgtcaaggcgtaccgcgagcggatcgtcgagcaggcgcgccgcgacggttacgtgacgaccctgctcggtcgcaggcgctatttggttgacatcaacgcgtcgaattacaacctccgctcgttcgcggagcggacggcgatgaatacgccgatccagggcacggccgccgacatcatcaagaccgcgatggtgcgtctgacgcggcggatgcgcgacgtcggactgaagagccgcatgctgctgcaggttcacgacgagctcgtgtttgaagtgccgccggacgagctcgacgcgatgcgggagcttgtgacggacgtcatggagtcggcggtcccgctcgacgtgccgctgaaggtcgacgtcagctggggcgccgactggtacgcggcgaagtgagggaagcgggatcc

SEQ ID NO: 1093 - DNA, 2792 bp, Artificial Sequence
  Description of Artificial Sequence: Synthetic Caldibacillus cellulovorans CompA.2 DNA Polymerase D824A
atgaaatacctgctgccgaccgctgctgctggtctgctgctcctcgctgcccagccggcgatggccatgggcaaactgattctggtcgacggaaacagcgtcgccaaccgggcgttttacgccgtccggctgctcagcacgcgcggcggcctgcacacaaacgcggtgtacggattcgccaacatgttgctcaagctgatcgaggaggaacggccgacgcattttctcgtcgcgttcgacgcgggcaaggcgacgttccgtcatcgcgaatacgaggcctacaaggcgggtcgcctgcagacgccgcccgagctgtccgagcagtttccgtacatccgggagctcgtccgggcgttcggcgtcgcgtccggcgagctggaggaatacgaggcggacgacatgatcggtacgctggcgaaacgggcggaggccgagggcgtcgacacgctggtcgtcaccggcgaccgcgatttgctccagctcgtatcggaccgcgtgaccgtcgcgctgacgcgcaagggcatcacggaaacggagcggtacgacccggcgcgcatccgcgaggaatacggcttcgatcccgaccgcatccgcgacctcaaagggctgatgggcgacgcgtctgacaatcttcccggcgttcccggcgtcggtgagaaaaccgcactgaaactgctcaggcagtacggttcgctggagagcgtcctggaacacgcgtcggaaatcgccggaaagctcggtgaaaatctgcgggcgcacgccgacgccgcccgattgagcaagcggctggcgacgatcgactgcgcggtaccgttgcagtcgggatgggactggctgcgcctcggcgaaccggaccgcgccgcgctcgcctcgctgttgcggcagctcgaattcaagtcgctgttgaaacggctcggactcgacggcacgtccgccgatgccgacgtcgacggcgtccgttcctccgcgcggccggcggacgagaaacggccgagggccgtcgccgtcgctgaggagggcgtcgacgtccgctgtccggatcgcccggaagaagtcgaagaagcgctgtcgcggctggaagccgcccagtcggtcgtcgtcgaggtgacgggcgacaacccgcacgacggcgaagtgcgcggcgtcgcatggtgggacggacatacggcgtatttcattccgtttgaacggctggtgcagtccgacatgcggccgctggccgactggctcgccgacgcgcgtcggccgaagcgtacgcacgactcccatcgcgctgaagtggcgctgttctggcacggccttgcgtttcgcggcacgtcgttctgcacgcatatcgccgcctatttgctcgaccccacggaatcgcgccatacgctggcggacctgtcgcgccgctacggtctgccgccggtaccggaagccgaggacgtttacggcaagggcgcgaagttcaaggttcccgatcgcgacacgctggcgcgttacgtcggccgcaaggccgccctagtcgcgcggctcgttccgctgctcgaggcggatttggcggcctgcggcatgcgttcgcttttttacgacctggagctgccgctttcatccgaactcgccgtcatggagacggtcggcgtccgcgtcgacgcggcggcgctcgccgcctacggcgaggaattgcgcgaggcggcggcgaaagtcgagcgggagatttacgagctggccgggacgacgttcaacatcggatcgacgaaacagctcggcgaaattttgttcgataagctggggctgcccgtcgtcaagaaaacgaaaaccggctattccaccgacgcagacgtgctggaggaactggcgccgtaccatccgatcgtcgaaaagattttgcattaccgccaactgacgaaattgcagtcgacctacatcgaggggcttttgaaagaaatccgtccgcaaaccggtaaaatccatacgtattatcagcagacgatcgcggcgacggggcggctgagcagtcagtttcccaatcttcagaacattccgatccgtctcgaagaggggcggaaaatccgcaaggcgttcgttccgtcagaaccgggatggctgatgctcgccgccgactattcgcagatcgaactgcgcgtgctcgcgcacgtttccggcgacgaacggctgaaggaagcgtttcggacaggcatggacatccacacgaagaccgcgatggacgtgttcggcgtttccgaagaccgcgtcgacgcgcgcatgcggcggcaggcgaaggcggtcaatttcggcatcatctacggcatcagcgatttcggactggcgcaaaacctgaacatttcccgcaaggaggcggcggagttcatccggcaatatttcgccgtcttttcgggcgtcaaggcgtaccgcgagcggatcgtcgagcaggcgcgccgcgacggttacgtgacgaccctgctcggtcgcaggcgctatttgccggctatcaacgcgtcgaattacaacctccgctcgttcgcggagcggacggcgatgaatacgccgatccagggcacggccgccgacatcatcaagaccgcgatggtgcgtctgacgcggcggatgcgcgacgtcggactgaagagccgcatgctgctgcaggttcacgacgagctcgtgtttgaagtgccgccggacgagctcgacgcgatgcgggagcttgtgacggacgtcatggagtcggcggtcccgctcgacgtgccgctgaaggtcgacgtcagctggggcgccgactggtacgcggcgaagtgagggaagcgggatcc

SEQ ID NO: 1094 - DNA, 2792 bp, Artificial Sequence
  Description of Artificial Sequence: Synthetic Caldibacillus cellulovorans CompA.2 DNA Polymerase D824R
atgaaatacctgctgccgaccgctgctgctggtctgctgctcctcgctgcccagccggcgatggccatgggcaaactgattctggtcgacggaaacagcgtcgccaaccgggcgttttacgccgtccggctgctcagcacgcgcggcggcctgcacacaaacgcggtgtacggattcgccaacatgttgctcaagctgatcgaggaggaacggccgacgcattttctcgtcgcgttcgacgcgggcaaggcgacgttccgtcatcgcgaatacgaggcctacaaggcgggtcgcctgcagacgccgcccgagctgtccgagcagtttccgtacatccgggagctcgtccgggcgttcggcgtcgcgtccggcgagctggaggaatacgaggcggacgacatgatcggtacgctggcgaaacgggcggaggccgagggcgtcgacacgctggtcgtcaccggcgaccgcgatttgctccagctcgtatcggaccgcgtgaccgtcgcgctgacgcgcaagggcatcacggaaacggagcggtacgacccggcgcgcatccgcgaggaatacggcttcgatcccgaccgcatccgcgacctcaaagggctgatgggcgacgcgtctgacaatcttcccggcgttcccggcgtcggtgagaaaaccgcactgaaactgctcaggcagtacggttcgctggagagcgtcctggaacacgcgtcggaaatcgccggaaagctcggtgaaaatctgcgggcgcacgccgacgccgcccgattgagcaagcggctggcgacgatcgactgcgcggtaccgttgcagtcgggatgggactggctgcgcctcggcgaaccggaccgcgccgcgctcgcctcgctgttgcggcagctcgaattcaagtcgctgttgaaacggctcggactcgacggcacgtccgccgatgccgacgtcgacggcgtccgttcctccgcgcggccggcggacgagaaacggccgagggccgtcgccgtcgctgaggagggcgtcgacgtccgctgtccggatcgcccggaagaagtcgaagaagcgctgtcgcggctggaagccgcccagtcggtcgtcgtcgaggtgacgggcgacaacccgcacgacggcgaagtgcgcggcgtcgcatggtgggacggacatacggcgtatttcattccgtttgaacggctggtgcagtccgacatgcggccgctggccgactggctcgccgacgcgcgtcggccgaagcgtacgcacgactcccatcgcgctgaagtggcgctgttctggcacggccttgcgtttcgcggcacgtcgttctgcacgcatatcgccgcctatttgctcgaccccacggaatcgcgccatacgctggcggacctgtcgcgccgctacggtctgccgccggtaccggaagccgaggacgtttacggcaagggcgcgaagttcaaggttcccgatcgcgacacgctggcgcgttacgtcggccgcaaggccgccctagtcgcgcggctcgttccgctgctcgaggcggatttggcggcctgcggcatgcgttcgcttttttacgacctggagctgccgctttcatccgaactcgccgtcatggagacggtcggcgtccgcgtcgacgcggcggcgctcgccgcctacggcgaggaattgcgcgaggcggcggcgaaagtcgagcgggagatttacgagctggccgggacgacgttcaacatcggatcgacgaaacagctcggcgaaattttgttcgataagctggggctgcccgtcgtcaagaaaacgaaaaccggctattccaccgacgcagacgtgctggaggaactggcgccgtaccatccgatcgtcgaaaagattttgcattaccgccaactgacgaaattgcagtcgacctacatcgaggggcttttgaaagaaatccgtccgcaaaccggtaaaatccatacgtattatcagcagacgatcgcggcgacggggcggctgagcagtcagtttcccaatcttcagaacattccgatccgtctcgaagaggggcggaaaatccgcaaggcgttcgttccgtcagaaccgggatggctgatgctcgccgccgactattcgcagatcgaactgcgcgtgctcgcgcacgtttccggcgacgaacggctgaaggaagcgtttcggacaggcatggacatccacacgaagaccgcgatggacgtgttcggcgtttccgaagaccgcgtcgacgcgcgcatgcggcggcaggcgaaggcggtcaatttcggcatcatctacggcatcagcgatttcggactggcgcaaaacctgaacatttcccgcaaggaggcggcggagttcatccggcaatatttcgccgtcttttcgggcgtcaaggcgtaccgcgagcggatcgtcgagcaggcgcgccgcgacggttacgtgacgaccctgctcggtcgcaggcgctatttgccgcgtatcaacgcgtcgaattacaacctccgctcgttcgcggagcggacggcgatgaatacgccgatccagggcacggccgccgacatcatcaagaccgcgatggtgcgtctgacgcggcggatgcgcgacgtcggactgaagagccgcatgctgctgcaggttcacgacgagctcgtgtttgaagtgccgccggacgagctcgacgcgatgcgggagcttgtgacggacgtcatggagtcggcggtcccgctcgacgtgccgctgaaggtcgacgtcagctggggcgccgactggtacgcggcgaagtgagggaagcgggatcc

SEQ ID NO: 1095 - DNA, 2792 bp, Artificial Sequence
  Description of Artificial Sequence: Synthetic Caldibacillus cellulovorans CompA.2 DNA Polymerase D824N
atgaaatacctgctgccgaccgctgctgctggtctgctgctcctcgctgcccagccggcgatggccatgggcaaactgattctggtcgacggaaacagcgtcgccaaccgggcgttttacgccgtccggctgctcagcacgcgcggcggcctgcacacaaacgcggtgtacggattcgccaacatgttgctcaagctgatcgaggaggaacggccgacgcattttctcgtcgcgttcgacgcgggcaaggcgacgttccgtcatcgcgaatacgaggcctacaaggcgggtcgcctgcagacgccgcccgagctgtccgagcagtttccgtacatccgggagctcgtccgggcgttcggcgtcgcgtccggcgagctggaggaatacgaggcggacgacatgatcggtacgctggcgaaacgggcggaggccgagggcgtcgacacgctggtcgtcaccggcgaccgcgatttgctccagctcgtatcggaccgcgtgaccgtcgcgctgacgcgcaagggcatcacggaaacggagcggtacgacccggcgcgcatccgcgaggaatacggcttcgatcccgaccgcatccgcgacctcaaagggctgatgggcgacgcgtctgacaatcttcccggcgttcccggcgtcggtgagaaaaccgcactgaaactgctcaggcagtacggttcgctggagagcgtcctggaacacgcgtcggaaatcgccggaaagctcggtgaaaatctgcgggcgcacgccgacgccgcccgattgagcaagcggctggcgacgatcgactgcgcggtaccgttgcagtcgggatgggactggctgcgcctcggcgaaccggaccgcgccgcgctcgcctcgctgttgcggcagctcgaattcaagtcgctgttgaaacggctcggactcgacggcacgtccgccgatgccgacgtcgacggcgtccgttcctccgcgcggccggcggacgagaaacggccgagggccgtcgccgtcgctgaggagggcgtcgacgtccgctgtccggatcgcccggaagaagtcgaagaagcgctgtcgcggctggaagccgcccagtcggtcgtcgtcgaggtgacgggcgacaacccgcacgacggcgaagtgcgcggcgtcgcatggtgggacggacatacggcgtatttcattccgtttgaacggctggtgcagtccgacatgcggccgctggccgactggctcgccgacgcgcgtcggccgaagcgtacgcacgactcccatcgcgctgaagtggcgctgttctggcacggccttgcgtttcgcggcacgtcgttctgcacgcatatcgccgcctatttgctcgaccccacggaatcgcgccatacgctggcggacctgtcgcgccgctacggtctgccgccggtaccggaagccgaggacgtttacggcaagggcgcgaagttcaaggttcccgatcgcgacacgctggcgcgttacgtcggccgcaaggccgccctagtcgcgcggctcgttccgctgctcgaggcggatttggcggcctgcggcatgcgttcgcttttttacgacctggagctgccgctttcatccgaactcgccgtcatggagacggtcggcgtccgcgtcgacgcggcggcgctcgccgcctacggcgaggaattgcgcgaggcggcggcgaaagtcgagcgggagatttacgagctggccgggacgacgttcaacatcggatcgacgaaacagctcggcgaaattttgttcgataagctggggctgcccgtcgtcaagaaaacgaaaaccggctattccaccgacgcagacgtgctggaggaactggcgccgtaccatccgatcgtcgaaaagattttgcattaccgccaactgacgaaattgcagtcgacctacatcgaggggcttttgaaagaaatccgtccgcaaaccggtaaaatccatacgtattatcagcagacgatcgcggcgacggggcggctgagcagtcagtttcccaatcttcagaacattccgatccgtctcgaagaggggcggaaaatccgcaaggcgttcgttccgtcagaaccgggatggctgatgctcgccgccgactattcgcagatcgaactgcgcgtgctcgcgcacgtttccggcgacgaacggctgaaggaagcgtttcggacaggcatggacatccacacgaagaccgcgatggacgtgttcggcgtttccgaagaccgcgtcgacgcgcgcatgcggcggcaggcgaaggcggtcaatttcggcatcatctacggcatcagcgatttcggactggcgcaaaacctgaacatttcccgcaaggaggcggcggagttcatccggcaatatttcgccgtcttttcgggcgtcaaggcgtaccgcgagcggatcgtcgagcaggcgcgccgcgacggttacgtgacgaccctgctcggtcgcaggcgctatttgccgaatatcaacgcgtcgaattacaacctccgctcgttcgcggagcggacggcgatgaatacgccgatccagggcacggccgccgacatcatcaagaccgcgatggtgcgtctgacgcggcggatgcgcgacgtcggactgaagagccgcatgctgctgcaggttcacgacgagctcgtgtttgaagtgccgccggacgagctcgacgcgatgcgggagcttgtgacggacgtcatggagtcggcggtcccgctcgacgtgccgctgaaggtcgacgtcagctggggcgccgactggtacgcggcgaagtgagggaagcgggatcc

SEQ ID NO: 1096 - DNA, 2792 bp, Artificial Sequence
  Description of Artificial Sequence: Synthetic Caldibacillus cellulovorans CompA.2 DNA Polymerase D824C
atgaaatacctgctgccgaccgctgctgctggtctgctgctcctcgctgcccagccggcgatggccatgggcaaactgattctggtcgacggaaacagcgtcgccaaccgggcgttttacgccgtccggctgctcagcacgcgcggcggcctgcacacaaacgcggtgtacggattcgccaacatgttgctcaagctgatcgaggaggaacggccgacgcattttctcgtcgcgttcgacgcgggcaaggcgacgttccgtcatcgcgaatacgaggcctacaaggcgggtcgcctgcagacgccgcccgagctgtccgagcagtttccgtacatccgggagctcgtccgggcgttcggcgtcgcgtccggcgagctggaggaatacgaggcggacgacatgatcggtacgctggcgaaacgggcggaggccgagggcgtcgacacgctggtcgtcaccggcgaccgcgatttgctccagctcgtatcggaccgcgtgaccgtcgcgctgacgcgcaagggcatcacggaaacggagcggtacgacccggcgcgcatccgcgaggaatacggcttcgatcccgaccgcatccgcgacctcaaagggctgatgggcgacgcgtctgacaatcttcccggcgttcccggcgtcggtgagaaaaccgcactgaaactgctcaggcagtacggttcgctggagagcgtcctggaacacgcgtcggaaatcgccggaaagctcggtgaaaatctgcgggcgcacgccgacgccgcccgattgagcaagcggctggcgacgatcgactgcgcggtaccgttgcagtcgggatgggactggctgcgcctcggcgaaccggaccgcgccgcgctcgcctcgctgttgcggcagctcgaattcaagtcgctgttgaaacggctcggactcgacggcacgtccgccgatgccgacgtcgacggcgtccgttcctccgcgcggccggcggacgagaaacggccgagggccgtcgccgtcgctgaggagggcgtcgacgtccgctgtccggatcgcccggaagaagtcgaagaagcgctgtcgcggctggaagccgcccagtcggtcgtcgtcgaggtgacgggcgacaacccgcacgacggcgaagtgcgcggcgtcgcatggtgggacggacatacggcgtatttcattccgtttgaacggctggtgcagtccgacatgcggccgctggccgactggctcgccgacgcgcgtcggccgaagcgtacgcacgactcccatcgcgctgaagtggcgctgttctggcacggccttgcgtttcgcggcacgtcgttctgcacgcatatcgccgcctatttgctcgaccccacggaatcgcgccatacgctggcggacctgtcgcgccgctacggtctgccgccggtaccggaagccgaggacgtttacggcaagggcgcgaagttcaaggttcccgatcgcgacacgctggcgcgttacgtcggccgcaaggccgccctagtcgcgcggctcgttccgctgctcgaggcggatttggcggcctgcggcatgcgttcgcttttttacgacctggagctgccgctttcatccgaactcgccgtcatggagacggtcggcgtccgcgtcgacgcggcggcgctcgccgcctacggcgaggaattgcgcgaggcggcggcgaaagtcgagcgggagatttacgagctggccgggacgacgttcaacatcggatcgacgaaacagctcggcgaaattttgttcgataagctggggctgcccgtcgtcaagaaaacgaaaaccggctattccaccgacgcagacgtgctggaggaactggcgccgtaccatccgatcgtcgaaaagattttgcattaccgccaactgacgaaattgcagtcgacctacatcgaggggcttttgaaagaaatccgtccgcaaaccggtaaaatccatacgtattatcagcagacgatcgcggcgacggggcggctgagcagtcagtttcccaatcttcagaacattccgatccgtctcgaagaggggcggaaaatccgcaaggcgttcgttccgtcagaaccgggatggctgatgctcgccgccgactattcgcagatcgaactgcgcgtgctcgcgcacgtttccggcgacgaacggctgaaggaagcgtttcggacaggcatggacatccacacgaagaccgcgatggacgtgttcggcgtttccgaagaccgcgtcgacgcgcgcatgcggcggcaggcgaaggcggtcaatttcggcatcatctacggcatcagcgatttcggactggcgcaaaacctgaacatttcccgcaaggaggcggcggagttcatccggcaatatttcgccgtcttttcgggcgtcaaggcgtaccgcgagcggatcgtcgagcaggcgcgccgcgacggttacgtgacgaccctgctcggtcgcaggcgctatttgccgtgtatcaacgcgtcgaattacaacctccgctcgttcgcggagcggacggcgatgaatacgccgatccagggcacggccgccgacatcatcaagaccgcgatggtgcgtctgacgcggcggatgcgcgacgtcggactgaagagccgcatgctgctgcaggttcacgacgagctcgtgtttgaagtgccgccggacgagctcgacgcgatgcgggagcttgtgacggacgtcatggagtcggcggtcccgctcgacgtgccgctgaaggtcgacgtcagctggggcgccgactggtacgcggcgaagtgagggaagcgggatcc

SEQ ID NO: 1097 - DNA, 2792 bp, Artificial Sequence
  Description of Artificial Sequence: Synthetic Caldibacillus cellulovorans CompA.2 DNA Polymerase D824E
atgaaatacctgctgccgaccgctgctgctggtctgctgctcctcgctgcccagccggcgatggccatgggcaaactgattctggtcgacggaaacagcgtcgccaaccgggcgttttacgccgtccggctgctcagcacgcgcggcggcctgcacacaaacgcggtgtacggattcgccaacatgttgctcaagctgatcgaggaggaacggccgacgcattttctcgtcgcgttcgacgcgggcaaggcgacgttccgtcatcgcgaatacgaggcctacaaggcgggtcgcctgcagacgccgcccgagctgtccgagcagtttccgtacatccgggagctcgtccgggcgttcggcgtcgcgtccggcgagctggaggaatacgaggcggacgacatgatcggtacgctggcgaaacgggcggaggccgagggcgtcgacacgctggtcgtcaccggcgaccgcgatttgctccagctcgtatcggaccgcgtgaccgtcgcgctgacgcgcaagggcatcacggaaacggagcggtacgacccggcgcgcatccgcgaggaatacggcttcgatcccgaccgcatccgcgacctcaaagggctgatgggcgacgcgtctgacaatcttcccggcgttcccggcgtcggtgagaaaaccgcactgaaactgctcaggcagtacggttcgctggagagcgtcctggaacacgcgtcggaaatcgccggaaagctcggtgaaaatctgcgggcgcacgccgacgccgcccgattgagcaagcggctggcgacgatcgactgcgcggtaccgttgcagtcgggatgggactggctgcgcctcggcgaaccggaccgcgccgcgctcgcctcgctgttgcggcagctcgaattcaagtcgctgttgaaacggctcggactcgacggcacgtccgccgatgccgacgtcgacggcgtccgttcctccgcgcggccggcggacgagaaacggccgagggccgtcgccgtcgctgaggagggcgtcgacgtccgctgtccggatcgcccggaagaagtcgaagaagcgctgtcgcggctggaagccgcccagtcggtcgtcgtcgaggtgacgggcgacaacccgcacgacggcgaagtgcgcggcgtcgcatggtgggacggacatacggcgtatttcattccgtttgaacggctggtgcagtccgacatgcggccgctggccgactggctcgccgacgcgcgtcggccgaagcgtacgcacgactcccatcgcgctgaagtggcgctgttctggcacggccttgcgtttcgcggcacgtcgttctgcacgcatatcgccgcctatttgctcgaccccacggaatcgcgccatacgctggcggacctgtcgcgccgctacggtctgccgccggtaccggaagccgaggacgtttacggcaagggcgcgaagttcaaggttcccgatcgcgacacgctggcgcgttacgtcggccgcaaggccgccctagtcgcgcggctcgttccgctgctcgaggcggatttggcggcctgcggcatgcgttcgcttttttacgacctggagctgccgctttcatccgaactcgccgtcatggagacggtcggcgtccgcgtcgacgcggcggcgctcgccgcctacggcgaggaattgcgcgaggcggcggcgaaagtcgagcgggagatttacgagctggccgggacgacgttcaacatcggatcgacgaaacagctcggcgaaattttgttcgataagctggggctgcccgtcgtcaagaaaacgaaaaccggctattccaccgacgcagacgtgctggaggaactggcgccgtaccatccgatcgtcgaaaagattttgcattaccgccaactgacgaaattgcagtcgacctacatcgaggggcttttgaaagaaatccgtccgcaaaccggtaaaatccatacgtattatcagcagacgatcgcggcgacggggcggctgagcagtcagtttcccaatcttcagaacattccgatccgtctcgaagaggggcggaaaatccgcaaggcgttcgttccgtcagaaccgggatggctgatgctcgccgccgactattcgcagatcgaactgcgcgtgctcgcgcacgtttccggcgacgaacggctgaaggaagcgtttcggacaggcatggacatccacacgaagaccgcgatggacgtgttcggcgtttccgaagaccgcgtcgacgcgcgcatgcggcggcaggcgaaggcggtcaatttcggcatcatctacggcatcagcgatttcggactggcgcaaaacctgaacatttcccgcaaggaggcggcggagttcatccggcaatatttcgccgtcttttcgggcgtcaaggcgtaccgcgagcggatcgtcgagcaggcgcgccgcgacggttacgtgacgaccctgctcggtcgcaggcgctatttgccggaaatcaacgcgtcgaattacaacctccgctcgttcgcggagcggacggcgatgaatacgccgatccagggcacggccgccgacatcatcaagaccgcgatggtgcgtctgacgcggcggatgcgcgacgtcggactgaagagccgcatgctgctgcaggttcacgacgagctcgtgtttgaagtgccgccggacgagctcgacgcgatgcgggagcttgtgacggacgtcatggagtcggcggtcccgctcgacgtgccgctgaaggtcgacgtcagctggggcgccgactggtacgcggcgaagtgagggaagcgggatcc

SEQ ID NO: 1098 - DNA, 2792 bp, Artificial Sequence
  Description of Artificial Sequence: Synthetic Caldibacillus cellulovorans CompA.2 DNA Polymerase D824Q
atgaaatacctgctgccgaccgctgctgctggtctgctgctcctcgctgcccagccggcgatggccatgggcaaactgattctggtcgacggaaacagcgtcgccaaccgggcgttttacgccgtccggctgctcagcacgcgcggcggcctgcacacaaacgcggtgtacggattcgccaacatgttgctcaagctgatcgaggaggaacggccgacgcattttctcgtcgcgttcgacgcgggcaaggcgacgttccgtcatcgcgaatacgaggcctacaaggcgggtcgcctgcagacgccgcccgagctgtccgagcagtttccgtacatccgggagctcgtccgggcgttcggcgtcgcgtccggcgagctggaggaatacgaggcggacgacatgatcggtacgctggcgaaacgggcggaggccgagggcgtcgacacgctggtcgtcaccggcgaccgcgatttgctccagctcgtatcggaccgcgtgaccgtcgcgctgacgcgcaagggcatcacggaaacggagcggtacgacccggcgcgcatccgcgaggaatacggcttcgatcccgaccgcatccgcgacctcaaagggctgatgggcgacgcgtctgacaatcttcccggcgttcccggcgtcggtgagaaaaccgcactgaaactgctcaggcagtacggttcgctggagagcgtcctggaacacgcgtcggaaatcgccggaaagctcggtgaaaatctgcgggcgcacgccgacgccgcccgattgagcaagcggctggcgacgatcgactgcgcggtaccgttgcagtcgggatgggactggctgcgcctcggcgaaccggaccgcgccgcgctcgcctcgctgttgcggcagctcgaattcaagtcgctgttgaaacggctcggactcgacggcacgtccgccgatgccgacgtcgacggcgtccgttcctccgcgcggccggcggacgagaaacggccgagggccgtcgccgtcgctgaggagggcgtcgacgtccgctgtccggatcgcccggaagaagtcgaagaagcgctgtcgcggctggaagccgcccagtcggtcgtcgtcgaggtgacgggcgacaacccgcacgacggcgaagtgcgcggcgtcgcatggtgggacggacatacggcgtatttcattccgtttgaacggctggtgcagtccgacatgcggccgctggccgactggctcgccgacgcgcgtcggccgaagcgtacgcacgactcccatcgcgctgaagtggcgctgttctggcacggccttgcgtttcgcggcacgtcgttctgcacgcatatcgccgcctatttgctcgaccccacggaatcgcgccatacgctggcggacctgtcgcgccgctacggtctgccgccggtaccggaagccgaggacgtttacggcaagggcgcgaagttcaaggttcccgatcgcgacacgctggcgcgttacgtcggccgcaaggccgccctagtcgcgcggctcgttccgctgctcgaggcggatttggcggcctgcggcatgcgttcgcttttttacgacctggagctgccgctttcatccgaactcgccgtcatggagacggtcggcgtccgcgtcgacgcggcggcgctcgccgcctacggcgaggaattgcgcgaggcggcggcgaaagtcgagcgggagatttacgagctggccgggacgacgttcaacatcggatcgacgaaacagctcggcgaaattttgttcgataagctggggctgcccgtcgtcaagaaaacgaaaaccggctattccaccgacgcagacgtgctggaggaactggcgccgtaccatccgatcgtcgaaaagattttgcattaccgccaactgacgaaattgcagtcgacctacatcgaggggcttttgaaagaaatccgtccgcaaaccggtaaaatccatacgtattatcagcagacgatcgcggcgacggggcggctgagcagtcagtttcccaatcttcagaacattccgatccgtctcgaagaggggcggaaaatccgcaaggcgttcgttccgtcagaaccgggatggctgatgctcgccgccgactattcgcagatcgaactgcgcgtgctcgcgcacgtttccggcgacgaacggctgaaggaagcgtttcggacaggcatggacatccacacgaagaccgcgatggacgtgttcggcgtttccgaagaccgcgtcgacgcgcgcatgcggcggcaggcgaaggcggtcaatttcggcatcatctacggcatcagcgatttcggactggcgcaaaacctgaacatttcccgcaaggaggcggcggagttcatccggcaatatttcgccgtcttttcgggcgtcaaggcgtaccgcgagcggatcgtcgagcaggcgcgccgcgacggttacgtgacgaccctgctcggtcgcaggcgctatttgccgcaaatcaacgcgtcgaattacaacctccgctcgttcgcggagcggacggcgatgaatacgccgatccagggcacggccgccgacatcatcaagaccgcgatggtgcgtctgacgcggcggatgcgcgacgtcggactgaagagccgcatgctgctgcaggttcacgacgagctcgtgtttgaagtgccgccggacgagctcgacgcgatgcgggagcttgtgacggacgtcatggagtcggcggtcccgctcgacgtgccgctgaaggtcgacgtcagctggggcgccgactggtacgcggcgaagtgagggaagcgggatcc

SEQ ID NO: 1099 - DNA, 2792 bp, Artificial Sequence
  Description of Artificial Sequence: Synthetic Caldibacillus cellulovorans CompA.2 DNA Polymerase D824G
atgaaatacctgctgccgaccgctgctgctggtctgctgctcctcgctgcccagccggcgatggccatgggcaaactgattctggtcgacggaaacagcgtcgccaaccgggcgttttacgccgtccggctgctcagcacgcgcggcggcctgcacacaaacgcggtgtacggattcgccaacatgttgctcaagctgatcgaggaggaacggccgacgcattttctcgtcgcgttcgacgcgggcaaggcgacgttccgtcatcgcgaatacgaggcctacaaggcgggtcgcctgcagacgccgcccgagctgtccgagcagtttccgtacatccgggagctcgtccgggcgttcggcgtcgcgtccggcgagctggaggaatacgaggcggacgacatgatcggtacgctggcgaaacgggcggaggccgagggcgtcgacacgctggtcgtcaccggcgaccgcgatttgctccagctcgtatcggaccgcgtgaccgtcgcgctgacgcgcaagggcatcacggaaacggagcggtacgacccggcgcgcatccgcgaggaatacggcttcgatcccgaccgcatccgcgacctcaaagggctgatgggcgacgcgtctgacaatcttcccggcgttcccggcgtcggtgagaaaaccgcactgaaactgctcaggcagtacggttcgctggagagcgtcctggaacacgcgtcggaaatcgccggaaagctcggtgaaaatctgcgggcgcacgccgacgccgcccgattgagcaagcggctggcgacgatcgactgcgcggtaccgttgcagtcgggatgggactggctgcgcctcggcgaaccggaccgcgccgcgctcgcctcgctgttgcggcagctcgaattcaagtcgctgttgaaacggctcggactcgacggcacgtccgccgatgccgacgtcgacggcgtccgttcctccgcgcggccggcggacgagaaacggccgagggccgtcgccgtcgctgaggagggcgtcgacgtccgctgtccggatcgcccggaagaagtcgaagaagcgctgtcgcggctggaagccgcccagtcggtcgtcgtcgaggtgacgggcgacaacccgcacgacggcgaagtgcgcggcgtcgcatggtgggacggacatacggcgtatttcattccgtttgaacggctggtgcagtccgacatgcggccgctggccgactggctcgccgacgcgcgtcggccgaagcgtacgcacgactcccatcgcgctgaagtggcgctgttctggcacggccttgcgtttcgcggcacgtcgttctgcacgcatatcgccgcctatttgctcgaccccacggaatcgcgccatacgctggcggacctgtcgcgccgctacggtctgccgccggtaccggaagccgaggacgtttacggcaagggcgcgaagttcaaggttcccgatcgcgacacgctggcgcgttacgtcggccgcaaggccgccctagtcgcgcggctcgttccgctgctcgaggcggatttggcggcctgcggcatgcgttcgcttttttacgacctggagctgccgctttcatccgaactcgccgtcatggagacggtcggcgtccgcgtcgacgcggcggcgctcgccgcctacggcgaggaattgcgcgaggcggcggcgaaagtcgagcgggagatttacgagctggccgggacgacgttcaacatcggatcgacgaaacagctcggcgaaattttgttcgataagctggggctgcccgtcgtcaagaaaacgaaaaccggctattccaccgacgcagacgtgctggaggaactggcgccgtaccatccgatcgtcgaaaagattttgcattaccgccaactgacgaaattgcagtcgacctacatcgaggggcttttgaaagaaatccgtccgcaaaccggtaaaatccatacgtattatcagcagacgatcgcggcgacggggcggctgagcagtcagtttcccaatcttcagaacattccgatccgtctcgaagaggggcggaaaatccgcaaggcgttcgttccgtcagaaccgggatggctgatgctcgccgccgactattcgcagatcgaactgcgcgtgctcgcgcacgtttccggcgacgaacggctgaaggaagcgtttcggacaggcatggacatccacacgaagaccgcgatggacgtgttcggcgtttccgaagaccgcgtcgacgcgcgcatgcggcggcaggcgaaggcggtcaatttcggcatcatctacggcatcagcgatttcggactggcgcaaaacctgaacatttcccgcaaggaggcggcggagttcatccggcaatatttcgccgtcttttcgggcgtcaaggcgtaccgcgagcggatcgtcgagcaggcgcgccgcgacggttacgtgacgaccctgctcggtcgcaggcgctatttgccgggtatcaacgcgtcgaattacaacctccgctcgttcgcggagcggacggcgatgaatacgccgatccagggcacggccgccgacatcatcaagaccgcgatggtgcgtctgacgcggcggatgcgcgacgtcggactgaagagccgcatgctgctgcaggttcacgacgagctcgtgtttgaagtgccgccggacgagctcgacgcgatgcgggagcttgtgacggacgtcatggagtcggcggtcccgctcgacgtgccgctgaaggtcgacgtcagctggggcgccgactggtacgcggcgaagtgagggaagcgggatcc

SEQ ID NO: 1100 - DNA, 2792 bp, Artificial Sequence
  Description of Artificial Sequence: Synthetic Caldibacillus cellulovorans CompA.2 DNA Polymerase D824H
atgaaatacctgctgccgaccgctgctgctggtctgctgctcctcgctgcccagccggcgatggccatgggcaaactgattctggtcgacggaaacagcgtcgccaaccgggcgttttacgccgtccggctgctcagcacgcgcggcggcctgcacacaaacgcggtgtacggattcgccaacatgttgctcaagctgatcgaggaggaacggccgacgcattttctcgtcgcgttcgacgcgggcaaggcgacgttccgtcatcgcgaatacgaggcctacaaggcgggtcgcctgcagacgccgcccgagctgtccgagcagtttccgtacatccgggagctcgtccgggcgttcggcgtcgcgtccggcgagctggaggaatacgaggcggacgacatgatcggtacgctggcgaaacgggcggaggccgagggcgtcgacacgctggtcgtcaccggcgaccgcgatttgctccagctcgtatcggaccgcgtgaccgtcgcgctgacgcgcaagggcatcacggaaacggagcggtacgacccggcgcgcatccgcgaggaatacggcttcgatcccgaccgcatccgcgacctcaaagggctgatgggcgacgcgtctgacaatcttcccggcgttcccggcgtcggtgagaaaaccgcactgaaactgctcaggcagtacggttcgctggagagcgtcctggaacacgcgtcggaaatcgccggaaagctcggtgaaaatctgcgggcgcacgccgacgccgcccgattgagcaagcggctggcgacgatcgactgcgcggtaccgttgcagtcgggatgggactggctgcgcctcggcgaaccggaccgcgccgcgctcgcctcgctgttgcggcagctcgaattcaagtcgctgttgaaacggctcggactcgacggcacgtccgccgatgccgacgtcgacggcgtccgttcctccgcgcggccggcggacgagaaacggccgagggccgtcgccgtcgctgaggagggcgtcgacgtccgctgtccggatcgcccggaagaagtcgaagaagcgctgtcgcggctggaagccgcccagtcggtcgtcgtcgaggtgacgggcgacaacccgcacgacggcgaagtgcgcggcgtcgcatggtgggacggacatacggcgtatttcattccgtttgaacggctggtgcagtccgacatgcggccgctggccgactggctcgccgacgcgcgtcggccgaagcgtacgcacgactcccatcgcgctgaagtggcgctgttctggcacggccttgcgtttcgcggcacgtcgttctgcacgcatatcgccgcctatttgctcgaccccacggaatcgcgccatacgctggcggacctgtcgcgccgctacggtctgccgccggtaccggaagccgaggacgtttacggcaagggcgcgaagttcaaggttcccgatcgcgacacgctggcgcgttacgtcggccgcaaggccgccctagtcgcgcggctcgttccgctgctcgaggcggatttggcggcctgcggcatgcgttcgcttttttacgacctggagctgccgctttcatccgaactcgccgtcatggagacggtcggcgtccgcgtcgacgcggcggcgctcgccgcctacggcgaggaattgcgcgaggcggcggcgaaagtcgagcgggagatttacgagctggccgggacgacgttcaacatcggatcgacgaaacagctcggcgaaattttgttcgataagctggggctgcccgtcgtcaagaaaacgaaaaccggctattccaccgacgcagacgtgctggaggaactggcgccgtaccatccgatcgtcgaaaagattttgcattaccgccaactgacgaaattgcagtcgacctacatcgaggggcttttgaaagaaatccgtccgcaaaccggtaaaatccatacgtattatcagcagacgatcgcggcgacggggcggctgagcagtcagtttcccaatcttcagaacattccgatccgtctcgaagaggggcggaaaatccgcaaggcgttcgttccgtcagaaccgggatggctgatgctcgccgccgactattcgcagatcgaactgcgcgtgctcgcgcacgtttccggcgacgaacggctgaaggaagcgtttcggacaggcatggacatccacacgaagaccgcgatggacgtgttcggcgtttccgaagaccgcgtcgacgcgcgcatgcggcggcaggcgaaggcggtcaatttcggcatcatctacggcatcagcgatttcggactggcgcaaaacctgaacatttcccgcaaggaggcggcggagttcatccggcaatatttcgccgtcttttcgggcgtcaaggcgtaccgcgagcggatcgtcgagcaggcgcgccgcgacggttacgtgacgaccctgctcggtcgcaggcgctatttgccgcatatcaacgcgtcgaattacaacctccgctcgttcgcggagcggacggcgatgaatacgccgatccagggcacggccgccgacatcatcaagaccgcgatggtgcgtctgacgcggcggatgcgcgacgtcggactgaagagccgcatgctgctgcaggttcacgacgagctcgtgtttgaagtgccgccggacgagctcgacgcgatgcgggagcttgtgacggacgtcatggagtcggcggtcccgctcgacgtgccgctgaaggtcgacgtcagctggggcgccgactggtacgcggcgaagtgagggaagcgggatcc

SEQ ID NO: 1101 - DNA, 2792 bp, Artificial Sequence
  Description of Artificial Sequence: Synthetic Caldibacillus cellulovorans CompA.2 DNA Polymerase D824I
atgaaatacctgctgccgaccgctgctgctggtctgctgctcctcgctgcccagccggcgatggccatgggcaaactgattctggtcgacggaaacagcgtcgccaaccgggcgttttacgccgtccggctgctcagcacgcgcggcggcctgcacacaaacgcggtgtacggattcgccaacatgttgctcaagctgatcgaggaggaacggccgacgcattttctcgtcgcgttcgacgcgggcaaggcgacgttccgtcatcgcgaatacgaggcctacaaggcgggtcgcctgcagacgccgcccgagctgtccgagcagtttccgtacatccgggagctcgtccgggcgttcggcgtcgcgtccggcgagctggaggaatacgaggcggacgacatgatcggtacgctggcgaaacgggcggaggccgagggcgtcgacacgctggtcgtcaccggcgaccgcgatttgctccagctcgtatcggaccgcgtgaccgtcgcgctgacgcgcaagggcatcacggaaacggagcggtacgacccggcgcgcatccgcgaggaatacggcttcgatcccgaccgcatccgcgacctcaaagggctgatgggcgacgcgtctgacaatcttcccggcgttcccggcgtcggtgagaaaaccgcactgaaactgctcaggcagtacggttcgctggagagcgtcctggaacacgcgtcggaaatcgccggaaagctcggtgaaaatctgcgggcgcacgccgacgccgcccgattgagcaagcggctggcgacgatcgactgcgcggtaccgttgcagtcgggatgggactggctgcgcctcggcgaaccggaccgcgccgcgctcgcctcgctgttgcggcagctcgaattcaagtcgctgttgaaacggctcggactcgacggcacgtccgccgatgccgacgtcgacggcgtccgttcctccgcgcggccggcggacgagaaacggccgagggccgtcgccgtcgctgaggagggcgtcgacgtccgctgtccggatcgcccggaagaagtcgaagaagcgctgtcgcggctggaagccgcccagtcggtcgtcgtcgaggtgacgggcgacaacccgcacgacggcgaagtgcgcggcgtcgcatggtgggacggacatacggcgtatttcattccgtttgaacggctggtgcagtccgacatgcggccgctggccgactggctcgccgacgcgcgtcggccgaagcgtacgcacgactcccatcgcgctgaagtggcgctgttctggcacggccttgcgtttcgcggcacgtcgttctgcacgcatatcgccgcctatttgctcgaccccacggaatcgcgccatacgctggcggacctgtcgcgccgctacggtctgccgccggtaccggaagccgaggacgtttacggcaagggcgcgaagttcaaggttcccgatcgcgacacgctggcgcgttacgtcggccgcaaggccgccctagtcgcgcggctcgttccgctgctcgaggcggatttggcggcctgcggcatgcgttcgcttttttacgacctggagctgccgctttcatccgaactcgccgtcatggagacggtcggcgtccgcgtcgacgcggcggcgctcgccgcctacggcgaggaattgcgcgaggcggcggcgaaagtcgagcgggagatttacgagctggccgggacgacgttcaacatcggatcgacgaaacagctcggcgaaattttgttcgataagctggggctgcccgtcgtcaagaaaacgaaaaccggctattccaccgacgcagacgtgctggaggaactggcgccgtaccatccgatcgtcgaaaagattttgcattaccgccaactgacgaaattgcagtcgacctacatcgaggggcttttgaaagaaatccgtccgcaaaccggtaaaatccatacgtattatcagcagacgatcgcggcgacggggcggctgagcagtcagtttcccaatcttcagaacattccgatccgtctcgaagaggggcggaaaatccgcaaggcgttcgttccgtcagaaccgggatggctgatgctcgccgccgactattcgcagatcgaactgcgcgtgctcgcgcacgtttccggcgacgaacggctgaaggaagcgtttcggacaggcatggacatccacacgaagaccgcgatggacgtgttcggcgtttccgaagaccgcgtcgacgcgcgcatgcggcggcaggcgaaggcggtcaatttcggcatcatctacggcatcagcgatttcggactggcgcaaaacctgaacatttcccgcaaggaggcggcggagttcatccggcaatatttcgccgtcttttcgggcgtcaaggcgtaccgcgagcggatcgtcgagcaggcgcgccgcgacggttacgtgacgaccctgctcggtcgcaggcgctatttgccgattatcaacgcgtcgaattacaacctccgctcgttcgcggagcggacggcgatgaatacgccgatccagggcacggccgccgacatcatcaagaccgcgatggtgcgtctgacgcggcggatgcgcgacgtcggactgaagagccgcatgctgctgcaggttcacgacgagctcgtgtttgaagtgccgccggacgagctcgacgcgatgcgggagcttgtgacggacgtcatggagtcggcggtcccgctcgacgtgccgctgaaggtcgacgtcagctggggcgccgactggtacgcggcgaagtgagggaagcgggatcc

SEQ ID NO: 1102 - DNA, 2792 bp, Artificial Sequence
  Description of Artificial Sequence: Synthetic Caldibacillus cellulovorans CompA.2 DNA Polymerase D824L
atgaaatacctgctgccgaccgctgctgctggtctgctgctcctcgctgcccagccggcgatggccatgggcaaactgattctggtcgacggaaacagcgtcgccaaccgggcgttttacgccgtccggctgctcagcacgcgcggcggcctgcacacaaacgcggtgtacggattcgccaacatgttgctcaagctgatcgaggaggaacggccgacgcattttctcgtcgcgttcgacgcgggcaaggcgacgttccgtcatcgcgaatacgaggcctacaaggcgggtcgcctgcagacgccgcccgagctgtccgagcagtttccgtacatccgggagctcgtccgggcgttcggcgtcgcgtccggcgagctggaggaatacgaggcggacgacatgatcggtacgctggcgaaacgggcggaggccgagggcgtcgacacgctggtcgtcaccggcgaccgcgatttgctccagctcgtatcggaccgcgtgaccgtcgcgctgacgcgcaagggcatcacggaaacggagcggtacgacccggcgcgcatccgcgaggaatacggcttcgatcccgaccgcatccgcgacctcaaagggctgatgggcgacgcgtctgacaatcttcccggcgttcccggcgtcggtgagaaaaccgcactgaaactgctcaggcagtacggttcgctggagagcgtcctggaacacgcgtcggaaatcgccggaaagctcggtgaaaatctgcgggcgcacgccgacgccgcccgattgagcaagcggctggcgacgatcgactgcgcggtaccgttgcagtcgggatgggactggctgcgcctcggcgaaccggaccgcgccgcgctcgcctcgctgttgcggcagctcgaattcaagtcgctgttgaaacggctcggactcgacggcacgtccgccgatgccgacgtcgacggcgtccgttcctccgcgcggccggcggacgagaaacggccgagggccgtcgccgtcgctgaggagggcgtcgacgtccgctgtccggatcgcccggaagaagtcgaagaagcgctgtcgcggctggaagccgcccagtcggtcgtcgtcgaggtgacgggcgacaacccgcacgacggcgaagtgcgcggcgtcgcatggtgggacggacatacggcgtatttcattccgtttgaacggctggtgcagtccgacatgcggccgctggccgactggctcgccgacgcgcgtcggccgaagcgtacgcacgactcccatcgcgctgaagtggcgctgttctggcacggccttgcgtttcgcggcacgtcgttctgcacgcatatcgccgcctatttgctcgaccccacggaatcgcgccatacgctggcggacctgtcgcgccgctacggtctgccgccggtaccggaagccgaggacgtttacggcaagggcgcgaagttcaaggttcccgatcgcgacacgctggcgcgttacgtcggccgcaaggccgccctagtcgcgcggctcgttccgctgctcgaggcggatttggcggcctgcggcatgcgttcgcttttttacgacctggagctgccgctttcatccgaactcgccgtcatggagacggtcggcgtccgcgtcgacgcggcggcgctcgccgcctacggcgaggaattgcgcgaggcggcggcgaaagtcgagcgggagatttacgagctggccgggacgacgttcaacatcggatcgacgaaacagctcggcgaaattttgttcgataagctggggctgcccgtcgtcaagaaaacgaaaaccggctattccaccgacgcagacgtgctggaggaactggcgccgtaccatccgatcgtcgaaaagattttgcattaccgccaactgacgaaattgcagtcgacctacatcgaggggcttttgaaagaaatccgtccgcaaaccggtaaaatccatacgtattatcagcagacgatcgcggcgacggggcggctgagcagtcagtttcccaatcttcagaacattccgatccgtctcgaagaggggcggaaaatccgcaaggcgttcgttccgtcagaaccgggatggctgatgctcgccgccgactattcgcagatcgaactgcgcgtgctcgcgcacgtttccggcgacgaacggctgaaggaagcgtttcggacaggcatggacatccacacgaagaccgcgatggacgtgttcggcgtttccgaagaccgcgtcgacgcgcgcatgcggcggcaggcgaaggcggtcaatttcggcatcatctacggcatcagcgatttcggactggcgcaaaacctgaacatttcccgcaaggaggcggcggagttcatccggcaatatttcgccgtcttttcgggcgtcaaggcgtaccgcgagcggatcgtcgagcaggcgcgccgcgacggttacgtgacgaccctgctcggtcgcaggcgctatttgccgcttatcaacgcgtcgaattacaacctccgctcgttcgcggagcggacggcgatgaatacgccgatccagggcacggccgccgacatcatcaagaccgcgatggtgcgtctgacgcggcggatgcgcgacgtcggactgaagagccgcatgctgctgcaggttcacgacgagctcgtgtttgaagtgccgccggacgagctcgacgcgatgcgggagcttgtgacggacgtcatggagtcggcggtcccgctcgacgtgccgctgaaggtcgacgtcagctggggcgccgactggtacgcggcgaagtgagggaagcgggatcc

SEQ ID NO: 1103 - DNA, 2792 bp, Artificial Sequence
  Description of Artificial Sequence: Synthetic Caldibacillus cellulovorans CompA.2 DNA Polymerase D824K
atgaaatacctgctgccgaccgctgctgctggtctgctgctcctcgctgcccagccggcgatggccatgggcaaactgattctggtcgacggaaacagcgtcgccaaccgggcgttttacgccgtccggctgctcagcacgcgcggcggcctgcacacaaacgcggtgtacggattcgccaacatgttgctcaagctgatcgaggaggaacggccgacgcattttctcgtcgcgttcgacgcgggcaaggcgacgttccgtcatcgcgaatacgaggcctacaaggcgggtcgcctgcagacgccgcccgagctgtccgagcagtttccgtacatccgggagctcgtccgggcgttcggcgtcgcgtccggcgagctggaggaatacgaggcggacgacatgatcggtacgctggcgaaacgggcggaggccgagggcgtcgacacgctggtcgtcaccggcgaccgcgatttgctccagctcgtatcggaccgcgtgaccgtcgcgctgacgcgcaagggcatcacggaaacggagcggtacgacccggcgcgcatccgcgaggaatacggcttcgatcccgaccgcatccgcgacctcaaagggctgatgggcgacgcgtctgacaatcttcccggcgttcccggcgtcggtgagaaaaccgcactgaaactgctcaggcagtacggttcgctggagagcgtcctggaacacgcgtcggaaatcgccggaaagctcggtgaaaatctgcgggcgcacgccgacgccgcccgattgagcaagcggctggcgacgatcgactgcgcggtaccgttgcagtcgggatgggactggctgcgcctcggcgaaccggaccgcgccgcgctcgcctcgctgttgcggcagctcgaattcaagtcgctgttgaaacggctcggactcgacggcacgtccgccgatgccgacgtcgacggcgtccgttcctccgcgcggccggcggacgagaaacggccgagggccgtcgccgtcgctgaggagggcgtcgacgtccgctgtccggatcgcccggaagaagtcgaagaagcgctgtcgcggctggaagccgcccagtcggtcgtcgtcgaggtgacgggcgacaacccgcacgacggcgaagtgcgcggcgtcgcatggtgggacggacatacggcgtatttcattccgtttgaacggctggtgcagtccgacatgcggccgctggccgactggctcgccgacgcgcgtcggccgaagcgtacgcacgactcccatcgcgctgaagtggcgctgttctggcacggccttgcgtttcgcggcacgtcgttctgcacgcatatcgccgcctatttgctcgaccccacggaatcgcgccatacgctggcggacctgtcgcgccgctacggtctgccgccggtaccggaagccgaggacgtttacggcaagggcgcgaagttcaaggttcccgatcgcgacacgctggcgcgttacgtcggccgcaaggccgccctagtcgcgcggctcgttccgctgctcgaggcggatttggcggcctgcggcatgcgttcgcttttttacgacctggagctgccgctttcatccgaactcgccgtcatggagacggtcggcgtccgcgtcgacgcggcggcgctcgccgcctacggcgaggaattgcgcgaggcggcggcgaaagtcgagcgggagatttacgagctggccgggacgacgttcaacatcggatcgacgaaacagctcggcgaaattttgttcgataagctggggctgcccgtcgtcaagaaaacgaaaaccggctattccaccgacgcagacgtgctggaggaactggcgccgtaccatccgatcgtcgaaaagattttgcattaccgccaactgacgaaattgcagtcgacctacatcgaggggcttttgaaagaaatccgtccgcaaaccggtaaaatccatacgtattatcagcagacgatcgcggcgacggggcggctgagcagtcagtttcccaatcttcagaacattccgatccgtctcgaagaggggcggaaaatccgcaaggcgttcgttccgtcagaaccgggatggctgatgctcgccgccgactattcgcagatcgaactgcgcgtgctcgcgcacgtttccggcgacgaacggctgaaggaagcgtttcggacaggcatggacatccacacgaagaccgcgatggacgtgttcggcgtttccgaagaccgcgtcgacgcgcgcatgcggcggcaggcgaaggcggtcaatttcggcatcatctacggcatcagcgatttcggactggcgcaaaacctgaacatttcccgcaaggaggcggcggagttcatccggcaatatttcgccgtcttttcgggcgtcaaggcgtaccgcgagcggatcgtcgagcaggcgcgccgcgacggttacgtgacgaccctgctcggtcgcaggcgctatttgccgaaaatcaacgcgtcgaattacaacctccgctcgttcgcggagcggacggcgatgaatacgccgatccagggcacggccgccgacatcatcaagaccgcgatggtgcgtctgacgcggcggatgcgcgacgtcggactgaagagccgcatgctgctgcaggttcacgacgagctcgtgtttgaagtgccgccggacgagctcgacgcgatgcgggagcttgtgacggacgtcatggagtcggcggtcccgctcgacgtgccgctgaaggtcgacgtcagctggggcgccgactggtacgcggcgaagtgagggaagcgggatcc

SEQ ID NO: 1104 - DNA, 2792 bp, Artificial Sequence
  Description of Artificial Sequence: Synthetic Caldibacillus cellulovorans CompA.2 DNA Polymerase D824M
atgaaatacctgctgccgaccgctgctgctggtctgctgctcctcgctgcccagccggcgatggccatgggcaaactgattctggtcgacggaaacagcgtcgccaaccgggcgttttacgccgtccggctgctcagcacgcgcggcggcctgcacacaaacgcggtgtacggattcgccaacatgttgctcaagctgatcgaggaggaacggccgacgcattttctcgtcgcgttcgacgcgggcaaggcgacgttccgtcatcgcgaatacgaggcctacaaggcgggtcgcctgcagacgccgcccgagctgtccgagcagtttccgtacatccgggagctcgtccgggcgttcggcgtcgcgtccggcgagctggaggaatacgaggcggacgacatgatcggtacgctggcgaaacgggcggaggccgagggcgtcgacacgctggtcgtcaccggcgaccgcgatttgctccagctcgtatcggaccgcgtgaccgtcgcgctgacgcgcaagggcatcacggaaacggagcggtacgacccggcgcgcatccgcgaggaatacggcttcgatcccgaccgcatccgcgacctcaaagggctgatgggcgacgcgtctgacaatcttcccggcgttcccggcgtcggtgagaaaaccgcactgaaactgctcaggcagtacggttcgctggagagcgtcctggaacacgcgtcggaaatcgccggaaagctcggtgaaaatctgcgggcgcacgccgacgccgcccgattgagcaagcggctggcgacgatcgactgcgcggtaccgttgcagtcgggatgggactggctgcgcctcggcgaaccggaccgcgccgcgctcgcctcgctgttgcggcagctcgaattcaagtcgctgttgaaacggctcggactcgacggcacgtccgccgatgccgacgtcgacggcgtccgttcctccgcgcggccggcggacgagaaacggccgagggccgtcgccgtcgctgaggagggcgtcgacgtccgctgtccggatcgcccggaagaagtcgaagaagcgctgtcgcggctggaagccgcccagtcggtcgtcgtcgaggtgacgggcgacaacccgcacgacggcgaagtgcgcggcgtcgcatggtgggacggacatacggcgtatttcattccgtttgaacggctggtgcagtccgacatgcggccgctggccgactggctcgccgacgcgcgtcggccgaagcgtacgcacgactcccatcgcgctgaagtggcgctgttctggcacggccttgcgtttcgcggcacgtcgttctgcacgcatatcgccgcctatttgctcgaccccacggaatcgcgccatacgctggcggacctgtcgcgccgctacggtctgccgccggtaccggaagccgaggacgtttacggcaagggcgcgaagttcaaggttcccgatcgcgacacgctggcgcgttacgtcggccgcaaggccgccctagtcgcgcggctcgttccgctgctcgaggcggatttggcggcctgcggcatgcgttcgcttttttacgacctggagctgccgctttcatccgaactcgccgtcatggagacggtcggcgtccgcgtcgacgcggcggcgctcgccgcctacggcgaggaattgcgcgaggcggcggcgaaagtcgagcgggagatttacgagctggccgggacgacgttcaacatcggatcgacgaaacagctcggcgaaattttgttcgataagctggggctgcccgtcgtcaagaaaacgaaaaccggctattccaccgacgcagacgtgctggaggaactggcgccgtaccatccgatcgtcgaaaagattttgcattaccgccaactgacgaaattgcagtcgacctacatcgaggggcttttgaaagaaatccgtccgcaaaccggtaaaatccatacgtattatcagcagacgatcgcggcgacggggcggctgagcagtcagtttcccaatcttcagaacattccgatccgtctcgaagaggggcggaaaatccgcaaggcgttcgttccgtcagaaccgggatggctgatgctcgccgccgactattcgcagatcgaactgcgcgtgctcgcgcacgtttccggcgacgaacggctgaaggaagcgtttcggacaggcatggacatccacacgaagaccgcgatggacgtgttcggcgtttccgaagaccgcgtcgacgcgcgcatgcggcggcaggcgaaggcggtcaatttcggcatcatctacggcatcagcgatttcggactggcgcaaaacctgaacatttcccgcaaggaggcggcggagttcatccggcaatatttcgccgtcttttcgggcgtcaaggcgtaccgcgagcggatcgtcgagcaggcgcgccgcgacggttacgtgacgaccctgctcggtcgcaggcgctatttgccgatgatcaacgcgtcgaattacaacctccgctcgttcgcggagcggacggcgatgaatacgccgatccagggcacggccgccgacatcatcaagaccgcgatggtgcgtctgacgcggcggatgcgcgacgtcggactgaagagccgcatgctgctgcaggttcacgacgagctcgtgtttgaagtgccgccggacgagctcgacgcgatgcgggagcttgtgacggacgtcatggagtcggcggtcccgctcgacgtgccgctgaaggtcgacgtcagctggggcgccgactggtacgcggcgaagtgagggaagcgggatcc

SEQ ID NO: 1105 - DNA, 2792 bp, Artificial Sequence
  Description of Artificial Sequence: Synthetic Caldibacillus cellulovorans CompA.2 DNA Polymerase D824F
atgaaatacctgctgccgaccgctgctgctggtctgctgctcctcgctgcccagccggcgatggccatgggcaaactgattctggtcgacggaaacagcgtcgccaaccgggcgttttacgccgtccggctgctcagcacgcgcggcggcctgcacacaaacgcggtgtacggattcgccaacatgttgctcaagctgatcgaggaggaacggccgacgcattttctcgtcgcgttcgacgcgggcaaggcgacgttccgtcatcgcgaatacgaggcctacaaggcgggtcgcctgcagacgccgcccgagctgtccgagcagtttccgtacatccgggagctcgtccgggcgttcggcgtcgcgtccggcgagctggaggaatacgaggcggacgacatgatcggtacgctggcgaaacgggcggaggccgagggcgtcgacacgctggtcgtcaccggcgaccgcgatttgctccagctcgtatcggaccgcgtgaccgtcgcgctgacgcgcaagggcatcacggaaacggagcggtacgacccggcgcgcatccgcgaggaatacggcttcgatcccgaccgcatccgcgacctcaaagggctgatgggcgacgcgtctgacaatcttcccggcgttcccggcgtcggtgagaaaaccgcactgaaactgctcaggcagtacggttcgctggagagcgtcctggaacacgcgtcggaaatcgccggaaagctcggtgaaaatctgcgggcgcacgccgacgccgcccgattgagcaagcggctggcgacgatcgactgcgcggtaccgttgcagtcgggatgggactggctgcgcctcggcgaaccggaccgcgccgcgctcgcctcgctgttgcggcagctcgaattcaagtcgctgttgaaacggctcggactcgacggcacgtccgccgatgccgacgtcgacggcgtccgttcctccgcgcggccggcggacgagaaacggccgagggccgtcgccgtcgctgaggagggcgtcgacgtccgctgtccggatcgcccggaagaagtcgaagaagcgctgtcgcggctggaagccgcccagtcggtcgtcgtcgaggtgacgggcgacaacccgcacgacggcgaagtgcgcggcgtcgcatggtgggacggacatacggcgtatttcattccgtttgaacggctggtgcagtccgacatgcggccgctggccgactggctcgccgacgcgcgtcggccgaagcgtacgcacgactcccatcgcgctgaagtggcgctgttctggcacggccttgcgtttcgcggcacgtcgttctgcacgcatatcgccgcctatttgctcgaccccacggaatcgcgccatacgctggcggacctgtcgcgccgctacggtctgccgccggtaccggaagccgaggacgtttacggcaagggcgcgaagttcaaggttcccgatcgcgacacgctggcgcgttacgtcggccgcaaggccgccctagtcgcgcggctcgttccgctgctcgaggcggatttggcggcctgcggcatgcgttcgcttttttacgacctggagctgccgctttcatccgaactcgccgtcatggagacggtcggcgtccgcgtcgacgcggcggcgctcgccgcctacggcgaggaattgcgcgaggcggcggcgaaagtcgagcgggagatttacgagctggccgggacgacgttcaacatcggatcgacgaaacagctcggcgaaattttgttcgataagctggggctgcccgtcgtcaagaaaacgaaaaccggctattccaccgacgcagacgtgctggaggaactggcgccgtaccatccgatcgtcgaaaagattttgcattaccgccaactgacgaaattgcagtcgacctacatcgaggggcttttgaaagaaatccgtccgcaaaccggtaaaatccatacgtattatcagcagacgatcgcggcgacggggcggctgagcagtcagtttcccaatcttcagaacattccgatccgtctcgaagaggggcggaaaatccgcaaggcgttcgttccgtcagaaccgggatggctgatgctcgccgccgactattcgcagatcgaactgcgcgtgctcgcgcacgtttccggcgacgaacggctgaaggaagcgtttcggacaggcatggacatccacacgaagaccgcgatggacgtgttcggcgtttccgaagaccgcgtcgacgcgcgcatgcggcggcaggcgaaggcggtcaatttcggcatcatctacggcatcagcgatttcggactggcgcaaaacctgaacatttcccgcaaggaggcggcggagttcatccggcaatatttcgccgtcttttcgggcgtcaaggcgtaccgcgagcggatcgtcgagcaggcgcgccgcgacggttacgtgacgaccctgctcggtcgcaggcgctatttgccgtttatcaacgcgtcgaattacaacctccgctcgttcgcggagcggacggcgatgaatacgccgatccagggcacggccgccgacatcatcaagaccgcgatggtgcgtctgacgcggcggatgcgcgacgtcggactgaagagccgcatgctgctgcaggttcacgacgagctcgtgtttgaagtgccgccggacgagctcgacgcgatgcgggagcttgtgacggacgtcatggagtcggcggtcccgctcgacgtgccgctgaaggtcgacgtcagctggggcgccgactggtacgcggcgaagtgagggaagcgggatcc

SEQ ID NO: 1106 - DNA, 2792 bp, Artificial Sequence
  Description of Artificial Sequence: Synthetic Caldibacillus cellulovorans CompA.2 DNA Polymerase D824P
atgaaatacctgctgccgaccgctgctgctggtctgctgctcctcgctgcccagccggcgatggccatgggcaaactgattctggtcgacggaaacagcgtcgccaaccgggcgttttacgccgtccggctgctcagcacgcgcggcggcctgcacacaaacgcggtgtacggattcgccaacatgttgctcaagctgatcgaggaggaacggccgacgcattttctcgtcgcgttcgacgcgggcaaggcgacgttccgtcatcgcgaatacgaggcctacaaggcgggtcgcctgcagacgccgcccgagctgtccgagcagtttccgtacatccgggagctcgtccgggcgttcggcgtcgcgtccggcgagctggaggaatacgaggcggacgacatgatcggtacgctggcgaaacgggcggaggccgagggcgtcgacacgctggtcgtcaccggcgaccgcgatttgctccagctcgtatcggaccgcgtgaccgtcgcgctgacgcgcaagggcatcacggaaacggagcggtacgacccggcgcgcatccgcgaggaatacggcttcgatcccgaccgcatccgcgacctcaaagggctgatgggcgacgcgtctgacaatcttcccggcgttcccggcgtcggtgagaaaaccgcactgaaactgctcaggcagtacggttcgctggagagcgtcctggaacacgcgtcggaaatcgccggaaagctcggtgaaaatctgcgggcgcacgccgacgccgcccgattgagcaagcggctggcgacgatcgactgcgcggtaccgttgcagtcgggatgggactggctgcgcctcggcgaaccggaccgcgccgcgctcgcctcgctgttgcggcagctcgaattcaagtcgctgttgaaacggctcggactcgacggcacgtccgccgatgccgacgtcgacggcgtccgttcctccgcgcggccggcggacgagaaacggccgagggccgtcgccgtcgctgaggagggcgtcgacgtccgctgtccggatcgcccggaagaagtcgaagaagcgctgtcgcggctggaagccgcccagtcggtcgtcgtcgaggtgacgggcgacaacccgcacgacggcgaagtgcgcggcgtcgcatggtgggacggacatacggcgtatttcattccgtttgaacggctggtgcagtccgacatgcggccgctggccgactggctcgccgacgcgcgtcggccgaagcgtacgcacgactcccatcgcgctgaagtggcgctgttctggcacggccttgcgtttcgcggcacgtcgttctgcacgcatatcgccgcctatttgctcgaccccacggaatcgcgccatacgctggcggacctgtcgcgccgctacggtctgccgccggtaccggaagccgaggacgtttacggcaagggcgcgaagttcaaggttcccgatcgcgacacgctggcgcgttacgtcggccgcaaggccgccctagtcgcgcggctcgttccgctgctcgaggcggatttggcggcctgcggcatgcgttcgcttttttacgacctggagctgccgctttcatccgaactcgccgtcatggagacggtcggcgtccgcgtcgacgcggcggcgctcgccgcctacggcgaggaattgcgcgaggcggcggcgaaagtcgagcgggagatttacgagctggccgggacgacgttcaacatcggatcgacgaaacagctcggcgaaattttgttcgataagctggggctgcccgtcgtcaagaaaacgaaaaccggctattccaccgacgcagacgtgctggaggaactggcgccgtaccatccgatcgtcgaaaagattttgcattaccgccaactgacgaaattgcagtcgacctacatcgaggggcttttgaaagaaatccgtccgcaaaccggtaaaatccatacgtattatcagcagacgatcgcggcgacggggcggctgagcagtcagtttcccaatcttcagaacattccgatccgtctcgaagaggggcggaaaatccgcaaggcgttcgttccgtcagaaccgggatggctgatgctcgccgccgactattcgcagatcgaactgcgcgtgctcgcgcacgtttccggcgacgaacggctgaaggaagcgtttcggacaggcatggacatccacacgaagaccgcgatggacgtgttcggcgtttccgaagaccgcgtcgacgcgcgcatgcggcggcaggcgaaggcggtcaatttcggcatcatctacggcatcagcgatttcggactggcgcaaaacctgaacatttcccgcaaggaggcggcggagttcatccggcaatatttcgccgtcttttcgggcgtcaaggcgtaccgcgagcggatcgtcgagcaggcgcgccgcgacggttacgtgacgaccctgctcggtcgcaggcgctatttgccgcctatcaacgcgtcgaattacaacctccgctcgttcgcggagcggacggcgatgaatacgccgatccagggcacggccgccgacatcatcaagaccgcgatggtgcgtctgacgcggcggatgcgcgacgtcggactgaagagccgcatgctgctgcaggttcacgacgagctcgtgtttgaagtgccgccggacgagctcgacgcgatgcgggagcttgtgacggacgtcatggagtcggcggtcccgctcgacgtgccgctgaaggtcgacgtcagctggggcgccgactggtacgcggcgaagtgagggaagcgggatcc

SEQ ID NO: 1107 - DNA, 2792 bp, Artificial Sequence
  Description of Artificial Sequence: Synthetic Caldibacillus cellulovorans CompA.2 DNA Polymerase D824S
atgaaatacctgctgccgaccgctgctgctggtctgctgctcctcgctgcccagccggcgatggccatgggcaaactgattctggtcgacggaaacagcgtcgccaaccgggcgttttacgccgtccggctgctcagcacgcgcggcggcctgcacacaaacgcggtgtacggattcgccaacatgttgctcaagctgatcgaggaggaacggccgacgcattttctcgtcgcgttcgacgcgggcaaggcgacgttccgtcatcgcgaatacgaggcctacaaggcgggtcgcctgcagacgccgcccgagctgtccgagcagtttccgtacatccgggagctcgtccgggcgttcggcgtcgcgtccggcgagctggaggaatacgaggcggacgacatgatcggtacgctggcgaaacgggcggaggccgagggcgtcgacacgctggtcgtcaccggcgaccgcgatttgctccagctcgtatcggaccgcgtgaccgtcgcgctgacgcgcaagggcatcacggaaacggagcggtacgacccggcgcgcatccgcgaggaatacggcttcgatcccgaccgcatccgcgacctcaaagggctgatgggcgacgcgtctgacaatcttcccggcgttcccggcgtcggtgagaaaaccgcactgaaactgctcaggcagtacggttcgctggagagcgtcctggaacacgcgtcggaaatcgccggaaagctcggtgaaaatctgcgggcgcacgccgacgccgcccgattgagcaagcggctggcgacgatcgactgcgcggtaccgttgcagtcgggatgggactggctgcgcctcggcgaaccggaccgcgccgcgctcgcctcgctgttgcggcagctcgaattcaagtcgctgttgaaacggctcggactcgacggcacgtccgccgatgccgacgtcgacggcgtccgttcctccgcgcggccggcggacgagaaacggccgagggccgtcgccgtcgctgaggagggcgtcgacgtccgctgtccggatcgcccggaagaagtcgaagaagcgctgtcgcggctggaagccgcccagtcggtcgtcgtcgaggtgacgggcgacaacccgcacgacggcgaagtgcgcggcgtcgcatggtgggacggacatacggcgtatttcattccgtttgaacggctggtgcagtccgacatgcggccgctggccgactggctcgccgacgcgcgtcggccgaagcgtacgcacgactcccatcgcgctgaagtggcgctgttctggcacggccttgcgtttcgcggcacgtcgttctgcacgcatatcgccgcctatttgctcgaccccacggaatcgcgccatacgctggcggacctgtcgcgccgctacggtctgccgccggtaccggaagccgaggacgtttacggcaagggcgcgaagttcaaggttcccgatcgcgacacgctggcgcgttacgtcggccgcaaggccgccctagtcgcgcggctcgttccgctgctcgaggcggatttggcggcctgcggcatgcgttcgcttttttacgacctggagctgccgctttcatccgaactcgccgtcatggagacggtcggcgtccgcgtcgacgcggcggcgctcgccgcctacggcgaggaattgcgcgaggcggcggcgaaagtcgagcgggagatttacgagctggccgggacgacgttcaacatcggatcgacgaaacagctcggcgaaattttgttcgataagctggggctgcccgtcgtcaagaaaacgaaaaccggctattccaccgacgcagacgtgctggaggaactggcgccgtaccatccgatcgtcgaaaagattttgcattaccgccaactgacgaaattgcagtcgacctacatcgaggggcttttgaaagaaatccgtccgcaaaccggtaaaatccatacgtattatcagcagacgatcgcggcgacggggcggctgagcagtcagtttcccaatcttcagaacattccgatccgtctcgaagaggggcggaaaatccgcaaggcgttcgttccgtcagaaccgggatggctgatgctcgccgccgactattcgcagatcgaactgcgcgtgctcgcgcacgtttccggcgacgaacggctgaaggaagcgtttcggacaggcatggacatccacacgaagaccgcgatggacgtgttcggcgtttccgaagaccgcgtcgacgcgcgcatgcggcggcaggcgaaggcggtcaatttcggcatcatctacggcatcagcgatttcggactggcgcaaaacctgaacatttcccgcaaggaggcggcggagttcatccggcaatatttcgccgtcttttcgggcgtcaaggcgtaccgcgagcggatcgtcgagcaggcgcgccgcgacggttacgtgacgaccctgctcggtcgcaggcgctatttgccgtctatcaacgcgtcgaattacaacctccgctcgttcgcggagcggacggcgatgaatacgccgatccagggcacggccgccgacatcatcaagaccgcgatggtgcgtctgacgcggcggatgcgcgacgtcggactgaagagccgcatgctgctgcaggttcacgacgagctcgtgtttgaagtgccgccggacgagctcgacgcgatgcgggagcttgtgacggacgtcatggagtcggcggtcccgctcgacgtgccgctgaaggtcgacgtcagctggggcgccgactggtacgcggcgaagtgagggaagcgggatcc

SEQ ID NO: 1108 - DNA, 2792 bp, Artificial Sequence
  Description of Artificial Sequence: Synthetic Caldibacillus cellulovorans CompA.2 DNA Polymerase D824T
atgaaatacctgctgccgaccgctgctgctggtctgctgctcctcgctgcccagccggcgatggccatgggcaaactgattctggtcgacggaaacagcgtcgccaaccgggcgttttacgccgtccggctgctcagcacgcgcggcggcctgcacacaaacgcggtgtacggattcgccaacatgttgctcaagctgatcgaggaggaacggccgacgcattttctcgtcgcgttcgacgcgggcaaggcgacgttccgtcatcgcgaatacgaggcctacaaggcgggtcgcctgcagacgccgcccgagctgtccgagcagtttccgtacatccgggagctcgtccgggcgttcggcgtcgcgtccggcgagctggaggaatacgaggcggacgacatgatcggtacgctggcgaaacgggcggaggccgagggcgtcgacacgctggtcgtcaccggcgaccgcgatttgctccagctcgtatcggaccgcgtgaccgtcgcgctgacgcgcaagggcatcacggaaacggagcggtacgacccggcgcgcatccgcgaggaatacggcttcgatcccgaccgcatccgcgacctcaaagggctgatgggcgacgcgtctgacaatcttcccggcgttcccggcgtcggtgagaaaaccgcactgaaactgctcaggcagtacggttcgctggagagcgtcctggaacacgcgtcggaaatcgccggaaagctcggtgaaaatctgcgggcgcacgccgacgccgcccgattgagcaagcggctggcgacgatcgactgcgcggtaccgttgcagtcgggatgggactggctgcgcctcggcgaaccggaccgcgccgcgctcgcctcgctgttgcggcagctcgaattcaagtcgctgttgaaacggctcggactcgacggcacgtccgccgatgccgacgtcgacggcgtccgttcctccgcgcggccggcggacgagaaacggccgagggccgtcgccgtcgctgaggagggcgtcgacgtccgctgtccggatcgcccggaagaagtcgaagaagcgctgtcgcggctggaagccgcccagtcggtcgtcgtcgaggtgacgggcgacaacccgcacgacggcgaagtgcgcggcgtcgcatggtgggacggacatacggcgtatttcattccgtttgaacggctggtgcagtccgacatgcggccgctggccgactggctcgccgacgcgcgtcggccgaagcgtacgcacgactcccatcgcgctgaagtggcgctgttctggcacggccttgcgtttcgcggcacgtcgttctgcacgcatatcgccgcctatttgctcgaccccacggaatcgcgccatacgctggcggacctgtcgcgccgctacggtctgccgccggtaccggaagccgaggacgtttacggcaagggcgcgaagttcaaggttcccgatcgcgacacgctggcgcgttacgtcggccgcaaggccgccctagtcgcgcggctcgttccgctgctcgaggcggatttggcggcctgcggcatgcgttcgcttttttacgacctggagctgccgctttcatccgaactcgccgtcatggagacggtcggcgtccgcgtcgacgcggcggcgctcgccgcctacggcgaggaattgcgcgaggcggcggcgaaagtcgagcgggagatttacgagctggccgggacgacgttcaacatcggatcgacgaaacagctcggcgaaattttgttcgataagctggggctgcccgtcgtcaagaaaacgaaaaccggctattccaccgacgcagacgtgctggaggaactggcgccgtaccatccgatcgtcgaaaagattttgcattaccgccaactgacgaaattgcagtcgacctacatcgaggggcttttgaaagaaatccgtccgcaaaccggtaaaatccatacgtattatcagcagacgatcgcggcgacggggcggctgagcagtcagtttcccaatcttcagaacattccgatccgtctcgaagaggggcggaaaatccgcaaggcgttcgttccgtcagaaccgggatggctgatgctcgccgccgactattcgcagatcgaactgcgcgtgctcgcgcacgtttccggcgacgaacggctgaaggaagcgtttcggacaggcatggacatccacacgaagaccgcgatggacgtgttcggcgtttccgaagaccgcgtcgacgcgcgcatgcggcggcaggcgaaggcggtcaatttcggcatcatctacggcatcagcgatttcggactggcgcaaaacctgaacatttcccgcaaggaggcggcggagttcatccggcaatatttcgccgtcttttcgggcgtcaaggcgtaccgcgagcggatcgtcgagcaggcgcgccgcgacggttacgtgacgaccctgctcggtcgcaggcgctatttgccgactatcaacgcgtcgaattacaacctccgctcgttcgcggagcggacggcgatgaatacgccgatccagggcacggccgccgacatcatcaagaccgcgatggtgcgtctgacgcggcggatgcgcgacgtcggactgaagagccgcatgctgctgcaggttcacgacgagctcgtgtttgaagtgccgccggacgagctcgacgcgatgcgggagcttgtgacggacgtcatggagtcggcggtcccgctcgacgtgccgctgaaggtcgacgtcagctggggcgccgactggtacgcggcgaagtgagggaagcgggatcc

SEQ ID NO: 1109 - DNA, 2792 bp, Artificial Sequence
  Description of Artificial Sequence: Synthetic Caldibacillus cellulovorans CompA.2 DNA Polymerase D824W
atgaaatacctgctgccgaccgctgctgctggtctgctgctcctcgctgcccagccggcgatggccatgggcaaactgattctggtcgacggaaacagcgtcgccaaccgggcgttttacgccgtccggctgctcagcacgcgcggcggcctgcacacaaacgcggtgtacggattcgccaacatgttgctcaagctgatcgaggaggaacggccgacgcattttctcgtcgcgttcgacgcgggcaaggcgacgttccgtcatcgcgaatacgaggcctacaaggcgggtcgcctgcagacgccgcccgagctgtccgagcagtttccgtacatccgggagctcgtccgggcgttcggcgtcgcgtccggcgagctggaggaatacgaggcggacgacatgatcggtacgctggcgaaacgggcggaggccgagggcgtcgacacgctggtcgtcaccggcgaccgcgatttgctccagctcgtatcggaccgcgtgaccgtcgcgctgacgcgcaagggcatcacggaaacggagcggtacgacccggcgcgcatccgcgaggaatacggcttcgatcccgaccgcatccgcgacctcaaagggctgatgggcgacgcgtctgacaatcttcccggcgttcccggcgtcggtgagaaaaccgcactgaaactgctcaggcagtacggttcgctggagagcgtcctggaacacgcgtcggaaatcgccggaaagctcggtgaaaatctgcgggcgcacgccgacgccgcccgattgagcaagcggctggcgacgatcgactgcgcggtaccgttgcagtcgggatgggactggctgcgcctcggcgaaccggaccgcgccgcgctcgcctcgctgttgcggcagctcgaattcaagtcgctgttgaaacggctcggactcgacggcacgtccgccgatgccgacgtcgacggcgtccgttcctccgcgcggccggcggacgagaaacggccgagggccgtcgccgtcgctgaggagggcgtcgacgtccgctgtccggatcgcccggaagaagtcgaagaagcgctgtcgcggctggaagccgcccagtcggtcgtcgtcgaggtgacgggcgacaacccgcacgacggcgaagtgcgcggcgtcgcatggtgggacggacatacggcgtatttcattccgtttgaacggctggtgcagtccgacatgcggccgctggccgactggctcgccgacgcgcgtcggccgaagcgtacgcacgactcccatcgcgctgaagtggcgctgttctggcacggccttgcgtttcgcggcacgtcgttctgcacgcatatcgccgcctatttgctcgaccccacggaatcgcgccatacgctggcggacctgtcgcgccgctacggtctgccgccggtaccggaagccgaggacgtttacggcaagggcgcgaagttcaaggttcccgatcgcgacacgctggcgcgttacgtcggccgcaaggccgccctagtcgcgcggctcgttccgctgctcgaggcggatttggcggcctgcggcatgcgttcgcttttttacgacctggagctgccgctttcatccgaactcgccgtcatggagacggtcggcgtccgcgtcgacgcggcggcgctcgccgcctacggcgaggaattgcgcgaggcggcggcgaaagtcgagcgggagatttacgagctggccgggacgacgttcaacatcggatcgacgaaacagctcggcgaaattttgttcgataagctggggctgcccgtcgtcaagaaaacgaaaaccggctattccaccgacgcagacgtgctggaggaactggcgccgtaccatccgatcgtcgaaaagattttgcattaccgccaactgacgaaattgcagtcgacctacatcgaggggcttttgaaagaaatccgtccgcaaaccggtaaaatccatacgtattatcagcagacgatcgcggcgacggggcggctgagcagtcagtttcccaatcttcagaacattccgatccgtctcgaagaggggcggaaaatccgcaaggcgttcgttccgtcagaaccgggatggctgatgctcgccgccgactattcgcagatcgaactgcgcgtgctcgcgcacgtttccggcgacgaacggctgaaggaagcgtttcggacaggcatggacatccacacgaagaccgcgatggacgtgttcggcgtttccgaagaccgcgtcgacgcgcgcatgcggcggcaggcgaaggcggtcaatttcggcatcatctacggcatcagcgatttcggactggcgcaaaacctgaacatttcccgcaaggaggcggcggagttcatccggcaatatttcgccgtcttttcgggcgtcaaggcgtaccgcgagcggatcgtcgagcaggcgcgccgcgacggttacgtgacgaccctgctcggtcgcaggcgctatttgccgtggatcaacgcgtcgaattacaacctccgctcgttcgcggagcggacggcgatgaatacgccgatccagggcacggccgccgacatcatcaagaccgcgatggtgcgtctgacgcggcggatgcgcgacgtcggactgaagagccgcatgctgctgcaggttcacgacgagctcgtgtttgaagtgccgccggacgagctcgacgcgatgcgggagcttgtgacggacgtcatggagtcggcggtcccgctcgacgtgccgctgaaggtcgacgtcagctggggcgccgactggtacgcggcgaagtgagggaagcgggatcc

SEQ ID NO: 1110 - DNA, 2792 bp, Artificial Sequence
  Description of Artificial Sequence: Synthetic Caldibacillus cellulovorans CompA.2 DNA Polymerase D824Y
atgaaatacctgctgccgaccgctgctgctggtctgctgctcctcgctgcccagccggcgatggccatgggcaaactgattctggtcgacggaaacagcgtcgccaaccgggcgttttacgccgtccggctgctcagcacgcgcggcggcctgcacacaaacgcggtgtacggattcgccaacatgttgctcaagctgatcgaggaggaacggccgacgcattttctcgtcgcgttcgacgcgggcaaggcgacgttccgtcatcgcgaatacgaggcctacaaggcgggtcgcctgcagacgccgcccgagctgtccgagcagtttccgtacatccgggagctcgtccgggcgttcggcgtcgcgtccggcgagctggaggaatacgaggcggacgacatgatcggtacgctggcgaaacgggcggaggccgagggcgtcgacacgctggtcgtcaccggcgaccgcgatttgctccagctcgtatcggaccgcgtgaccgtcgcgctgacgcgcaagggcatcacggaaacggagcggtacgacccggcgcgcatccgcgaggaatacggcttcgatcccgaccgcatccgcgacctcaaagggctgatgggcgacgcgtctgacaatcttcccggcgttcccggcgtcggtgagaaaaccgcactgaaactgctcaggcagtacggttcgctggagagcgtcctggaacacgcgtcggaaatcgccggaaagctcggtgaaaatctgcgggcgcacgccgacgccgcccgattgagcaagcggctggcgacgatcgactgcgcggtaccgttgcagtcgggatgggactggctgcgcctcggcgaaccggaccgcgccgcgctcgcctcgctgttgcggcagctcgaattcaagtcgctgttgaaacggctcggactcgacggcacgtccgccgatgccgacgtcgacggcgtccgttcctccgcgcggccggcggacgagaaacggccgagggccgtcgccgtcgctgaggagggcgtcgacgtccgctgtccggatcgcccggaagaagtcgaagaagcgctgtcgcggctggaagccgcccagtcggtcgtcgtcgaggtgacgggcgacaacccgcacgacggcgaagtgcgcggcgtcgcatggtgggacggacatacggcgtatttcattccgtttgaacggctggtgcagtccgacatgcggccgctggccgactggctcgccgacgcgcgtcggccgaagcgtacgcacgactcccatcgcgctgaagtggcgctgttctggcacggccttgcgtttcgcggcacgtcgttctgcacgcatatcgccgcctatttgctcgaccccacggaatcgcgccatacgctggcggacctgtcgcgccgctacggtctgccgccggtaccggaagccgaggacgtttacggcaagggcgcgaagttcaaggttcccgatcgcgacacgctggcgcgttacgtcggccgcaaggccgccctagtcgcgcggctcgttccgctgctcgaggcggatttggcggcctgcggcatgcgttcgcttttttacgacctggagctgccgctttcatccgaactcgccgtcatggagacggtcggcgtccgcgtcgacgcggcggcgctcgccgcctacggcgaggaattgcgcgaggcggcggcgaaagtcgagcgggagatttacgagctggccgggacgacgttcaacatcggatcgacgaaacagctcggcgaaattttgttcgataagctggggctgcccgtcgtcaagaaaacgaaaaccggctattccaccgacgcagacgtgctggaggaactggcgccgtaccatccgatcgtcgaaaagattttgcattaccgccaactgacgaaattgcagtcgacctacatcgaggggcttttgaaagaaatccgtccgcaaaccggtaaaatccatacgtattatcagcagacgatcgcggcgacggggcggctgagcagtcagtttcccaatcttcagaacattccgatccgtctcgaagaggggcggaaaatccgcaaggcgttcgttccgtcagaaccgggatggctgatgctcgccgccgactattcgcagatcgaactgcgcgtgctcgcgcacgtttccggcgacgaacggctgaaggaagcgtttcggacaggcatggacatccacacgaagaccgcgatggacgtgttcggcgtttccgaagaccgcgtcgacgcgcgcatgcggcggcaggcgaaggcggtcaatttcggcatcatctacggcatcagcgatttcggactggcgcaaaacctgaacatttcccgcaaggaggcggcggagttcatccggcaatatttcgccgtcttttcgggcgtcaaggcgtaccgcgagcggatcgtcgagcaggcgcgccgcgacggttacgtgacgaccctgctcggtcgcaggcgctatttgccgtatatcaacgcgtcgaattacaacctccgctcgttcgcggagcggacggcgatgaatacgccgatccagggcacggccgccgacatcatcaagaccgcgatggtgcgtctgacgcggcggatgcgcgacgtcggactgaagagccgcatgctgctgcaggttcacgacgagctcgtgtttgaagtgccgccggacgagctcgacgcgatgcgggagcttgtgacggacgtcatggagtcggcggtcccgctcgacgtgccgctgaaggtcgacgtcagctggggcgccgactggtacgcggcgaagtgagggaagcgggatcc

SEQ ID NO: 1111 - DNA, 2792 bp, Artificial Sequence
  Description of Artificial Sequence: Synthetic Caldibacillus cellulovorans CompA.2 DNA Polymerase D824V
atgaaatacctgctgccgaccgctgctgctggtctgctgctcctcgctgcccagccggcgatggccatgggcaaactgattctggtcgacggaaacagcgtcgccaaccgggcgttttacgccgtccggctgctcagcacgcgcggcggcctgcacacaaacgcggtgtacggattcgccaacatgttgctcaagctgatcgaggaggaacggccgacgcattttctcgtcgcgttcgacgcgggcaaggcgacgttccgtcatcgcgaatacgaggcctacaaggcgggtcgcctgcagacgccgcccgagctgtccgagcagtttccgtacatccgggagctcgtccgggcgttcggcgtcgcgtccggcgagctggaggaatacgaggcggacgacatgatcggtacgctggcgaaacgggcggaggccgagggcgtcgacacgctggtcgtcaccggcgaccgcgatttgctccagctcgtatcggaccgcgtgaccgtcgcgctgacgcgcaagggcatcacggaaacggagcggtacgacccggcgcgcatccgcgaggaatacggcttcgatcccgaccgcatccgcgacctcaaagggctgatgggcgacgcgtctgacaatcttcccggcgttcccggcgtcggtgagaaaaccgcactgaaactgctcaggcagtacggttcgctggagagcgtcctggaacacgcgtcggaaatcgccggaaagctcggtgaaaatctgcgggcgcacgccgacgccgcccgattgagcaagcggctggcgacgatcgactgcgcggtaccgttgcagtcgggatgggactggctgcgcctcggcgaaccggaccgcgccgcgctcgcctcgctgttgcggcagctcgaattcaagtcgctgttgaaacggctcggactcgacggcacgtccgccgatgccgacgtcgacggcgtccgttcctccgcgcggccggcggacgagaaacggccgagggccgtcgccgtcgctgaggagggcgtcgacgtccgctgtccggatcgcccggaagaagtcgaagaagcgctgtcgcggctggaagccgcccagtcggtcgtcgtcgaggtgacgggcgacaacccgcacgacggcgaagtgcgcggcgtcgcatggtgggacggacatacggcgtatttcattccgtttgaacggctggtgcagtccgacatgcggccgctggccgactggctcgccgacgcgcgtcggccgaagcgtacgcacgactcccatcgcgctgaagtggcgctgttctggcacggccttgcgtttcgcggcacgtcgttctgcacgcatatcgccgcctatttgctcgaccccacggaatcgcgccatacgctggcggacctgtcgcgccgctacggtctgccgccggtaccggaagccgaggacgtttacggcaagggcgcgaagttcaaggttcccgatcgcgacacgctggcgcgttacgtcggccgcaaggccgccctagtcgcgcggctcgttccgctgctcgaggcggatttggcggcctgcggcatgcgttcgcttttttacgacctggagctgccgctttcatccgaactcgccgtcatggagacggtcggcgtccgcgtcgacgcggcggcgctcgccgcctacggcgaggaattgcgcgaggcggcggcgaaagtcgagcgggagatttacgagctggccgggacgacgttcaacatcggatcgacgaaacagctcggcgaaattttgttcgataagctggggctgcccgtcgtcaagaaaacgaaaaccggctattccaccgacgcagacgtgctggaggaactggcgccgtaccatccgatcgtcgaaaagattttgcattaccgccaactgacgaaattgcagtcgacctacatcgaggggcttttgaaagaaatccgtccgcaaaccggtaaaatccatacgtattatcagcagacgatcgcggcgacggggcggctgagcagtcagtttcccaatcttcagaacattccgatccgtctcgaagaggggcggaaaatccgcaaggcgttcgttccgtcagaaccgggatggctgatgctcgccgccgactattcgcagatcgaactgcgcgtgctcgcgcacgtttccggcgacgaacggctgaaggaagcgtttcggacaggcatggacatccacacgaagaccgcgatggacgtgttcggcgtttccgaagaccgcgtcgacgcgcgcatgcggcggcaggcgaaggcggtcaatttcggcatcatctacggcatcagcgatttcggactggcgcaaaacctgaacatttcccgcaaggaggcggcggagttcatccggcaatatttcgccgtcttttcgggcgtcaaggcgtaccgcgagcggatcgtcgagcaggcgcgccgcgacggttacgtgacgaccctgctcggtcgcaggcgctatttgccggttatcaacgcgtcgaattacaacctccgctcgttcgcggagcggacggcgatgaatacgccgatccagggcacggccgccgacatcatcaagaccgcgatggtgcgtctgacgcggcggatgcgcgacgtcggactgaagagccgcatgctgctgcaggttcacgacgagctcgtgtttgaagtgccgccggacgagctcgacgcgatgcgggagcttgtgacggacgtcatggagtcggcggtcccgctcgacgtgccgctgaaggtcgacgtcagctggggcgccgactggtacgcggcgaagtgagggaagcgggatcc

SEQ ID NO: 1112 - DNA, 2792 bp, Artificial Sequence
  Description of Artificial Sequence: Synthetic Caldibacillus cellulovorans CompA.2 DNA Polymerase I825A
atgaaatacctgctgccgaccgctgctgctggtctgctgctcctcgctgcccagccggcgatggccatgggcaaactgattctggtcgacggaaacagcgtcgccaaccgggcgttttacgccgtccggctgctcagcacgcgcggcggcctgcacacaaacgcggtgtacggattcgccaacatgttgctcaagctgatcgaggaggaacggccgacgcattttctcgtcgcgttcgacgcgggcaaggcgacgttccgtcatcgcgaatacgaggcctacaaggcgggtcgcctgcagacgccgcccgagctgtccgagcagtttccgtacatccgggagctcgtccgggcgttcggcgtcgcgtccggcgagctggaggaatacgaggcggacgacatgatcggtacgctggcgaaacgggcggaggccgagggcgtcgacacgctggtcgtcaccggcgaccgcgatttgctccagctcgtatcggaccgcgtgaccgtcgcgctgacgcgcaagggcatcacggaaacggagcggtacgacccggcgcgcatccgcgaggaatacggcttcgatcccgaccgcatccgcgacctcaaagggctgatgggcgacgcgtctgacaatcttcccggcgttcccggcgtcggtgagaaaaccgcactgaaactgctcaggcagtacggttcgctggagagcgtcctggaacacgcgtcggaaatcgccggaaagctcggtgaaaatctgcgggcgcacgccgacgccgcccgattgagcaagcggctggcgacgatcgactgcgcggtaccgttgcagtcgggatgggactggctgcgcctcggcgaaccggaccgcgccgcgctcgcctcgctgttgcggcagctcgaattcaagtcgctgttgaaacggctcggactcgacggcacgtccgccgatgccgacgtcgacggcgtccgttcctccgcgcggccggcggacgagaaacggccgagggccgtcgccgtcgctgaggagggcgtcgacgtccgctgtccggatcgcccggaagaagtcgaagaagcgctgtcgcggctggaagccgcccagtcggtcgtcgtcgaggtgacgggcgacaacccgcacgacggcgaagtgcgcggcgtcgcatggtgggacggacatacggcgtatttcattccgtttgaacggctggtgcagtccgacatgcggccgctggccgactggctcgccgacgcgcgtcggccgaagcgtacgcacgactcccatcgcgctgaagtggcgctgttctggcacggccttgcgtttcgcggcacgtcgttctgcacgcatatcgccgcctatttgctcgaccccacggaatcgcgccatacgctggcggacctgtcgcgccgctacggtctgccgccggtaccggaagccgaggacgtttacggcaagggcgcgaagttcaaggttcccgatcgcgacacgctggcgcgttacgtcggccgcaaggccgccctagtcgcgcggctcgttccgctgctcgaggcggatttggcggcctgcggcatgcgttcgcttttttacgacctggagctgccgctttcatccgaactcgccgtcatggagacggtcggcgtccgcgtcgacgcggcggcgctcgccgcctacggcgaggaattgcgcgaggcggcggcgaaagtcgagcgggagatttacgagctggccgggacgacgttcaacatcggatcgacgaaacagctcggcgaaattttgttcgataagctggggctgcccgtcgtcaagaaaacgaaaaccggctattccaccgacgcagacgtgctggaggaactggcgccgtaccatccgatcgtcgaaaagattttgcattaccgccaactgacgaaattgcagtcgacctacatcgaggggcttttgaaagaaatccgtccgcaaaccggtaaaatccatacgtattatcagcagacgatcgcggcgacggggcggctgagcagtcagtttcccaatcttcagaacattccgatccgtctcgaagaggggcggaaaatccgcaaggcgttcgttccgtcagaaccgggatggctgatgctcgccgccgactattcgcagatcgaactgcgcgtgctcgcgcacgtttccggcgacgaacggctgaaggaagcgtttcggacaggcatggacatccacacgaagaccgcgatggacgtgttcggcgtttccgaagaccgcgtcgacgcgcgcatgcggcggcaggcgaaggcggtcaatttcggcatcatctacggcatcagcgatttcggactggcgcaaaacctgaacatttcccgcaaggaggcggcggagttcatccggcaatatttcgccgtcttttcgggcgtcaaggcgtaccgcgagcggatcgtcgagcaggcgcgccgcgacggttacgtgacgaccctgctcggtcgcaggcgctatttgccggacgctaacgcgtcgaattacaacctccgctcgttcgcggagcggacggcgatgaatacgccgatccagggcacggccgccgacatcatcaagaccgcgatggtgcgtctgacgcggcggatgcgcgacgtcggactgaagagccgcatgctgctgcaggttcacgacgagctcgtgtttgaagtgccgccggacgagctcgacgcgatgcgggagcttgtgacggacgtcatggagtcggcggtcccgctcgacgtgccgctgaaggtcgacgtcagctggggcgccgactggtacgcggcgaagtgagggaagcgggatcc

SEQ ID NO: 1113 - DNA, 2792 bp, Artificial Sequence
  Description of Artificial Sequence: Synthetic Caldibacillus cellulovorans CompA.2 DNA Polymerase I825R
atgaaatacctgctgccgaccgctgctgctggtctgctgctcctcgctgcccagccggcgatggccatgggcaaactgattctggtcgacggaaacagcgtcgccaaccgggcgttttacgccgtccggctgctcagcacgcgcggcggcctgcacacaaacgcggtgtacggattcgccaacatgttgctcaagctgatcgaggaggaacggccgacgcattttctcgtcgcgttcgacgcgggcaaggcgacgttccgtcatcgcgaatacgaggcctacaaggcgggtcgcctgcagacgccgcccgagctgtccgagcagtttccgtacatccgggagctcgtccgggcgttcggcgtcgcgtccggcgagctggaggaatacgaggcggacgacatgatcggtacgctggcgaaacgggcggaggccgagggcgtcgacacgctggtcgtcaccggcgaccgcgatttgctccagctcgtatcggaccgcgtgaccgtcgcgctgacgcgcaagggcatcacggaaacggagcggtacgacccggcgcgcatccgcgaggaatacggcttcgatcccgaccgcatccgcgacctcaaagggctgatgggcgacgcgtctgacaatcttcccggcgttcccggcgtcggtgagaaaaccgcactgaaactgctcaggcagtacggttcgctggagagcgtcctggaacacgcgtcggaaatcgccggaaagctcggtgaaaatctgcgggcgcacgccgacgccgcccgattgagcaagcggctggcgacgatcgactgcgcggtaccgttgcagtcgggatgggactggctgcgcctcggcgaaccggaccgcgccgcgctcgcctcgctgttgcggcagctcgaattcaagtcgctgttgaaacggctcggactcgacggcacgtccgccgatgccgacgtcgacggcgtccgttcctccgcgcggccggcggacgagaaacggccgagggccgtcgccgtcgctgaggagggcgtcgacgtccgctgtccggatcgcccggaagaagtcgaagaagcgctgtcgcggctggaagccgcccagtcggtcgtcgtcgaggtgacgggcgacaacccgcacgacggcgaagtgcgcggcgtcgcatggtgggacggacatacggcgtatttcattccgtttgaacggctggtgcagtccgacatgcggccgctggccgactggctcgccgacgcgcgtcggccgaagcgtacgcacgactcccatcgcgctgaagtggcgctgttctggcacggccttgcgtttcgcggcacgtcgttctgcacgcatatcgccgcctatttgctcgaccccacggaatcgcgccatacgctggcggacctgtcgcgccgctacggtctgccgccggtaccggaagccgaggacgtttacggcaagggcgcgaagttcaaggttcccgatcgcgacacgctggcgcgttacgtcggccgcaaggccgccctagtcgcgcggctcgttccgctgctcgaggcggatttggcggcctgcggcatgcgttcgcttttttacgacctggagctgccgctttcatccgaactcgccgtcatggagacggtcggcgtccgcgtcgacgcggcggcgctcgccgcctacggcgaggaattgcgcgaggcggcggcgaaagtcgagcgggagatttacgagctggccgggacgacgttcaacatcggatcgacgaaacagctcggcgaaattttgttcgataagctggggctgcccgtcgtcaagaaaacgaaaaccggctattccaccgacgcagacgtgctggaggaactggcgccgtaccatccgatcgtcgaaaagattttgcattaccgccaactgacgaaattgcagtcgacctacatcgaggggcttttgaaagaaatccgtccgcaaaccggtaaaatccatacgtattatcagcagacgatcgcggcgacggggcggctgagcagtcagtttcccaatcttcagaacattccgatccgtctcgaagaggggcggaaaatccgcaaggcgttcgttccgtcagaaccgggatggctgatgctcgccgccgactattcgcagatcgaactgcgcgtgctcgcgcacgtttccggcgacgaacggctgaaggaagcgtttcggacaggcatggacatccacacgaagaccgcgatggacgtgttcggcgtttccgaagaccgcgtcgacgcgcgcatgcggcggcaggcgaaggcggtcaatttcggcatcatctacggcatcagcgatttcggactggcgcaaaacctgaacatttcccgcaaggaggcggcggagttcatccggcaatatttcgccgtcttttcgggcgtcaaggcgtaccgcgagcggatcgtcgagcaggcgcgccgcgacggttacgtgacgaccctgctcggtcgcaggcgctatttgccggaccgtaacgcgtcgaattacaacctccgctcgttcgcggagcggacggcgatgaatacgccgatccagggcacggccgccgacatcatcaagaccgcgatggtgcgtctgacgcggcggatgcgcgacgtcggactgaagagccgcatgctgctgcaggttcacgacgagctcgtgtttgaagtgccgccggacgagctcgacgcgatgcgggagcttgtgacggacgtcatggagtcggcggtcccgctcgacgtgccgctgaaggtcgacgtcagctggggcgccgactggtacgcggcgaagtgagggaagcgggatcc

SEQ ID NO: 1114 - DNA, 2792 bp, Artificial Sequence
  Description of Artificial Sequence: Synthetic Caldibacillus cellulovorans CompA.2 DNA Polymerase I825N
atgaaatacctgctgccgaccgctgctgctggtctgctgctcctcgctgcccagccggcgatggccatgggcaaactgattctggtcgacggaaacagcgtcgccaaccgggcgttttacgccgtccggctgctcagcacgcgcggcggcctgcacacaaacgcggtgtacggattcgccaacatgttgctcaagctgatcgaggaggaacggccgacgcattttctcgtcgcgttcgacgcgggcaaggcgacgttccgtcatcgcgaatacgaggcctacaaggcgggtcgcctgcagacgccgcccgagctgtccgagcagtttccgtacatccgggagctcgtccgggcgttcggcgtcgcgtccggcgagctggaggaatacgaggcggacgacatgatcggtacgctggcgaaacgggcggaggccgagggcgtcgacacgctggtcgtcaccggcgaccgcgatttgctccagctcgtatcggaccgcgtgaccgtcgcgctgacgcgcaagggcatcacggaaacggagcggtacgacccggcgcgcatccgcgaggaatacggcttcgatcccgaccgcatccgcgacctcaaagggctgatgggcgacgcgtctgacaatcttcccggcgttcccggcgtcggtgagaaaaccgcactgaaactgctcaggcagtacggttcgctggagagcgtcctggaacacgcgtcggaaatcgccggaaagctcggtgaaaatctgcgggcgcacgccgacgccgcccgattgagcaagcggctggcgacgatcgactgcgcggtaccgttgcagtcgggatgggactggctgcgcctcggcgaaccggaccgcgccgcgctcgcctcgctgttgcggcagctcgaattcaagtcgctgttgaaacggctcggactcgacggcacgtccgccgatgccgacgtcgacggcgtccgttcctccgcgcggccggcggacgagaaacggccgagggccgtcgccgtcgctgaggagggcgtcgacgtccgctgtccggatcgcccggaagaagtcgaagaagcgctgtcgcggctggaagccgcccagtcggtcgtcgtcgaggtgacgggcgacaacccgcacgacggcgaagtgcgcggcgtcgcatggtgggacggacatacggcgtatttcattccgtttgaacggctggtgcagtccgacatgcggccgctggccgactggctcgccgacgcgcgtcggccgaagcgtacgcacgactcccatcgcgctgaagtggcgctgttctggcacggccttgcgtttcgcggcacgtcgttctgcacgcatatcgccgcctatttgctcgaccccacggaatcgcgccatacgctggcggacctgtcgcgccgctacggtctgccgccggtaccggaagccgaggacgtttacggcaagggcgcgaagttcaaggttcccgatcgcgacacgctggcgcgttacgtcggccgcaaggccgccctagtcgcgcggctcgttccgctgctcgaggcggatttggcggcctgcggcatgcgttcgcttttttacgacctggagctgccgctttcatccgaactcgccgtcatggagacggtcggcgtccgcgtcgacgcggcggcgctcgccgcctacggcgaggaattgcgcgaggcggcggcgaaagtcgagcgggagatttacgagctggccgggacgacgttcaacatcggatcgacgaaacagctcggcgaaattttgttcgataagctggggctgcccgtcgtcaagaaaacgaaaaccggctattccaccgacgcagacgtgctggaggaactggcgccgtaccatccgatcgtcgaaaagattttgcattaccgccaactgacgaaattgcagtcgacctacatcgaggggcttttgaaagaaatccgtccgcaaaccggtaaaatccatacgtattatcagcagacgatcgcggcgacggggcggctgagcagtcagtttcccaatcttcagaacattccgatccgtctcgaagaggggcggaaaatccgcaaggcgttcgttccgtcagaaccgggatggctgatgctcgccgccgactattcgcagatcgaactgcgcgtgctcgcgcacgtttccggcgacgaacggctgaaggaagcgtttcggacaggcatggacatccacacgaagaccgcgatggacgtgttcggcgtttccgaagaccgcgtcgacgcgcgcatgcggcggcaggcgaaggcggtcaatttcggcatcatctacggcatcagcgatttcggactggcgcaaaacctgaacatttcccgcaaggaggcggcggagttcatccggcaatatttcgccgtcttttcgggcgtcaaggcgtaccgcgagcggatcgtcgagcaggcgcgccgcgacggttacgtgacgaccctgctcggtcgcaggcgctatttgccggacaataacgcgtcgaattacaacctccgctcgttcgcggagcggacggcgatgaatacgccgatccagggcacggccgccgacatcatcaagaccgcgatggtgcgtctgacgcggcggatgcgcgacgtcggactgaagagccgcatgctgctgcaggttcacgacgagctcgtgtttgaagtgccgccggacgagctcgacgcgatgcgggagcttgtgacggacgtcatggagtcggcggtcccgctcgacgtgccgctgaaggtcgacgtcagctggggcgccgactggtacgcggcgaagtgagggaagcgggatcc

SEQ ID NO: 1115 - DNA, 2792 bp, Artificial Sequence
  Description of Artificial Sequence: Synthetic Caldibacillus cellulovorans CompA.2 DNA Polymerase I825D
atgaaatacctgctgccgaccgctgctgctggtctgctgctcctcgctgcccagccggcgatggccatgggcaaactgattctggtcgacggaaacagcgtcgccaaccgggcgttttacgccgtccggctgctcagcacgcgcggcggcctgcacacaaacgcggtgtacggattcgccaacatgttgctcaagctgatcgaggaggaacggccgacgcattttctcgtcgcgttcgacgcgggcaaggcgacgttccgtcatcgcgaatacgaggcctacaaggcgggtcgcctgcagacgccgcccgagctgtccgagcagtttccgtacatccgggagctcgtccgggcgttcggcgtcgcgtccggcgagctggaggaatacgaggcggacgacatgatcggtacgctggcgaaacgggcggaggccgagggcgtcgacacgctggtcgtcaccggcgaccgcgatttgctccagctcgtatcggaccgcgtgaccgtcgcgctgacgcgcaagggcatcacggaaacggagcggtacgacccggcgcgcatccgcgaggaatacggcttcgatcccgaccgcatccgcgacctcaaagggctgatgggcgacgcgtctgacaatcttcccggcgttcccggcgtcggtgagaaaaccgcactgaaactgctcaggcagtacggttcgctggagagcgtcctggaacacgcgtcggaaatcgccggaaagctcggtgaaaatctgcgggcgcacgccgacgccgcccgattgagcaagcggctggcgacgatcgactgcgcggtaccgttgcagtcgggatgggactggctgcgcctcggcgaaccggaccgcgccgcgctcgcctcgctgttgcggcagctcgaattcaagtcgctgttgaaacggctcggactcgacggcacgtccgccgatgccgacgtcgacggcgtccgttcctccgcgcggccggcggacgagaaacggccgagggccgtcgccgtcgctgaggagggcgtcgacgtccgctgtccggatcgcccggaagaagtcgaagaagcgctgtcgcggctggaagccgcccagtcggtcgtcgtcgaggtgacgggcgacaacccgcacgacggcgaagtgcgcggcgtcgcatggtgggacggacatacggcgtatttcattccgtttgaacggctggtgcagtccgacatgcggccgctggccgactggctcgccgacgcgcgtcggccgaagcgtacgcacgactcccatcgcgctgaagtggcgctgttctggcacggccttgcgtttcgcggcacgtcgttctgcacgcatatcgccgcctatttgctcgaccccacggaatcgcgccatacgctggcggacctgtcgcgccgctacggtctgccgccggtaccggaagccgaggacgtttacggcaagggcgcgaagttcaaggttcccgatcgcgacacgctggcgcgttacgtcggccgcaaggccgccctagtcgcgcggctcgttccgctgctcgaggcggatttggcggcctgcggcatgcgttcgcttttttacgacctggagctgccgctttcatccgaactcgccgtcatggagacggtcggcgtccgcgtcgacgcggcggcgctcgccgcctacggcgaggaattgcgcgaggcggcggcgaaagtcgagcgggagatttacgagctggccgggacgacgttcaacatcggatcgacgaaacagctcggcgaaattttgttcgataagctggggctgcccgtcgtcaagaaaacgaaaaccggctattccaccgacgcagacgtgctggaggaactggcgccgtaccatccgatcgtcgaaaagattttgcattaccgccaactgacgaaattgcagtcgacctacatcgaggggcttttgaaagaaatccgtccgcaaaccggtaaaatccatacgtattatcagcagacgatcgcggcgacggggcggctgagcagtcagtttcccaatcttcagaacattccgatccgtctcgaagaggggcggaaaatccgcaaggcgttcgttccgtcagaaccgggatggctgatgctcgccgccgactattcgcagatcgaactgcgcgtgctcgcgcacgtttccggcgacgaacggctgaaggaagcgtttcggacaggcatggacatccacacgaagaccgcgatggacgtgttcggcgtttccgaagaccgcgtcgacgcgcgcatgcggcggcaggcgaaggcggtcaatttcggcatcatctacggcatcagcgatttcggactggcgcaaaacctgaacatttcccgcaaggaggcggcggagttcatccggcaatatttcgccgtcttttcgggcgtcaaggcgtaccgcgagcggatcgtcgagcaggcgcgccgcgacggttacgtgacgaccctgctcggtcgcaggcgctatttgccggacgataacgcgtcgaattacaacctccgctcgttcgcggagcggacggcgatgaatacgccgatccagggcacggccgccgacatcatcaagaccgcgatggtgcgtctgacgcggcggatgcgcgacgtcggactgaagagccgcatgctgctgcaggttcacgacgagctcgtgtttgaagtgccgccggacgagctcgacgcgatgcgggagcttgtgacggacgtcatggagtcggcggtcccgctcgacgtgccgctgaaggtcgacgtcagctggggcgccgactggtacgcggcgaagtgagggaagcgggatcc

SEQ ID NO: 1116 - DNA, 2792 bp, Artificial Sequence
  Description of Artificial Sequence: Synthetic Caldibacillus cellulovorans CompA.2 DNA Polymerase I825C
atgaaatacctgctgccgaccgctgctgctggtctgctgctcctcgctgcccagccggcgatggccatgggcaaactgattctggtcgacggaaacagcgtcgccaaccgggcgttttacgccgtccggctgctcagcacgcgcggcggcctgcacacaaacgcggtgtacggattcgccaacatgttgctcaagctgatcgaggaggaacggccgacgcattttctcgtcgcgttcgacgcgggcaaggcgacgttccgtcatcgcgaatacgaggcctacaaggcgggtcgcctgcagacgccgcccgagctgtccgagcagtttccgtacatccgggagctcgtccgggcgttcggcgtcgcgtccggcgagctggaggaatacgaggcggacgacatgatcggtacgctggcgaaacgggcggaggccgagggcgtcgacacgctggtcgtcaccggcgaccgcgatttgctccagctcgtatcggaccgcgtgaccgtcgcgctgacgcgcaagggcatcacggaaacggagcggtacgacccggcgcgcatccgcgaggaatacggcttcgatcccgaccgcatccgcgacctcaaagggctgatgggcgacgcgtctgacaatcttcccggcgttcccggcgtcggtgagaaaaccgcactgaaactgctcaggcagtacggttcgctggagagcgtcctggaacacgcgtcggaaatcgccggaaagctcggtgaaaatctgcgggcgcacgccgacgccgcccgattgagcaagcggctggcgacgatcgactgcgcggtaccgttgcagtcgggatgggactggctgcgcctcggcgaaccggaccgcgccgcgctcgcctcgctgttgcggcagctcgaattcaagtcgctgttgaaacggctcggactcgacggcacgtccgccgatgccgacgtcgacggcgtccgttcctccgcgcggccggcggacgagaaacggccgagggccgtcgccgtcgctgaggagggcgtcgacgtccgctgtccggatcgcccggaagaagtcgaagaagcgctgtcgcggctggaagccgcccagtcggtcgtcgtcgaggtgacgggcgacaacccgcacgacggcgaagtgcgcggcgtcgcatggtgggacggacatacggcgtatttcattccgtttgaacggctggtgcagtccgacatgcggccgctggccgactggctcgccgacgcgcgtcggccgaagcgtacgcacgactcccatcgcgctgaagtggcgctgttctggcacggccttgcgtttcgcggcacgtcgttctgcacgcatatcgccgcctatttgctcgaccccacggaatcgcgccatacgctggcggacctgtcgcgccgctacggtctgccgccggtaccggaagccgaggacgtttacggcaagggcgcgaagttcaaggttcccgatcgcgacacgctggcgcgttacgtcggccgcaaggccgccctagtcgcgcggctcgttccgctgctcgaggcggatttggcggcctgcggcatgcgttcgcttttttacgacctggagctgccgctttcatccgaactcgccgtcatggagacggtcggcgtccgcgtcgacgcggcggcgctcgccgcctacggcgaggaattgcgcgaggcggcggcgaaagtcgagcgggagatttacgagctggccgggacgacgttcaacatcggatcgacgaaacagctcggcgaaattttgttcgataagctggggctgcccgtcgtcaagaaaacgaaaaccggctattccaccgacgcagacgtgctggaggaactggcgccgtaccatccgatcgtcgaaaagattttgcattaccgccaactgacgaaattgcagtcgacctacatcgaggggcttttgaaagaaatccgtccgcaaaccggtaaaatccatacgtattatcagcagacgatcgcggcgacggggcggctgagcagtcagtttcccaatcttcagaacattccgatccgtctcgaagaggggcggaaaatccgcaaggcgttcgttccgtcagaaccgggatggctgatgctcgccgccgactattcgcagatcgaactgcgcgtgctcgcgcacgtttccggcgacgaacggctgaaggaagcgtttcggacaggcatggacatccacacgaagaccgcgatggacgtgttcggcgtttccgaagaccgcgtcgacgcgcgcatgcggcggcaggcgaaggcggtcaatttcggcatcatctacggcatcagcgatttcggactggcgcaaaacctgaacatttcccgcaaggaggcggcggagttcatccggcaatatttcgccgtcttttcgggcgtcaaggcgtaccgcgagcggatcgtcgagcaggcgcgccgcgacggttacgtgacgaccctgctcggtcgcaggcgctatttgccggactgtaacgcgtcgaattacaacctccgctcgttcgcggagcggacggcgatgaatacgccgatccagggcacggccgccgacatcatcaagaccgcgatggtgcgtctgacgcggcggatgcgcgacgtcggactgaagagccgcatgctgctgcaggttcacgacgagctcgtgtttgaagtgccgccggacgagctcgacgcgatgcgggagcttgtgacggacgtcatggagtcggcggtcccgctcgacgtgccgctgaaggtcgacgtcagctggggcgccgactggtacgcggcgaagtgagggaagcgggatcc

SEQ ID NO: 1117 - DNA, 2792 bp, Artificial Sequence
  Description of Artificial Sequence: Synthetic Caldibacillus cellulovorans CompA.2 DNA Polymerase I825E
atgaaatacctgctgccgaccgctgctgctggtctgctgctcctcgctgcccagccggcgatggccatgggcaaactgattctggtcgacggaaacagcgtcgccaaccgggcgttttacgccgtccggctgctcagcacgcgcggcggcctgcacacaaacgcggtgtacggattcgccaacatgttgctcaagctgatcgaggaggaacggccgacgcattttctcgtcgcgttcgacgcgggcaaggcgacgttccgtcatcgcgaatacgaggcctacaaggcgggtcgcctgcagacgccgcccgagctgtccgagcagtttccgtacatccgggagctcgtccgggcgttcggcgtcgcgtccggcgagctggaggaatacgaggcggacgacatgatcggtacgctggcgaaacgggcggaggccgagggcgtcgacacgctggtcgtcaccggcgaccgcgatttgctccagctcgtatcggaccgcgtgaccgtcgcgctgacgcgcaagggcatcacggaaacggagcggtacgacccggcgcgcatccgcgaggaatacggcttcgatcccgaccgcatccgcgacctcaaagggctgatgggcgacgcgtctgacaatcttcccggcgttcccggcgtcggtgagaaaaccgcactgaaactgctcaggcagtacggttcgctggagagcgtcctggaacacgcgtcggaaatcgccggaaagctcggtgaaaatctgcgggcgcacgccgacgccgcccgattgagcaagcggctggcgacgatcgactgcgcggtaccgttgcagtcgggatgggactggctgcgcctcggcgaaccggaccgcgccgcgctcgcctcgctgttgcggcagctcgaattcaagtcgctgttgaaacggctcggactcgacggcacgtccgccgatgccgacgtcgacggcgtccgttcctccgcgcggccggcggacgagaaacggccgagggccgtcgccgtcgctgaggagggcgtcgacgtccgctgtccggatcgcccggaagaagtcgaagaagcgctgtcgcggctggaagccgcccagtcggtcgtcgtcgaggtgacgggcgacaacccgcacgacggcgaagtgcgcggcgtcgcatggtgggacggacatacggcgtatttcattccgtttgaacggctggtgcagtccgacatgcggccgctggccgactggctcgccgacgcgcgtcggccgaagcgtacgcacgactcccatcgcgctgaagtggcgctgttctggcacggccttgcgtttcgcggcacgtcgttctgcacgcatatcgccgcctatttgctcgaccccacggaatcgcgccatacgctggcggacctgtcgcgccgctacggtctgccgccggtaccggaagccgaggacgtttacggcaagggcgcgaagttcaaggttcccgatcgcgacacgctggcgcgttacgtcggccgcaaggccgccctagtcgcgcggctcgttccgctgctcgaggcggatttggcggcctgcggcatgcgttcgcttttttacgacctggagctgccgctttcatccgaactcgccgtcatggagacggtcggcgtccgcgtcgacgcggcggcgctcgccgcctacggcgaggaattgcgcgaggcggcggcgaaagtcgagcgggagatttacgagctggccgggacgacgttcaacatcggatcgacgaaacagctcggcgaaattttgttcgataagctggggctgcccgtcgtcaagaaaacgaaaaccggctattccaccgacgcagacgtgctggaggaactggcgccgtaccatccgatcgtcgaaaagattttgcattaccgccaactgacgaaattgcagtcgacctacatcgaggggcttttgaaagaaatccgtccgcaaaccggtaaaatccatacgtattatcagcagacgatcgcggcgacggggcggctgagcagtcagtttcccaatcttcagaacattccgatccgtctcgaagaggggcggaaaatccgcaaggcgttcgttccgtcagaaccgggatggctgatgctcgccgccgactattcgcagatcgaactgcgcgtgctcgcgcacgtttccggcgacgaacggctgaaggaagcgtttcggacaggcatggacatccacacgaagaccgcgatggacgtgttcggcgtttccgaagaccgcgtcgacgcgcgcatgcggcggcaggcgaaggcggtcaatttcggcatcatctacggcatcagcgatttcggactggcgcaaaacctgaacatttcccgcaaggaggcggcggagttcatccggcaatatttcgccgtcttttcgggcgtcaaggcgtaccgcgagcggatcgtcgagcaggcgcgccgcgacggttacgtgacgaccctgctcggtcgcaggcgctatttgccggacgaaaacgcgtcgaattacaacctccgctcgttcgcggagcggacggcgatgaatacgccgatccagggcacggccgccgacatcatcaagaccgcgatggtgcgtctgacgcggcggatgcgcgacgtcggactgaagagccgcatgctgctgcaggttcacgacgagctcgtgtttgaagtgccgccggacgagctcgacgcgatgcgggagcttgtgacggacgtcatggagtcggcggtcccgctcgacgtgccgctgaaggtcgacgtcagctggggcgccgactggtacgcggcgaagtgagggaagcgggatcc

SEQ ID NO: 1118 - DNA, 2792 bp, Artificial Sequence
  Description of Artificial Sequence: Synthetic Caldibacillus cellulovorans CompA.2 DNA Polymerase I825Q
atgaaatacctgctgccgaccgctgctgctggtctgctgctcctcgctgcccagccggcgatggccatgggcaaactgattctggtcgacggaaacagcgtcgccaaccgggcgttttacgccgtccggctgctcagcacgcgcggcggcctgcacacaaacgcggtgtacggattcgccaacatgttgctcaagctgatcgaggaggaacggccgacgcattttctcgtcgcgttcgacgcgggcaaggcgacgttccgtcatcgcgaatacgaggcctacaaggcgggtcgcctgcagacgccgcccgagctgtccgagcagtttccgtacatccgggagctcgtccgggcgttcggcgtcgcgtccggcgagctggaggaatacgaggcggacgacatgatcggtacgctggcgaaacgggcggaggccgagggcgtcgacacgctggtcgtcaccggcgaccgcgatttgctccagctcgtatcggaccgcgtgaccgtcgcgctgacgcgcaagggcatcacggaaacggagcggtacgacccggcgcgcatccgcgaggaatacggcttcgatcccgaccgcatccgcgacctcaaagggctgatgggcgacgcgtctgacaatcttcccggcgttcccggcgtcggtgagaaaaccgcactgaaactgctcaggcagtacggttcgctggagagcgtcctggaacacgcgtcggaaatcgccggaaagctcggtgaaaatctgcgggcgcacgccgacgccgcccgattgagcaagcggctggcgacgatcgactgcgcggtaccgttgcagtcgggatgggactggctgcgcctcggcgaaccggaccgcgccgcgctcgcctcgctgttgcggcagctcgaattcaagtcgctgttgaaacggctcggactcgacggcacgtccgccgatgccgacgtcgacggcgtccgttcctccgcgcggccggcggacgagaaacggccgagggccgtcgccgtcgctgaggagggcgtcgacgtccgctgtccggatcgcccggaagaagtcgaagaagcgctgtcgcggctggaagccgcccagtcggtcgtcgtcgaggtgacgggcgacaacccgcacgacggcgaagtgcgcggcgtcgcatggtgggacggacatacggcgtatttcattccgtttgaacggctggtgcagtccgacatgcggccgctggccgactggctcgccgacgcgcgtcggccgaagcgtacgcacgactcccatcgcgctgaagtggcgctgttctggcacggccttgcgtttcgcggcacgtcgttctgcacgcatatcgccgcctatttgctcgaccccacggaatcgcgccatacgctggcggacctgtcgcgccgctacggtctgccgccggtaccggaagccgaggacgtttacggcaagggcgcgaagttcaaggttcccgatcgcgacacgctggcgcgttacgtcggccgcaaggccgccctagtcgcgcggctcgttccgctgctcgaggcggatttggcggcctgcggcatgcgttcgcttttttacgacctggagctgccgctttcatccgaactcgccgtcatggagacggtcggcgtccgcgtcgacgcggcggcgctcgccgcctacggcgaggaattgcgcgaggcggcggcgaaagtcgagcgggagatttacgagctggccgggacgacgttcaacatcggatcgacgaaacagctcggcgaaattttgttcgataagctggggctgcccgtcgtcaagaaaacgaaaaccggctattccaccgacgcagacgtgctggaggaactggcgccgtaccatccgatcgtcgaaaagattttgcattaccgccaactgacgaaattgcagtcgacctacatcgaggggcttttgaaagaaatccgtccgcaaaccggtaaaatccatacgtattatcagcagacgatcgcggcgacggggcggctgagcagtcagtttcccaatcttcagaacattccgatccgtctcgaagaggggcggaaaatccgcaaggcgttcgttccgtcagaaccgggatggctgatgctcgccgccgactattcgcagatcgaactgcgcgtgctcgcgcacgtttccggcgacgaacggctgaaggaagcgtttcggacaggcatggacatccacacgaagaccgcgatggacgtgttcggcgtttccgaagaccgcgtcgacgcgcgcatgcggcggcaggcgaaggcggtcaatttcggcatcatctacggcatcagcgatttcggactggcgcaaaacctgaacatttcccgcaaggaggcggcggagttcatccggcaatatttcgccgtcttttcgggcgtcaaggcgtaccgcgagcggatcgtcgagcaggcgcgccgcgacggttacgtgacgaccctgctcggtcgcaggcgctatttgccggaccaaaacgcgtcgaattacaacctccgctcgttcgcggagcggacggcgatgaatacgccgatccagggcacggccgccgacatcatcaagaccgcgatggtgcgtctgacgcggcggatgcgcgacgtcggactgaagagccgcatgctgctgcaggttcacgacgagctcgtgtttgaagtgccgccggacgagctcgacgcgatgcgggagcttgtgacggacgtcatggagtcggcggtcccgctcgacgtgccgctgaaggtcgacgtcagctggggcgccgactggtacgcggcgaagtgagggaagcgggatcc

SEQ ID NO: 1119 - DNA, 2792 bp, Artificial Sequence
  Description of Artificial Sequence: Synthetic Caldibacillus cellulovorans CompA.2 DNA Polymerase I825G
atgaaatacctgctgccgaccgctgctgctggtctgctgctcctcgctgcccagccggcgatggccatgggcaaactgattctggtcgacggaaacagcgtcgccaaccgggcgttttacgccgtccggctgctcagcacgcgcggcggcctgcacacaaacgcggtgtacggattcgccaacatgttgctcaagctgatcgaggaggaacggccgacgcattttctcgtcgcgttcgacgcgggcaaggcgacgttccgtcatcgcgaatacgaggcctacaaggcgggtcgcctgcagacgccgcccgagctgtccgagcagtttccgtacatccgggagctcgtccgggcgttcggcgtcgcgtccggcgagctggaggaatacgaggcggacgacatgatcggtacgctggcgaaacgggcggaggccgagggcgtcgacacgctggtcgtcaccggcgaccgcgatttgctccagctcgtatcggaccgcgtgaccgtcgcgctgacgcgcaagggcatcacggaaacggagcggtacgacccggcgcgcatccgcgaggaatacggcttcgatcccgaccgcatccgcgacctcaaagggctgatgggcgacgcgtctgacaatcttcccggcgttcccggcgtcggtgagaaaaccgcactgaaactgctcaggcagtacggttcgctggagagcgtcctggaacacgcgtcggaaatcgccggaaagctcggtgaaaatctgcgggcgcacgccgacgccgcccgattgagcaagcggctggcgacgatcgactgcgcggtaccgttgcagtcgggatgggactggctgcgcctcggcgaaccggaccgcgccgcgctcgcctcgctgttgcggcagctcgaattcaagtcgctgttgaaacggctcggactcgacggcacgtccgccgatgccgacgtcgacggcgtccgttcctccgcgcggccggcggacgagaaacggccgagggccgtcgccgtcgctgaggagggcgtcgacgtccgctgtccggatcgcccggaagaagtcgaagaagcgctgtcgcggctggaagccgcccagtcggtcgtcgtcgaggtgacgggcgacaacccgcacgacggcgaagtgcgcggcgtcgcatggtgggacggacatacggcgtatttcattccgtttgaacggctggtgcagtccgacatgcggccgctggccgactggctcgccgacgcgcgtcggccgaagcgtacgcacgactcccatcgcgctgaagtggcgctgttctggcacggccttgcgtttcgcggcacgtcgttctgcacgcatatcgccgcctatttgctcgaccccacggaatcgcgccatacgctggcggacctgtcgcgccgctacggtctgccgccggtaccggaagccgaggacgtttacggcaagggcgcgaagttcaaggttcccgatcgcgacacgctggcgcgttacgtcggccgcaaggccgccctagtcgcgcggctcgttccgctgctcgaggcggatttggcggcctgcggcatgcgttcgcttttttacgacctggagctgccgctttcatccgaactcgccgtcatggagacggtcggcgtccgcgtcgacgcggcggcgctcgccgcctacggcgaggaattgcgcgaggcggcggcgaaagtcgagcgggagatttacgagctggccgggacgacgttcaacatcggatcgacgaaacagctcggcgaaattttgttcgataagctggggctgcccgtcgtcaagaaaacgaaaaccggctattccaccgacgcagacgtgctggaggaactggcgccgtaccatccgatcgtcgaaaagattttgcattaccgccaactgacgaaattgcagtcgacctacatcgaggggcttttgaaagaaatccgtccgcaaaccggtaaaatccatacgtattatcagcagacgatcgcggcgacggggcggctgagcagtcagtttcccaatcttcagaacattccgatccgtctcgaagaggggcggaaaatccgcaaggcgttcgttccgtcagaaccgggatggctgatgctcgccgccgactattcgcagatcgaactgcgcgtgctcgcgcacgtttccggcgacgaacggctgaaggaagcgtttcggacaggcatggacatccacacgaagaccgcgatggacgtgttcggcgtttccgaagaccgcgtcgacgcgcgcatgcggcggcaggcgaaggcggtcaatttcggcatcatctacggcatcagcgatttcggactggcgcaaaacctgaacatttcccgcaaggaggcggcggagttcatccggcaatatttcgccgtcttttcgggcgtcaaggcgtaccgcgagcggatcgtcgagcaggcgcgccgcgacggttacgtgacgaccctgctcggtcgcaggcgctatttgccggacggtaacgcgtcgaattacaacctccgctcgttcgcggagcggacggcgatgaatacgccgatccagggcacggccgccgacatcatcaagaccgcgatggtgcgtctgacgcggcggatgcgcgacgtcggactgaagagccgcatgctgctgcaggttcacgacgagctcgtgtttgaagtgccgccggacgagctcgacgcgatgcgggagcttgtgacggacgtcatggagtcggcggtcccgctcgacgtgccgctgaaggtcgacgtcagctggggcgccgactggtacgcggcgaagtgagggaagcgggatcc

SEQ ID NO: 1120 - DNA, 2792 bp, Artificial Sequence
  Description of Artificial Sequence: Synthetic Caldibacillus cellulovorans CompA.2 DNA Polymerase I825H
atgaaatacctgctgccgaccgctgctgctggtctgctgctcctcgctgcccagccggcgatggccatgggcaaactgattctggtcgacggaaacagcgtcgccaaccgggcgttttacgccgtccggctgctcagcacgcgcggcggcctgcacacaaacgcggtgtacggattcgccaacatgttgctcaagctgatcgaggaggaacggccgacgcattttctcgtcgcgttcgacgcgggcaaggcgacgttccgtcatcgcgaatacgaggcctacaaggcgggtcgcctgcagacgccgcccgagctgtccgagcagtttccgtacatccgggagctcgtccgggcgttcggcgtcgcgtccggcgagctggaggaatacgaggcggacgacatgatcggtacgctggcgaaacgggcggaggccgagggcgtcgacacgctggtcgtcaccggcgaccgcgatttgctccagctcgtatcggaccgcgtgaccgtcgcgctgacgcgcaagggcatcacggaaacggagcggtacgacccggcgcgcatccgcgaggaatacggcttcgatcccgaccgcatccgcgacctcaaagggctgatgggcgacgcgtctgacaatcttcccggcgttcccggcgtcggtgagaaaaccgcactgaaactgctcaggcagtacggttcgctggagagcgtcctggaacacgcgtcggaaatcgccggaaagctcggtgaaaatctgcgggcgcacgccgacgccgcccgattgagcaagcggctggcgacgatcgactgcgcggtaccgttgcagtcgggatgggactggctgcgcctcggcgaaccggaccgcgccgcgctcgcctcgctgttgcggcagctcgaattcaagtcgctgttgaaacggctcggactcgacggcacgtccgccgatgccgacgtcgacggcgtccgttcctccgcgcggccggcggacgagaaacggccgagggccgtcgccgtcgctgaggagggcgtcgacgtccgctgtccggatcgcccggaagaagtcgaagaagcgctgtcgcggctggaagccgcccagtcggtcgtcgtcgaggtgacgggcgacaacccgcacgacggcgaagtgcgcggcgtcgcatggtgggacggacatacggcgtatttcattccgtttgaacggctggtgcagtccgacatgcggccgctggccgactggctcgccgacgcgcgtcggccgaagcgtacgcacgactcccatcgcgctgaagtggcgctgttctggcacggccttgcgtttcgcggcacgtcgttctgcacgcatatcgccgcctatttgctcgaccccacggaatcgcgccatacgctggcggacctgtcgcgccgctacggtctgccgccggtaccggaagccgaggacgtttacggcaagggcgcgaagttcaaggttcccgatcgcgacacgctggcgcgttacgtcggccgcaaggccgccctagtcgcgcggctcgttccgctgctcgaggcggatttggcggcctgcggcatgcgttcgcttttttacgacctggagctgccgctttcatccgaactcgccgtcatggagacggtcggcgtccgcgtcgacgcggcggcgctcgccgcctacggcgaggaattgcgcgaggcggcggcgaaagtcgagcgggagatttacgagctggccgggacgacgttcaacatcggatcgacgaaacagctcggcgaaattttgttcgataagctggggctgcccgtcgtcaagaaaacgaaaaccggctattccaccgacgcagacgtgctggaggaactggcgccgtaccatccgatcgtcgaaaagattttgcattaccgccaactgacgaaattgcagtcgacctacatcgaggggcttttgaaagaaatccgtccgcaaaccggtaaaatccatacgtattatcagcagacgatcgcggcgacggggcggctgagcagtcagtttcccaatcttcagaacattccgatccgtctcgaagaggggcggaaaatccgcaaggcgttcgttccgtcagaaccgggatggctgatgctcgccgccgactattcgcagatcgaactgcgcgtgctcgcgcacgtttccggcgacgaacggctgaaggaagcgtttcggacaggcatggacatccacacgaagaccgcgatggacgtgttcggcgtttccgaagaccgcgtcgacgcgcgcatgcggcggcaggcgaaggcggtcaatttcggcatcatctacggcatcagcgatttcggactggcgcaaaacctgaacatttcccgcaaggaggcggcggagttcatccggcaatatttcgccgtcttttcgggcgtcaaggcgtaccgcgagcggatcgtcgagcaggcgcgccgcgacggttacgtgacgaccctgctcggtcgcaggcgctatttgccggaccataacgcgtcgaattacaacctccgctcgttcgcggagcggacggcgatgaatacgccgatccagggcacggccgccgacatcatcaagaccgcgatggtgcgtctgacgcggcggatgcgcgacgtcggactgaagagccgcatgctgctgcaggttcacgacgagctcgtgtttgaagtgccgccggacgagctcgacgcgatgcgggagcttgtgacggacgtcatggagtcggcggtcccgctcgacgtgccgctgaaggtcgacgtcagctggggcgccgactggtacgcggcgaagtgagggaagcgggatcc

SEQ ID NO: 1121 - DNA, 2792 bp, Artificial Sequence
  Description of Artificial Sequence: Synthetic Caldibacillus cellulovorans CompA.2 DNA Polymerase I825L
atgaaatacctgctgccgaccgctgctgctggtctgctgctcctcgctgcccagccggcgatggccatgggcaaactgattctggtcgacggaaacagcgtcgccaaccgggcgttttacgccgtccggctgctcagcacgcgcggcggcctgcacacaaacgcggtgtacggattcgccaacatgttgctcaagctgatcgaggaggaacggccgacgcattttctcgtcgcgttcgacgcgggcaaggcgacgttccgtcatcgcgaatacgaggcctacaaggcgggtcgcctgcagacgccgcccgagctgtccgagcagtttccgtacatccgggagctcgtccgggcgttcggcgtcgcgtccggcgagctggaggaatacgaggcggacgacatgatcggtacgctggcgaaacgggcggaggccgagggcgtcgacacgctggtcgtcaccggcgaccgcgatttgctccagctcgtatcggaccgcgtgaccgtcgcgctgacgcgcaagggcatcacggaaacggagcggtacgacccggcgcgcatccgcgaggaatacggcttcgatcccgaccgcatccgcgacctcaaagggctgatgggcgacgcgtctgacaatcttcccggcgttcccggcgtcggtgagaaaaccgcactgaaactgctcaggcagtacggttcgctggagagcgtcctggaacacgcgtcggaaatcgccggaaagctcggtgaaaatctgcgggcgcacgccgacgccgcccgattgagcaagcggctggcgacgatcgactgcgcggtaccgttgcagtcgggatgggactggctgcgcctcggcgaaccggaccgcgccgcgctcgcctcgctgttgcggcagctcgaattcaagtcgctgttgaaacggctcggactcgacggcacgtccgccgatgccgacgtcgacggcgtccgttcctccgcgcggccggcggacgagaaacggccgagggccgtcgccgtcgctgaggagggcgtcgacgtccgctgtccggatcgcccggaagaagtcgaagaagcgctgtcgcggctggaagccgcccagtcggtcgtcgtcgaggtgacgggcgacaacccgcacgacggcgaagtgcgcggcgtcgcatggtgggacggacatacggcgtatttcattccgtttgaacggctggtgcagtccgacatgcggccgctggccgactggctcgccgacgcgcgtcggccgaagcgtacgcacgactcccatcgcgctgaagtggcgctgttctggcacggccttgcgtttcgcggcacgtcgttctgcacgcatatcgccgcctatttgctcgaccccacggaatcgcgccatacgctggcggacctgtcgcgccgctacggtctgccgccggtaccggaagccgaggacgtttacggcaagggcgcgaagttcaaggttcccgatcgcgacacgctggcgcgttacgtcggccgcaaggccgccctagtcgcgcggctcgttccgctgctcgaggcggatttggcggcctgcggcatgcgttcgcttttttacgacctggagctgccgctttcatccgaactcgccgtcatggagacggtcggcgtccgcgtcgacgcggcggcgctcgccgcctacggcgaggaattgcgcgaggcggcggcgaaagtcgagcgggagatttacgagctggccgggacgacgttcaacatcggatcgacgaaacagctcggcgaaattttgttcgataagctggggctgcccgtcgtcaagaaaacgaaaaccggctattccaccgacgcagacgtgctggaggaactggcgccgtaccatccgatcgtcgaaaagattttgcattaccgccaactgacgaaattgcagtcgacctacatcgaggggcttttgaaagaaatccgtccgcaaaccggtaaaatccatacgtattatcagcagacgatcgcggcgacggggcggctgagcagtcagtttcccaatcttcagaacattccgatccgtctcgaagaggggcggaaaatccgcaaggcgttcgttccgtcagaaccgggatggctgatgctcgccgccgactattcgcagatcgaactgcgcgtgctcgcgcacgtttccggcgacgaacggctgaaggaagcgtttcggacaggcatggacatccacacgaagaccgcgatggacgtgttcggcgtttccgaagaccgcgtcgacgcgcgcatgcggcggcaggcgaaggcggtcaatttcggcatcatctacggcatcagcgatttcggactggcgcaaaacctgaacatttcccgcaaggaggcggcggagttcatccggcaatatttcgccgtcttttcgggcgtcaaggcgtaccgcgagcggatcgtcgagcaggcgcgccgcgacggttacgtgacgaccctgctcggtcgcaggcgctatttgccggaccttaacgcgtcgaattacaacctccgctcgttcgcggagcggacggcgatgaatacgccgatccagggcacggccgccgacatcatcaagaccgcgatggtgcgtctgacgcggcggatgcgcgacgtcggactgaagagccgcatgctgctgcaggttcacgacgagctcgtgtttgaagtgccgccggacgagctcgacgcgatgcgggagcttgtgacggacgtcatggagtcggcggtcccgctcgacgtgccgctgaaggtcgacgtcagctggggcgccgactggtacgcggcgaagtgagggaagcgggatcc

SEQ ID NO: 1122 - DNA, 2792 bp, Artificial Sequence
  Description of Artificial Sequence: Synthetic Caldibacillus cellulovorans CompA.2 DNA Polymerase I825K
atgaaatacctgctgccgaccgctgctgctggtctgctgctcctcgctgcccagccggcgatggccatgggcaaactgattctggtcgacggaaacagcgtcgccaaccgggcgttttacgccgtccggctgctcagcacgcgcggcggcctgcacacaaacgcggtgtacggattcgccaacatgttgctcaagctgatcgaggaggaacggccgacgcattttctcgtcgcgttcgacgcgggcaaggcgacgttccgtcatcgcgaatacgaggcctacaaggcgggtcgcctgcagacgccgcccgagctgtccgagcagtttccgtacatccgggagctcgtccgggcgttcggcgtcgcgtccggcgagctggaggaatacgaggcggacgacatgatcggtacgctggcgaaacgggcggaggccgagggcgtcgacacgctggtcgtcaccggcgaccgcgatttgctccagctcgtatcggaccgcgtgaccgtcgcgctgacgcgcaagggcatcacggaaacggagcggtacgacccggcgcgcatccgcgaggaatacggcttcgatcccgaccgcatccgcgacctcaaagggctgatgggcgacgcgtctgacaatcttcccggcgttcccggcgtcggtgagaaaaccgcactgaaactgctcaggcagtacggttcgctggagagcgtcctggaacacgcgtcggaaatcgccggaaagctcggtgaaaatctgcgggcgcacgccgacgccgcccgattgagcaagcggctggcgacgatcgactgcgcggtaccgttgcagtcgggatgggactggctgcgcctcggcgaaccggaccgcgccgcgctcgcctcgctgttgcggcagctcgaattcaagtcgctgttgaaacggctcggactcgacggcacgtccgccgatgccgacgtcgacggcgtccgttcctccgcgcggccggcggacgagaaacggccgagggccgtcgccgtcgctgaggagggcgtcgacgtccgctgtccggatcgcccggaagaagtcgaagaagcgctgtcgcggctggaagccgcccagtcggtcgtcgtcgaggtgacgggcgacaacccgcacgacggcgaagtgcgcggcgtcgcatggtgggacggacatacggcgtatttcattccgtttgaacggctggtgcagtccgacatgcggccgctggccgactggctcgccgacgcgcgtcggccgaagcgtacgcacgactcccatcgcgctgaagtggcgctgttctggcacggccttgcgtttcgcggcacgtcgttctgcacgcatatcgccgcctatttgctcgaccccacggaatcgcgccatacgctggcggacctgtcgcgccgctacggtctgccgccggtaccggaagccgaggacgtttacggcaagggcgcgaagttcaaggttcccgatcgcgacacgctggcgcgttacgtcggccgcaaggccgccctagtcgcgcggctcgttccgctgctcgaggcggatttggcggcctgcggcatgcgttcgcttttttacgacctggagctgccgctttcatccgaactcgccgtcatggagacggtcggcgtccgcgtcgacgcggcggcgctcgccgcctacggcgaggaattgcgcgaggcggcggcgaaagtcgagcgggagatttacgagctggccgggacgacgttcaacatcggatcgacgaaacagctcggcgaaattttgttcgataagctggggctgcccgtcgtcaagaaaacgaaaaccggctattccaccgacgcagacgtgctggaggaactggcgccgtaccatccgatcgtcgaaaagattttgcattaccgccaactgacgaaattgcagtcgacctacatcgaggggcttttgaaagaaatccgtccgcaaaccggtaaaatccatacgtattatcagcagacgatcgcggcgacggggcggctgagcagtcagtttcccaatcttcagaacattccgatccgtctcgaagaggggcggaaaatccgcaaggcgttcgttccgtcagaaccgggatggctgatgctcgccgccgactattcgcagatcgaactgcgcgtgctcgcgcacgtttccggcgacgaacggctgaaggaagcgtttcggacaggcatggacatccacacgaagaccgcgatggacgtgttcggcgtttccgaagaccgcgtcgacgcgcgcatgcggcggcaggcgaaggcggtcaatttcggcatcatctacggcatcagcgatttcggactggcgcaaaacctgaacatttcccgcaaggaggcggcggagttcatccggcaatatttcgccgtcttttcgggcgtcaaggcgtaccgcgagcggatcgtcgagcaggcgcgccgcgacggttacgtgacgaccctgctcggtcgcaggcgctatttgccggacaaaaacgcgtcgaattacaacctccgctcgttcgcggagcggacggcgatgaatacgccgatccagggcacggccgccgacatcatcaagaccgcgatggtgcgtctgacgcggcggatgcgcgacgtcggactgaagagccgcatgctgctgcaggttcacgacgagctcgtgtttgaagtgccgccggacgagctcgacgcgatgcgggagcttgtgacggacgtcatggagtcggcggtcccgctcgacgtgccgctgaaggtcgacgtcagctggggcgccgactggtacgcggcgaagtgagggaagcgggatcc

SEQ ID NO: 1123 - DNA, 2792 bp, Artificial Sequence
  Description of Artificial Sequence: Synthetic Caldibacillus cellulovorans CompA.2 DNA Polymerase I825M
atgaaatacctgctgccgaccgctgctgctggtctgctgctcctcgctgcccagccggcgatggccatgggcaaactgattctggtcgacggaaacagcgtcgccaaccgggcgttttacgccgtccggctgctcagcacgcgcggcggcctgcacacaaacgcggtgtacggattcgccaacatgttgctcaagctgatcgaggaggaacggccgacgcattttctcgtcgcgttcgacgcgggcaaggcgacgttccgtcatcgcgaatacgaggcctacaaggcgggtcgcctgcagacgccgcccgagctgtccgagcagtttccgtacatccgggagctcgtccgggcgttcggcgtcgcgtccggcgagctggaggaatacgaggcggacgacatgatcggtacgctggcgaaacgggcggaggccgagggcgtcgacacgctggtcgtcaccggcgaccgcgatttgctccagctcgtatcggaccgcgtgaccgtcgcgctgacgcgcaagggcatcacggaaacggagcggtacgacccggcgcgcatccgcgaggaatacggcttcgatcccgaccgcatccgcgacctcaaagggctgatgggcgacgcgtctgacaatcttcccggcgttcccggcgtcggtgagaaaaccgcactgaaactgctcaggcagtacggttcgctggagagcgtcctggaacacgcgtcggaaatcgccggaaagctcggtgaaaatctgcgggcgcacgccgacgccgcccgattgagcaagcggctggcgacgatcgactgcgcggtaccgttgcagtcgggatgggactggctgcgcctcggcgaaccggaccgcgccgcgctcgcctcgctgttgcggcagctcgaattcaagtcgctgttgaaacggctcggactcgacggcacgtccgccgatgccgacgtcgacggcgtccgttcctccgcgcggccggcggacgagaaacggccgagggccgtcgccgtcgctgaggagggcgtcgacgtccgctgtccggatcgcccggaagaagtcgaagaagcgctgtcgcggctggaagccgcccagtcggtcgtcgtcgaggtgacgggcgacaacccgcacgacggcgaagtgcgcggcgtcgcatggtgggacggacatacggcgtatttcattccgtttgaacggctggtgcagtccgacatgcggccgctggccgactggctcgccgacgcgcgtcggccgaagcgtacgcacgactcccatcgcgctgaagtggcgctgttctggcacggccttgcgtttcgcggcacgtcgttctgcacgcatatcgccgcctatttgctcgaccccacggaatcgcgccatacgctggcggacctgtcgcgccgctacggtctgccgccggtaccggaagccgaggacgtttacggcaagggcgcgaagttcaaggttcccgatcgcgacacgctggcgcgttacgtcggccgcaaggccgccctagtcgcgcggctcgttccgctgctcgaggcggatttggcggcctgcggcatgcgttcgcttttttacgacctggagctgccgctttcatccgaactcgccgtcatggagacggtcggcgtccgcgtcgacgcggcggcgctcgccgcctacggcgaggaattgcgcgaggcggcggcgaaagtcgagcgggagatttacgagctggccgggacgacgttcaacatcggatcgacgaaacagctcggcgaaattttgttcgataagctggggctgcccgtcgtcaagaaaacgaaaaccggctattccaccgacgcagacgtgctggaggaactggcgccgtaccatccgatcgtcgaaaagattttgcattaccgccaactgacgaaattgcagtcgacctacatcgaggggcttttgaaagaaatccgtccgcaaaccggtaaaatccatacgtattatcagcagacgatcgcggcgacggggcggctgagcagtcagtttcccaatcttcagaacattccgatccgtctcgaagaggggcggaaaatccgcaaggcgttcgttccgtcagaaccgggatggctgatgctcgccgccgactattcgcagatcgaactgcgcgtgctcgcgcacgtttccggcgacgaacggctgaaggaagcgtttcggacaggcatggacatccacacgaagaccgcgatggacgtgttcggcgtttccgaagaccgcgtcgacgcgcgcatgcggcggcaggcgaaggcggtcaatttcggcatcatctacggcatcagcgatttcggactggcgcaaaacctgaacatttcccgcaaggaggcggcggagttcatccggcaatatttcgccgtcttttcgggcgtcaaggcgtaccgcgagcggatcgtcgagcaggcgcgccgcgacggttacgtgacgaccctgctcggtcgcaggcgctatttgccggacatgaacgcgtcgaattacaacctccgctcgttcgcggagcggacggcgatgaatacgccgatccagggcacggccgccgacatcatcaagaccgcgatggtgcgtctgacgcggcggatgcgcgacgtcggactgaagagccgcatgctgctgcaggttcacgacgagctcgtgtttgaagtgccgccggacgagctcgacgcgatgcgggagcttgtgacggacgtcatggagtcggcggtcccgctcgacgtgccgctgaaggtcgacgtcagctggggcgccgactggtacgcggcgaagtgagggaagcgggatcc

SEQ ID NO: 1124 - DNA, 2792 bp, Artificial Sequence
  Description of Artificial Sequence: Synthetic Caldibacillus cellulovorans CompA.2 DNA Polymerase I825F
atgaaatacctgctgccgaccgctgctgctggtctgctgctcctcgctgcccagccggcgatggccatgggcaaactgattctggtcgacggaaacagcgtcgccaaccgggcgttttacgccgtccggctgctcagcacgcgcggcggcctgcacacaaacgcggtgtacggattcgccaacatgttgctcaagctgatcgaggaggaacggccgacgcattttctcgtcgcgttcgacgcgggcaaggcgacgttccgtcatcgcgaatacgaggcctacaaggcgggtcgcctgcagacgccgcccgagctgtccgagcagtttccgtacatccgggagctcgtccgggcgttcggcgtcgcgtccggcgagctggaggaatacgaggcggacgacatgatcggtacgctggcgaaacgggcggaggccgagggcgtcgacacgctggtcgtcaccggcgaccgcgatttgctccagctcgtatcggaccgcgtgaccgtcgcgctgacgcgcaagggcatcacggaaacggagcggtacgacccggcgcgcatccgcgaggaatacggcttcgatcccgaccgcatccgcgacctcaaagggctgatgggcgacgcgtctgacaatcttcccggcgttcccggcgtcggtgagaaaaccgcactgaaactgctcaggcagtacggttcgctggagagcgtcctggaacacgcgtcggaaatcgccggaaagctcggtgaaaatctgcgggcgcacgccgacgccgcccgattgagcaagcggctggcgacgatcgactgcgcggtaccgttgcagtcgggatgggactggctgcgcctcggcgaaccggaccgcgccgcgctcgcctcgctgttgcggcagctcgaattcaagtcgctgttgaaacggctcggactcgacggcacgtccgccgatgccgacgtcgacggcgtccgttcctccgcgcggccggcggacgagaaacggccgagggccgtcgccgtcgctgaggagggcgtcgacgtccgctgtccggatcgcccggaagaagtcgaagaagcgctgtcgcggctggaagccgcccagtcggtcgtcgtcgaggtgacgggcgacaacccgcacgacggcgaagtgcgcggcgtcgcatggtgggacggacatacggcgtatttcattccgtttgaacggctggtgcagtccgacatgcggccgctggccgactggctcgccgacgcgcgtcggccgaagcgtacgcacgactcccatcgcgctgaagtggcgctgttctggcacggccttgcgtttcgcggcacgtcgttctgcacgcatatcgccgcctatttgctcgaccccacggaatcgcgccatacgctggcggacctgtcgcgccgctacggtctgccgccggtaccggaagccgaggacgtttacggcaagggcgcgaagttcaaggttcccgatcgcgacacgctggcgcgttacgtcggccgcaaggccgccctagtcgcgcggctcgttccgctgctcgaggcggatttggcggcctgcggcatgcgttcgcttttttacgacctggagctgccgctttcatccgaactcgccgtcatggagacggtcggcgtccgcgtcgacgcggcggcgctcgccgcctacggcgaggaattgcgcgaggcggcggcgaaagtcgagcgggagatttacgagctggccgggacgacgttcaacatcggatcgacgaaacagctcggcgaaattttgttcgataagctggggctgcccgtcgtcaagaaaacgaaaaccggctattccaccgacgcagacgtgctggaggaactggcgccgtaccatccgatcgtcgaaaagattttgcattaccgccaactgacgaaattgcagtcgacctacatcgaggggcttttgaaagaaatccgtccgcaaaccggtaaaatccatacgtattatcagcagacgatcgcggcgacggggcggctgagcagtcagtttcccaatcttcagaacattccgatccgtctcgaagaggggcggaaaatccgcaaggcgttcgttccgtcagaaccgggatggctgatgctcgccgccgactattcgcagatcgaactgcgcgtgctcgcgcacgtttccggcgacgaacggctgaaggaagcgtttcggacaggcatggacatccacacgaagaccgcgatggacgtgttcggcgtttccgaagaccgcgtcgacgcgcgcatgcggcggcaggcgaaggcggtcaatttcggcatcatctacggcatcagcgatttcggactggcgcaaaacctgaacatttcccgcaaggaggcggcggagttcatccggcaatatttcgccgtcttttcgggcgtcaaggcgtaccgcgagcggatcgtcgagcaggcgcgccgcgacggttacgtgacgaccctgctcggtcgcaggcgctatttgccggactttaacgcgtcgaattacaacctccgctcgttcgcggagcggacggcgatgaatacgccgatccagggcacggccgccgacatcatcaagaccgcgatggtgcgtctgacgcggcggatgcgcgacgtcggactgaagagccgcatgctgctgcaggttcacgacgagctcgtgtttgaagtgccgccggacgagctcgacgcgatgcgggagcttgtgacggacgtcatggagtcggcggtcccgctcgacgtgccgctgaaggtcgacgtcagctggggcgccgactggtacgcggcgaagtgagggaagcgggatcc

SEQ ID NO: 1125 - DNA, 2792 bp, Artificial Sequence
  Description of Artificial Sequence: Synthetic Caldibacillus cellulovorans CompA.2 DNA Polymerase I825P
atgaaatacctgctgccgaccgctgctgctggtctgctgctcctcgctgcccagccggcgatggccatgggcaaactgattctggtcgacggaaacagcgtcgccaaccgggcgttttacgccgtccggctgctcagcacgcgcggcggcctgcacacaaacgcggtgtacggattcgccaacatgttgctcaagctgatcgaggaggaacggccgacgcattttctcgtcgcgttcgacgcgggcaaggcgacgttccgtcatcgcgaatacgaggcctacaaggcgggtcgcctgcagacgccgcccgagctgtccgagcagtttccgtacatccgggagctcgtccgggcgttcggcgtcgcgtccggcgagctggaggaatacgaggcggacgacatgatcggtacgctggcgaaacgggcggaggccgagggcgtcgacacgctggtcgtcaccggcgaccgcgatttgctccagctcgtatcggaccgcgtgaccgtcgcgctgacgcgcaagggcatcacggaaacggagcggtacgacccggcgcgcatccgcgaggaatacggcttcgatcccgaccgcatccgcgacctcaaagggctgatgggcgacgcgtctgacaatcttcccggcgttcccggcgtcggtgagaaaaccgcactgaaactgctcaggcagtacggttcgctggagagcgtcctggaacacgcgtcggaaatcgccggaaagctcggtgaaaatctgcgggcgcacgccgacgccgcccgattgagcaagcggctggcgacgatcgactgcgcggtaccgttgcagtcgggatgggactggctgcgcctcggcgaaccggaccgcgccgcgctcgcctcgctgttgcggcagctcgaattcaagtcgctgttgaaacggctcggactcgacggcacgtccgccgatgccgacgtcgacggcgtccgttcctccgcgcggccggcggacgagaaacggccgagggccgtcgccgtcgctgaggagggcgtcgacgtccgctgtccggatcgcccggaagaagtcgaagaagcgctgtcgcggctggaagccgcccagtcggtcgtcgtcgaggtgacgggcgacaacccgcacgacggcgaagtgcgcggcgtcgcatggtgggacggacatacggcgtatttcattccgtttgaacggctggtgcagtccgacatgcggccgctggccgactggctcgccgacgcgcgtcggccgaagcgtacgcacgactcccatcgcgctgaagtggcgctgttctggcacggccttgcgtttcgcggcacgtcgttctgcacgcatatcgccgcctatttgctcgaccccacggaatcgcgccatacgctggcggacctgtcgcgccgctacggtctgccgccggtaccggaagccgaggacgtttacggcaagggcgcgaagttcaaggttcccgatcgcgacacgctggcgcgttacgtcggccgcaaggccgccctagtcgcgcggctcgttccgctgctcgaggcggatttggcggcctgcggcatgcgttcgcttttttacgacctggagctgccgctttcatccgaactcgccgtcatggagacggtcggcgtccgcgtcgacgcggcggcgctcgccgcctacggcgaggaattgcgcgaggcggcggcgaaagtcgagcgggagatttacgagctggccgggacgacgttcaacatcggatcgacgaaacagctcggcgaaattttgttcgataagctggggctgcccgtcgtcaagaaaacgaaaaccggctattccaccgacgcagacgtgctggaggaactggcgccgtaccatccgatcgtcgaaaagattttgcattaccgccaactgacgaaattgcagtcgacctacatcgaggggcttttgaaagaaatccgtccgcaaaccggtaaaatccatacgtattatcagcagacgatcgcggcgacggggcggctgagcagtcagtttcccaatcttcagaacattccgatccgtctcgaagaggggcggaaaatccgcaaggcgttcgttccgtcagaaccgggatggctgatgctcgccgccgactattcgcagatcgaactgcgcgtgctcgcgcacgtttccggcgacgaacggctgaaggaagcgtttcggacaggcatggacatccacacgaagaccgcgatggacgtgttcggcgtttccgaagaccgcgtcgacgcgcgcatgcggcggcaggcgaaggcggtcaatttcggcatcatctacggcatcagcgatttcggactggcgcaaaacctgaacatttcccgcaaggaggcggcggagttcatccggcaatatttcgccgtcttttcgggcgtcaaggcgtaccgcgagcggatcgtcgagcaggcgcgccgcgacggttacgtgacgaccctgctcggtcgcaggcgctatttgccggaccctaacgcgtcgaattacaacctccgctcgttcgcggagcggacggcgatgaatacgccgatccagggcacggccgccgacatcatcaagaccgcgatggtgcgtctgacgcggcggatgcgcgacgtcggactgaagagccgcatgctgctgcaggttcacgacgagctcgtgtttgaagtgccgccggacgagctcgacgcgatgcgggagcttgtgacggacgtcatggagtcggcggtcccgctcgacgtgccgctgaaggtcgacgtcagctggggcgccgactggtacgcggcgaagtgagggaagcgggatcc

SEQ ID NO: 1126 - DNA, 2792 bp, Artificial Sequence
  Description of Artificial Sequence: Synthetic Caldibacillus cellulovorans CompA.2 DNA Polymerase I825S
atgaaatacctgctgccgaccgctgctgctggtctgctgctcctcgctgcccagccggcgatggccatgggcaaactgattctggtcgacggaaacagcgtcgccaaccgggcgttttacgccgtccggctgctcagcacgcgcggcggcctgcacacaaacgcggtgtacggattcgccaacatgttgctcaagctgatcgaggaggaacggccgacgcattttctcgtcgcgttcgacgcgggcaaggcgacgttccgtcatcgcgaatacgaggcctacaaggcgggtcgcctgcagacgccgcccgagctgtccgagcagtttccgtacatccgggagctcgtccgggcgttcggcgtcgcgtccggcgagctggaggaatacgaggcggacgacatgatcggtacgctggcgaaacgggcggaggccgagggcgtcgacacgctggtcgtcaccggcgaccgcgatttgctccagctcgtatcggaccgcgtgaccgtcgcgctgacgcgcaagggcatcacggaaacggagcggtacgacccggcgcgcatccgcgaggaatacggcttcgatcccgaccgcatccgcgacctcaaagggctgatgggcgacgcgtctgacaatcttcccggcgttcccggcgtcggtgagaaaaccgcactgaaactgctcaggcagtacggttcgctggagagcgtcctggaacacgcgtcggaaatcgccggaaagctcggtgaaaatctgcgggcgcacgccgacgccgcccgattgagcaagcggctggcgacgatcgactgcgcggtaccgttgcagtcgggatgggactggctgcgcctcggcgaaccggaccgcgccgcgctcgcctcgctgttgcggcagctcgaattcaagtcgctgttgaaacggctcggactcgacggcacgtccgccgatgccgacgtcgacggcgtccgttcctccgcgcggccggcggacgagaaacggccgagggccgtcgccgtcgctgaggagggcgtcgacgtccgctgtccggatcgcccggaagaagtcgaagaagcgctgtcgcggctggaagccgcccagtcggtcgtcgtcgaggtgacgggcgacaacccgcacgacggcgaagtgcgcggcgtcgcatggtgggacggacatacggcgtatttcattccgtttgaacggctggtgcagtccgacatgcggccgctggccgactggctcgccgacgcgcgtcggccgaagcgtacgcacgactcccatcgcgctgaagtggcgctgttctggcacggccttgcgtttcgcggcacgtcgttctgcacgcatatcgccgcctatttgctcgaccccacggaatcgcgccatacgctggcggacctgtcgcgccgctacggtctgccgccggtaccggaagccgaggacgtttacggcaagggcgcgaagttcaaggttcccgatcgcgacacgctggcgcgttacgtcggccgcaaggccgccctagtcgcgcggctcgttccgctgctcgaggcggatttggcggcctgcggcatgcgttcgcttttttacgacctggagctgccgctttcatccgaactcgccgtcatggagacggtcggcgtccgcgtcgacgcggcggcgctcgccgcctacggcgaggaattgcgcgaggcggcggcgaaagtcgagcgggagatttacgagctggccgggacgacgttcaacatcggatcgacgaaacagctcggcgaaattttgttcgataagctggggctgcccgtcgtcaagaaaacgaaaaccggctattccaccgacgcagacgtgctggaggaactggcgccgtaccatccgatcgtcgaaaagattttgcattaccgccaactgacgaaattgcagtcgacctacatcgaggggcttttgaaagaaatccgtccgcaaaccggtaaaatccatacgtattatcagcagacgatcgcggcgacggggcggctgagcagtcagtttcccaatcttcagaacattccgatccgtctcgaagaggggcggaaaatccgcaaggcgttcgttccgtcagaaccgggatggctgatgctcgccgccgactattcgcagatcgaactgcgcgtgctcgcgcacgtttccggcgacgaacggctgaaggaagcgtttcggacaggcatggacatccacacgaagaccgcgatggacgtgttcggcgtttccgaagaccgcgtcgacgcgcgcatgcggcggcaggcgaaggcggtcaatttcggcatcatctacggcatcagcgatttcggactggcgcaaaacctgaacatttcccgcaaggaggcggcggagttcatccggcaatatttcgccgtcttttcgggcgtcaaggcgtaccgcgagcggatcgtcgagcaggcgcgccgcgacggttacgtgacgaccctgctcggtcgcaggcgctatttgccggactctaacgcgtcgaattacaacctccgctcgttcgcggagcggacggcgatgaatacgccgatccagggcacggccgccgacatcatcaagaccgcgatggtgcgtctgacgcggcggatgcgcgacgtcggactgaagagccgcatgctgctgcaggttcacgacgagctcgtgtttgaagtgccgccggacgagctcgacgcgatgcgggagcttgtgacggacgtcatggagtcggcggtcccgctcgacgtgccgctgaaggtcgacgtcagctggggcgccgactggtacgcggcgaagtgagggaagcgggatcc

SEQ ID NO: 1127 - DNA, 2792 bp, Artificial Sequence
  Description of Artificial Sequence: Synthetic Caldibacillus cellulovorans CompA.2 DNA Polymerase I825T
atgaaatacctgctgccgaccgctgctgctggtctgctgctcctcgctgcccagccggcgatggccatgggcaaactgattctggtcgacggaaacagcgtcgccaaccgggcgttttacgccgtccggctgctcagcacgcgcggcggcctgcacacaaacgcggtgtacggattcgccaacatgttgctcaagctgatcgaggaggaacggccgacgcattttctcgtcgcgttcgacgcgggcaaggcgacgttccgtcatcgcgaatacgaggcctacaaggcgggtcgcctgcagacgccgcccgagctgtccgagcagtttccgtacatccgggagctcgtccgggcgttcggcgtcgcgtccggcgagctggaggaatacgaggcggacgacatgatcggtacgctggcgaaacgggcggaggccgagggcgtcgacacgctggtcgtcaccggcgaccgcgatttgctccagctcgtatcggaccgcgtgaccgtcgcgctgacgcgcaagggcatcacggaaacggagcggtacgacccggcgcgcatccgcgaggaatacggcttcgatcccgaccgcatccgcgacctcaaagggctgatgggcgacgcgtctgacaatcttcccggcgttcccggcgtcggtgagaaaaccgcactgaaactgctcaggcagtacggttcgctggagagcgtcctggaacacgcgtcggaaatcgccggaaagctcggtgaaaatctgcgggcgcacgccgacgccgcccgattgagcaagcggctggcgacgatcgactgcgcggtaccgttgcagtcgggatgggactggctgcgcctcggcgaaccggaccgcgccgcgctcgcctcgctgttgcggcagctcgaattcaagtcgctgttgaaacggctcggactcgacggcacgtccgccgatgccgacgtcgacggcgtccgttcctccgcgcggccggcggacgagaaacggccgagggccgtcgccgtcgctgaggagggcgtcgacgtccgctgtccggatcgcccggaagaagtcgaagaagcgctgtcgcggctggaagccgcccagtcggtcgtcgtcgaggtgacgggcgacaacccgcacgacggcgaagtgcgcggcgtcgcatggtgggacggacatacggcgtatttcattccgtttgaacggctggtgcagtccgacatgcggccgctggccgactggctcgccgacgcgcgtcggccgaagcgtacgcacgactcccatcgcgctgaagtggcgctgttctggcacggccttgcgtttcgcggcacgtcgttctgcacgcatatcgccgcctatttgctcgaccccacggaatcgcgccatacgctggcggacctgtcgcgccgctacggtctgccgccggtaccggaagccgaggacgtttacggcaagggcgcgaagttcaaggttcccgatcgcgacacgctggcgcgttacgtcggccgcaaggccgccctagtcgcgcggctcgttccgctgctcgaggcggatttggcggcctgcggcatgcgttcgcttttttacgacctggagctgccgctttcatccgaactcgccgtcatggagacggtcggcgtccgcgtcgacgcggcggcgctcgccgcctacggcgaggaattgcgcgaggcggcggcgaaagtcgagcgggagatttacgagctggccgggacgacgttcaacatcggatcgacgaaacagctcggcgaaattttgttcgataagctggggctgcccgtcgtcaagaaaacgaaaaccggctattccaccgacgcagacgtgctggaggaactggcgccgtaccatccgatcgtcgaaaagattttgcattaccgccaactgacgaaattgcagtcgacctacatcgaggggcttttgaaagaaatccgtccgcaaaccggtaaaatccatacgtattatcagcagacgatcgcggcgacggggcggctgagcagtcagtttcccaatcttcagaacattccgatccgtctcgaagaggggcggaaaatccgcaaggcgttcgttccgtcagaaccgggatggctgatgctcgccgccgactattcgcagatcgaactgcgcgtgctcgcgcacgtttccggcgacgaacggctgaaggaagcgtttcggacaggcatggacatccacacgaagaccgcgatggacgtgttcggcgtttccgaagaccgcgtcgacgcgcgcatgcggcggcaggcgaaggcggtcaatttcggcatcatctacggcatcagcgatttcggactggcgcaaaacctgaacatttcccgcaaggaggcggcggagttcatccggcaatatttcgccgtcttttcgggcgtcaaggcgtaccgcgagcggatcgtcgagcaggcgcgccgcgacggttacgtgacgaccctgctcggtcgcaggcgctatttgccggacactaacgcgtcgaattacaacctccgctcgttcgcggagcggacggcgatgaatacgccgatccagggcacggccgccgacatcatcaagaccgcgatggtgcgtctgacgcggcggatgcgcgacgtcggactgaagagccgcatgctgctgcaggttcacgacgagctcgtgtttgaagtgccgccggacgagctcgacgcgatgcgggagcttgtgacggacgtcatggagtcggcggtcccgctcgacgtgccgctgaaggtcgacgtcagctggggcgccgactggtacgcggcgaagtgagggaagcgggatcc

SEQ ID NO: 1128 - DNA, 2792 bp, Artificial Sequence
  Description of Artificial Sequence: Synthetic Caldibacillus cellulovorans CompA.2 DNA Polymerase I825W
atgaaatacctgctgccgaccgctgctgctggtctgctgctcctcgctgcccagccggcgatggccatgggcaaactgattctggtcgacggaaacagcgtcgccaaccgggcgttttacgccgtccggctgctcagcacgcgcggcggcctgcacacaaacgcggtgtacggattcgccaacatgttgctcaagctgatcgaggaggaacggccgacgcattttctcgtcgcgttcgacgcgggcaaggcgacgttccgtcatcgcgaatacgaggcctacaaggcgggtcgcctgcagacgccgcccgagctgtccgagcagtttccgtacatccgggagctcgtccgggcgttcggcgtcgcgtccggcgagctggaggaatacgaggcggacgacatgatcggtacgctggcgaaacgggcggaggccgagggcgtcgacacgctggtcgtcaccggcgaccgcgatttgctccagctcgtatcggaccgcgtgaccgtcgcgctgacgcgcaagggcatcacggaaacggagcggtacgacccggcgcgcatccgcgaggaatacggcttcgatcccgaccgcatccgcgacctcaaagggctgatgggcgacgcgtctgacaatcttcccggcgttcccggcgtcggtgagaaaaccgcactgaaactgctcaggcagtacggttcgctggagagcgtcctggaacacgcgtcggaaatcgccggaaagctcggtgaaaatctgcgggcgcacgccgacgccgcccgattgagcaagcggctggcgacgatcgactgcgcggtaccgttgcagtcgggatgggactggctgcgcctcggcgaaccggaccgcgccgcgctcgcctcgctgttgcggcagctcgaattcaagtcgctgttgaaacggctcggactcgacggcacgtccgccgatgccgacgtcgacggcgtccgttcctccgcgcggccggcggacgagaaacggccgagggccgtcgccgtcgctgaggagggcgtcgacgtccgctgtccggatcgcccggaagaagtcgaagaagcgctgtcgcggctggaagccgcccagtcggtcgtcgtcgaggtgacgggcgacaacccgcacgacggcgaagtgcgcggcgtcgcatggtgggacggacatacggcgtatttcattccgtttgaacggctggtgcagtccgacatgcggccgctggccgactggctcgccgacgcgcgtcggccgaagcgtacgcacgactcccatcgcgctgaagtggcgctgttctggcacggccttgcgtttcgcggcacgtcgttctgcacgcatatcgccgcctatttgctcgaccccacggaatcgcgccatacgctggcggacctgtcgcgccgctacggtctgccgccggtaccggaagccgaggacgtttacggcaagggcgcgaagttcaaggttcccgatcgcgacacgctggcgcgttacgtcggccgcaaggccgccctagtcgcgcggctcgttccgctgctcgaggcggatttggcggcctgcggcatgcgttcgcttttttacgacctggagctgccgctttcatccgaactcgccgtcatggagacggtcggcgtccgcgtcgacgcggcggcgctcgccgcctacggcgaggaattgcgcgaggcggcggcgaaagtcgagcgggagatttacgagctggccgggacgacgttcaacatcggatcgacgaaacagctcggcgaaattttgttcgataagctggggctgcccgtcgtcaagaaaacgaaaaccggctattccaccgacgcagacgtgctggaggaactggcgccgtaccatccgatcgtcgaaaagattttgcattaccgccaactgacgaaattgcagtcgacctacatcgaggggcttttgaaagaaatccgtccgcaaaccggtaaaatccatacgtattatcagcagacgatcgcggcgacggggcggctgagcagtcagtttcccaatcttcagaacattccgatccgtctcgaagaggggcggaaaatccgcaaggcgttcgttccgtcagaaccgggatggctgatgctcgccgccgactattcgcagatcgaactgcgcgtgctcgcgcacgtttccggcgacgaacggctgaaggaagcgtttcggacaggcatggacatccacacgaagaccgcgatggacgtgttcggcgtttccgaagaccgcgtcgacgcgcgcatgcggcggcaggcgaaggcggtcaatttcggcatcatctacggcatcagcgatttcggactggcgcaaaacctgaacatttcccgcaaggaggcggcggagttcatccggcaatatttcgccgtcttttcgggcgtcaaggcgtaccgcgagcggatcgtcgagcaggcgcgccgcgacggttacgtgacgaccctgctcggtcgcaggcgctatttgccggactggaacgcgtcgaattacaacctccgctcgttcgcggagcggacggcgatgaatacgccgatccagggcacggccgccgacatcatcaagaccgcgatggtgcgtctgacgcggcggatgcgcgacgtcggactgaagagccgcatgctgctgcaggttcacgacgagctcgtgtttgaagtgccgccggacgagctcgacgcgatgcgggagcttgtgacggacgtcatggagtcggcggtcccgctcgacgtgccgctgaaggtcgacgtcagctggggcgccgactggtacgcggcgaagtgagggaagcgggatcc

SEQ ID NO: 1129 - DNA, 2792 bp, Artificial Sequence
  Description of Artificial Sequence: Synthetic Caldibacillus cellulovorans CompA.2 DNA Polymerase I825Y
atgaaatacctgctgccgaccgctgctgctggtctgctgctcctcgctgcccagccggcgatggccatgggcaaactgattctggtcgacggaaacagcgtcgccaaccgggcgttttacgccgtccggctgctcagcacgcgcggcggcctgcacacaaacgcggtgtacggattcgccaacatgttgctcaagctgatcgaggaggaacggccgacgcattttctcgtcgcgttcgacgcgggcaaggcgacgttccgtcatcgcgaatacgaggcctacaaggcgggtcgcctgcagacgccgcccgagctgtccgagcagtttccgtacatccgggagctcgtccgggcgttcggcgtcgcgtccggcgagctggaggaatacgaggcggacgacatgatcggtacgctggcgaaacgggcggaggccgagggcgtcgacacgctggtcgtcaccggcgaccgcgatttgctccagctcgtatcggaccgcgtgaccgtcgcgctgacgcgcaagggcatcacggaaacggagcggtacgacccggcgcgcatccgcgaggaatacggcttcgatcccgaccgcatccgcgacctcaaagggctgatgggcgacgcgtctgacaatcttcccggcgttcccggcgtcggtgagaaaaccgcactgaaactgctcaggcagtacggttcgctggagagcgtcctggaacacgcgtcggaaatcgccggaaagctcggtgaaaatctgcgggcgcacgccgacgccgcccgattgagcaagcggctggcgacgatcgactgcgcggtaccgttgcagtcgggatgggactggctgcgcctcggcgaaccggaccgcgccgcgctcgcctcgctgttgcggcagctcgaattcaagtcgctgttgaaacggctcggactcgacggcacgtccgccgatgccgacgtcgacggcgtccgttcctccgcgcggccggcggacgagaaacggccgagggccgtcgccgtcgctgaggagggcgtcgacgtccgctgtccggatcgcccggaagaagtcgaagaagcgctgtcgcggctggaagccgcccagtcggtcgtcgtcgaggtgacgggcgacaacccgcacgacggcgaagtgcgcggcgtcgcatggtgggacggacatacggcgtatttcattccgtttgaacggctggtgcagtccgacatgcggccgctggccgactggctcgccgacgcgcgtcggccgaagcgtacgcacgactcccatcgcgctgaagtggcgctgttctggcacggccttgcgtttcgcggcacgtcgttctgcacgcatatcgccgcctatttgctcgaccccacggaatcgcgccatacgctggcggacctgtcgcgccgctacggtctgccgccggtaccggaagccgaggacgtttacggcaagggcgcgaagttcaaggttcccgatcgcgacacgctggcgcgttacgtcggccgcaaggccgccctagtcgcgcggctcgttccgctgctcgaggcggatttggcggcctgcggcatgcgttcgcttttttacgacctggagctgccgctttcatccgaactcgccgtcatggagacggtcggcgtccgcgtcgacgcggcggcgctcgccgcctacggcgaggaattgcgcgaggcggcggcgaaagtcgagcgggagatttacgagctggccgggacgacgttcaacatcggatcgacgaaacagctcggcgaaattttgttcgataagctggggctgcccgtcgtcaagaaaacgaaaaccggctattccaccgacgcagacgtgctggaggaactggcgccgtaccatccgatcgtcgaaaagattttgcattaccgccaactgacgaaattgcagtcgacctacatcgaggggcttttgaaagaaatccgtccgcaaaccggtaaaatccatacgtattatcagcagacgatcgcggcgacggggcggctgagcagtcagtttcccaatcttcagaacattccgatccgtctcgaagaggggcggaaaatccgcaaggcgttcgttccgtcagaaccgggatggctgatgctcgccgccgactattcgcagatcgaactgcgcgtgctcgcgcacgtttccggcgacgaacggctgaaggaagcgtttcggacaggcatggacatccacacgaagaccgcgatggacgtgttcggcgtttccgaagaccgcgtcgacgcgcgcatgcggcggcaggcgaaggcggtcaatttcggcatcatctacggcatcagcgatttcggactggcgcaaaacctgaacatttcccgcaaggaggcggcggagttcatccggcaatatttcgccgtcttttcgggcgtcaaggcgtaccgcgagcggatcgtcgagcaggcgcgccgcgacggttacgtgacgaccctgctcggtcgcaggcgctatttgccggactataacgcgtcgaattacaacctccgctcgttcgcggagcggacggcgatgaatacgccgatccagggcacggccgccgacatcatcaagaccgcgatggtgcgtctgacgcggcggatgcgcgacgtcggactgaagagccgcatgctgctgcaggttcacgacgagctcgtgtttgaagtgccgccggacgagctcgacgcgatgcgggagcttgtgacggacgtcatggagtcggcggtcccgctcgacgtgccgctgaaggtcgacgtcagctggggcgccgactggtacgcggcgaagtgagggaagcgggatcc

SEQ ID NO: 1130 - DNA, 2792 bp, Artificial Sequence
  Description of Artificial Sequence: Synthetic Caldibacillus cellulovorans CompA.2 DNA Polymerase I825V
atgaaatacctgctgccgaccgctgctgctggtctgctgctcctcgctgcccagccggcgatggccatgggcaaactgattctggtcgacggaaacagcgtcgccaaccgggcgttttacgccgtccggctgctcagcacgcgcggcggcctgcacacaaacgcggtgtacggattcgccaacatgttgctcaagctgatcgaggaggaacggccgacgcattttctcgtcgcgttcgacgcgggcaaggcgacgttccgtcatcgcgaatacgaggcctacaaggcgggtcgcctgcagacgccgcccgagctgtccgagcagtttccgtacatccgggagctcgtccgggcgttcggcgtcgcgtccggcgagctggaggaatacgaggcggacgacatgatcggtacgctggcgaaacgggcggaggccgagggcgtcgacacgctggtcgtcaccggcgaccgcgatttgctccagctcgtatcggaccgcgtgaccgtcgcgctgacgcgcaagggcatcacggaaacggagcggtacgacccggcgcgcatccgcgaggaatacggcttcgatcccgaccgcatccgcgacctcaaagggctgatgggcgacgcgtctgacaatcttcccggcgttcccggcgtcggtgagaaaaccgcactgaaactgctcaggcagtacggttcgctggagagcgtcctggaacacgcgtcggaaatcgccggaaagctcggtgaaaatctgcgggcgcacgccgacgccgcccgattgagcaagcggctggcgacgatcgactgcgcggtaccgttgcagtcgggatgggactggctgcgcctcggcgaaccggaccgcgccgcgctcgcctcgctgttgcggcagctcgaattcaagtcgctgttgaaacggctcggactcgacggcacgtccgccgatgccgacgtcgacggcgtccgttcctccgcgcggccggcggacgagaaacggccgagggccgtcgccgtcgctgaggagggcgtcgacgtccgctgtccggatcgcccggaagaagtcgaagaagcgctgtcgcggctggaagccgcccagtcggtcgtcgtcgaggtgacgggcgacaacccgcacgacggcgaagtgcgcggcgtcgcatggtgggacggacatacggcgtatttcattccgtttgaacggctggtgcagtccgacatgcggccgctggccgactggctcgccgacgcgcgtcggccgaagcgtacgcacgactcccatcgcgctgaagtggcgctgttctggcacggccttgcgtttcgcggcacgtcgttctgcacgcatatcgccgcctatttgctcgaccccacggaatcgcgccatacgctggcggacctgtcgcgccgctacggtctgccgccggtaccggaagccgaggacgtttacggcaagggcgcgaagttcaaggttcccgatcgcgacacgctggcgcgttacgtcggccgcaaggccgccctagtcgcgcggctcgttccgctgctcgaggcggatttggcggcctgcggcatgcgttcgcttttttacgacctggagctgccgctttcatccgaactcgccgtcatggagacggtcggcgtccgcgtcgacgcggcggcgctcgccgcctacggcgaggaattgcgcgaggcggcggcgaaagtcgagcgggagatttacgagctggccgggacgacgttcaacatcggatcgacgaaacagctcggcgaaattttgttcgataagctggggctgcccgtcgtcaagaaaacgaaaaccggctattccaccgacgcagacgtgctggaggaactggcgccgtaccatccgatcgtcgaaaagattttgcattaccgccaactgacgaaattgcagtcgacctacatcgaggggcttttgaaagaaatccgtccgcaaaccggtaaaatccatacgtattatcagcagacgatcgcggcgacggggcggctgagcagtcagtttcccaatcttcagaacattccgatccgtctcgaagaggggcggaaaatccgcaaggcgttcgttccgtcagaaccgggatggctgatgctcgccgccgactattcgcagatcgaactgcgcgtgctcgcgcacgtttccggcgacgaacggctgaaggaagcgtttcggacaggcatggacatccacacgaagaccgcgatggacgtgttcggcgtttccgaagaccgcgtcgacgcgcgcatgcggcggcaggcgaaggcggtcaatttcggcatcatctacggcatcagcgatttcggactggcgcaaaacctgaacatttcccgcaaggaggcggcggagttcatccggcaatatttcgccgtcttttcgggcgtcaaggcgtaccgcgagcggatcgtcgagcaggcgcgccgcgacggttacgtgacgaccctgctcggtcgcaggcgctatttgccggacgttaacgcgtcgaattacaacctccgctcgttcgcggagcggacggcgatgaatacgccgatccagggcacggccgccgacatcatcaagaccgcgatggtgcgtctgacgcggcggatgcgcgacgtcggactgaagagccgcatgctgctgcaggttcacgacgagctcgtgtttgaagtgccgccggacgagctcgacgcgatgcgggagcttgtgacggacgtcatggagtcggcggtcccgctcgacgtgccgctgaaggtcgacgtcagctggggcgccgactggtacgcggcgaagtgagggaagcgggatcc

SEQ ID NO: 1131 - DNA, 2792 bp, Artificial Sequence
  Description of Artificial Sequence: Synthetic Caldibacillus cellulovorans CompA.2 DNA Polymerase N826A
atgaaatacctgctgccgaccgctgctgctggtctgctgctcctcgctgcccagccggcgatggccatgggcaaactgattctggtcgacggaaacagcgtcgccaaccgggcgttttacgccgtccggctgctcagcacgcgcggcggcctgcacacaaacgcggtgtacggattcgccaacatgttgctcaagctgatcgaggaggaacggccgacgcattttctcgtcgcgttcgacgcgggcaaggcgacgttccgtcatcgcgaatacgaggcctacaaggcgggtcgcctgcagacgccgcccgagctgtccgagcagtttccgtacatccgggagctcgtccgggcgttcggcgtcgcgtccggcgagctggaggaatacgaggcggacgacatgatcggtacgctggcgaaacgggcggaggccgagggcgtcgacacgctggtcgtcaccggcgaccgcgatttgctccagctcgtatcggaccgcgtgaccgtcgcgctgacgcgcaagggcatcacggaaacggagcggtacgacccggcgcgcatccgcgaggaatacggcttcgatcccgaccgcatccgcgacctcaaagggctgatgggcgacgcgtctgacaatcttcccggcgttcccggcgtcggtgagaaaaccgcactgaaactgctcaggcagtacggttcgctggagagcgtcctggaacacgcgtcggaaatcgccggaaagctcggtgaaaatctgcgggcgcacgccgacgccgcccgattgagcaagcggctggcgacgatcgactgcgcggtaccgttgcagtcgggatgggactggctgcgcctcggcgaaccggaccgcgccgcgctcgcctcgctgttgcggcagctcgaattcaagtcgctgttgaaacggctcggactcgacggcacgtccgccgatgccgacgtcgacggcgtccgttcctccgcgcggccggcggacgagaaacggccgagggccgtcgccgtcgctgaggagggcgtcgacgtccgctgtccggatcgcccggaagaagtcgaagaagcgctgtcgcggctggaagccgcccagtcggtcgtcgtcgaggtgacgggcgacaacccgcacgacggcgaagtgcgcggcgtcgcatggtgggacggacatacggcgtatttcattccgtttgaacggctggtgcagtccgacatgcggccgctggccgactggctcgccgacgcgcgtcggccgaagcgtacgcacgactcccatcgcgctgaagtggcgctgttctggcacggccttgcgtttcgcggcacgtcgttctgcacgcatatcgccgcctatttgctcgaccccacggaatcgcgccatacgctggcggacctgtcgcgccgctacggtctgccgccggtaccggaagccgaggacgtttacggcaagggcgcgaagttcaaggttcccgatcgcgacacgctggcgcgttacgtcggccgcaaggccgccctagtcgcgcggctcgttccgctgctcgaggcggatttggcggcctgcggcatgcgttcgcttttttacgacctggagctgccgctttcatccgaactcgccgtcatggagacggtcggcgtccgcgtcgacgcggcggcgctcgccgcctacggcgaggaattgcgcgaggcggcggcgaaagtcgagcgggagatttacgagctggccgggacgacgttcaacatcggatcgacgaaacagctcggcgaaattttgttcgataagctggggctgcccgtcgtcaagaaaacgaaaaccggctattccaccgacgcagacgtgctggaggaactggcgccgtaccatccgatcgtcgaaaagattttgcattaccgccaactgacgaaattgcagtcgacctacatcgaggggcttttgaaagaaatccgtccgcaaaccggtaaaatccatacgtattatcagcagacgatcgcggcgacggggcggctgagcagtcagtttcccaatcttcagaacattccgatccgtctcgaagaggggcggaaaatccgcaaggcgttcgttccgtcagaaccgggatggctgatgctcgccgccgactattcgcagatcgaactgcgcgtgctcgcgcacgtttccggcgacgaacggctgaaggaagcgtttcggacaggcatggacatccacacgaagaccgcgatggacgtgttcggcgtttccgaagaccgcgtcgacgcgcgcatgcggcggcaggcgaaggcggtcaatttcggcatcatctacggcatcagcgatttcggactggcgcaaaacctgaacatttcccgcaaggaggcggcggagttcatccggcaatatttcgccgtcttttcgggcgtcaaggcgtaccgcgagcggatcgtcgagcaggcgcgccgcgacggttacgtgacgaccctgctcggtcgcaggcgctatttgccggacatcgctgcgtcgaattacaacctccgctcgttcgcggagcggacggcgatgaatacgccgatccagggcacggccgccgacatcatcaagaccgcgatggtgcgtctgacgcggcggatgcgcgacgtcggactgaagagccgcatgctgctgcaggttcacgacgagctcgtgtttgaagtgccgccggacgagctcgacgcgatgcgggagcttgtgacggacgtcatggagtcggcggtcccgctcgacgtgccgctgaaggtcgacgtcagctggggcgccgactggtacgcggcgaagtgagggaagcgggatcc

SEQ ID NO: 1132 - DNA, 2792 bp, Artificial Sequence
  Description of Artificial Sequence: Synthetic Caldibacillus cellulovorans CompA.2 DNA Polymerase N826R
atgaaatacctgctgccgaccgctgctgctggtctgctgctcctcgctgcccagccggcgatggccatgggcaaactgattctggtcgacggaaacagcgtcgccaaccgggcgttttacgccgtccggctgctcagcacgcgcggcggcctgcacacaaacgcggtgtacggattcgccaacatgttgctcaagctgatcgaggaggaacggccgacgcattttctcgtcgcgttcgacgcgggcaaggcgacgttccgtcatcgcgaatacgaggcctacaaggcgggtcgcctgcagacgccgcccgagctgtccgagcagtttccgtacatccgggagctcgtccgggcgttcggcgtcgcgtccggcgagctggaggaatacgaggcggacgacatgatcggtacgctggcgaaacgggcggaggccgagggcgtcgacacgctggtcgtcaccggcgaccgcgatttgctccagctcgtatcggaccgcgtgaccgtcgcgctgacgcgcaagggcatcacggaaacggagcggtacgacccggcgcgcatccgcgaggaatacggcttcgatcccgaccgcatccgcgacctcaaagggctgatgggcgacgcgtctgacaatcttcccggcgttcccggcgtcggtgagaaaaccgcactgaaactgctcaggcagtacggttcgctggagagcgtcctggaacacgcgtcggaaatcgccggaaagctcggtgaaaatctgcgggcgcacgccgacgccgcccgattgagcaagcggctggcgacgatcgactgcgcggtaccgttgcagtcgggatgggactggctgcgcctcggcgaaccggaccgcgccgcgctcgcctcgctgttgcggcagctcgaattcaagtcgctgttgaaacggctcggactcgacggcacgtccgccgatgccgacgtcgacggcgtccgttcctccgcgcggccggcggacgagaaacggccgagggccgtcgccgtcgctgaggagggcgtcgacgtccgctgtccggatcgcccggaagaagtcgaagaagcgctgtcgcggctggaagccgcccagtcggtcgtcgtcgaggtgacgggcgacaacccgcacgacggcgaagtgcgcggcgtcgcatggtgggacggacatacggcgtatttcattccgtttgaacggctggtgcagtccgacatgcggccgctggccgactggctcgccgacgcgcgtcggccgaagcgtacgcacgactcccatcgcgctgaagtggcgctgttctggcacggccttgcgtttcgcggcacgtcgttctgcacgcatatcgccgcctatttgctcgaccccacggaatcgcgccatacgctggcggacctgtcgcgccgctacggtctgccgccggtaccggaagccgaggacgtttacggcaagggcgcgaagttcaaggttcccgatcgcgacacgctggcgcgttacgtcggccgcaaggccgccctagtcgcgcggctcgttccgctgctcgaggcggatttggcggcctgcggcatgcgttcgcttttttacgacctggagctgccgctttcatccgaactcgccgtcatggagacggtcggcgtccgcgtcgacgcggcggcgctcgccgcctacggcgaggaattgcgcgaggcggcggcgaaagtcgagcgggagatttacgagctggccgggacgacgttcaacatcggatcgacgaaacagctcggcgaaattttgttcgataagctggggctgcccgtcgtcaagaaaacgaaaaccggctattccaccgacgcagacgtgctggaggaactggcgccgtaccatccgatcgtcgaaaagattttgcattaccgccaactgacgaaattgcagtcgacctacatcgaggggcttttgaaagaaatccgtccgcaaaccggtaaaatccatacgtattatcagcagacgatcgcggcgacggggcggctgagcagtcagtttcccaatcttcagaacattccgatccgtctcgaagaggggcggaaaatccgcaaggcgttcgttccgtcagaaccgggatggctgatgctcgccgccgactattcgcagatcgaactgcgcgtgctcgcgcacgtttccggcgacgaacggctgaaggaagcgtttcggacaggcatggacatccacacgaagaccgcgatggacgtgttcggcgtttccgaagaccgcgtcgacgcgcgcatgcggcggcaggcgaaggcggtcaatttcggcatcatctacggcatcagcgatttcggactggcgcaaaacctgaacatttcccgcaaggaggcggcggagttcatccggcaatatttcgccgtcttttcgggcgtcaaggcgtaccgcgagcggatcgtcgagcaggcgcgccgcgacggttacgtgacgaccctgctcggtcgcaggcgctatttgccggacatccgtgcgtcgaattacaacctccgctcgttcgcggagcggacggcgatgaatacgccgatccagggcacggccgccgacatcatcaagaccgcgatggtgcgtctgacgcggcggatgcgcgacgtcggactgaagagccgcatgctgctgcaggttcacgacgagctcgtgtttgaagtgccgccggacgagctcgacgcgatgcgggagcttgtgacggacgtcatggagtcggcggtcccgctcgacgtgccgctgaaggtcgacgtcagctggggcgccgactggtacgcggcgaagtgagggaagcgggatcc

SEQ ID NO: 1133 - DNA, 2792 bp, Artificial Sequence
  Description of Artificial Sequence: Synthetic Caldibacillus cellulovorans CompA.2 DNA Polymerase N826D
atgaaatacctgctgccgaccgctgctgctggtctgctgctcctcgctgcccagccggcgatggccatgggcaaactgattctggtcgacggaaacagcgtcgccaaccgggcgttttacgccgtccggctgctcagcacgcgcggcggcctgcacacaaacgcggtgtacggattcgccaacatgttgctcaagctgatcgaggaggaacggccgacgcattttctcgtcgcgttcgacgcgggcaaggcgacgttccgtcatcgcgaatacgaggcctacaaggcgggtcgcctgcagacgccgcccgagctgtccgagcagtttccgtacatccgggagctcgtccgggcgttcggcgtcgcgtccggcgagctggaggaatacgaggcggacgacatgatcggtacgctggcgaaacgggcggaggccgagggcgtcgacacgctggtcgtcaccggcgaccgcgatttgctccagctcgtatcggaccgcgtgaccgtcgcgctgacgcgcaagggcatcacggaaacggagcggtacgacccggcgcgcatccgcgaggaatacggcttcgatcccgaccgcatccgcgacctcaaagggctgatgggcgacgcgtctgacaatcttcccggcgttcccggcgtcggtgagaaaaccgcactgaaactgctcaggcagtacggttcgctggagagcgtcctggaacacgcgtcggaaatcgccggaaagctcggtgaaaatctgcgggcgcacgccgacgccgcccgattgagcaagcggctggcgacgatcgactgcgcggtaccgttgcagtcgggatgggactggctgcgcctcggcgaaccggaccgcgccgcgctcgcctcgctgttgcggcagctcgaattcaagtcgctgttgaaacggctcggactcgacggcacgtccgccgatgccgacgtcgacggcgtccgttcctccgcgcggccggcggacgagaaacggccgagggccgtcgccgtcgctgaggagggcgtcgacgtccgctgtccggatcgcccggaagaagtcgaagaagcgctgtcgcggctggaagccgcccagtcggtcgtcgtcgaggtgacgggcgacaacccgcacgacggcgaagtgcgcggcgtcgcatggtgggacggacatacggcgtatttcattccgtttgaacggctggtgcagtccgacatgcggccgctggccgactggctcgccgacgcgcgtcggccgaagcgtacgcacgactcccatcgcgctgaagtggcgctgttctggcacggccttgcgtttcgcggcacgtcgttctgcacgcatatcgccgcctatttgctcgaccccacggaatcgcgccatacgctggcggacctgtcgcgccgctacggtctgccgccggtaccggaagccgaggacgtttacggcaagggcgcgaagttcaaggttcccgatcgcgacacgctggcgcgttacgtcggccgcaaggccgccctagtcgcgcggctcgttccgctgctcgaggcggatttggcggcctgcggcatgcgttcgcttttttacgacctggagctgccgctttcatccgaactcgccgtcatggagacggtcggcgtccgcgtcgacgcggcggcgctcgccgcctacggcgaggaattgcgcgaggcggcggcgaaagtcgagcgggagatttacgagctggccgggacgacgttcaacatcggatcgacgaaacagctcggcgaaattttgttcgataagctggggctgcccgtcgtcaagaaaacgaaaaccggctattccaccgacgcagacgtgctggaggaactggcgccgtaccatccgatcgtcgaaaagattttgcattaccgccaactgacgaaattgcagtcgacctacatcgaggggcttttgaaagaaatccgtccgcaaaccggtaaaatccatacgtattatcagcagacgatcgcggcgacggggcggctgagcagtcagtttcccaatcttcagaacattccgatccgtctcgaagaggggcggaaaatccgcaaggcgttcgttccgtcagaaccgggatggctgatgctcgccgccgactattcgcagatcgaactgcgcgtgctcgcgcacgtttccggcgacgaacggctgaaggaagcgtttcggacaggcatggacatccacacgaagaccgcgatggacgtgttcggcgtttccgaagaccgcgtcgacgcgcgcatgcggcggcaggcgaaggcggtcaatttcggcatcatctacggcatcagcgatttcggactggcgcaaaacctgaacatttcccgcaaggaggcggcggagttcatccggcaatatttcgccgtcttttcgggcgtcaaggcgtaccgcgagcggatcgtcgagcaggcgcgccgcgacggttacgtgacgaccctgctcggtcgcaggcgctatttgccggacatcgatgcgtcgaattacaacctccgctcgttcgcggagcggacggcgatgaatacgccgatccagggcacggccgccgacatcatcaagaccgcgatggtgcgtctgacgcggcggatgcgcgacgtcggactgaagagccgcatgctgctgcaggttcacgacgagctcgtgtttgaagtgccgccggacgagctcgacgcgatgcgggagcttgtgacggacgtcatggagtcggcggtcccgctcgacgtgccgctgaaggtcgacgtcagctggggcgccgactggtacgcggcgaagtgagggaagcgggatcc

SEQ ID NO: 1134 - DNA, 2792 bp, Artificial Sequence
  Description of Artificial Sequence: Synthetic Caldibacillus cellulovorans CompA.2 DNA Polymerase N826C
atgaaatacctgctgccgaccgctgctgctggtctgctgctcctcgctgcccagccggcgatggccatgggcaaactgattctggtcgacggaaacagcgtcgccaaccgggcgttttacgccgtccggctgctcagcacgcgcggcggcctgcacacaaacgcggtgtacggattcgccaacatgttgctcaagctgatcgaggaggaacggccgacgcattttctcgtcgcgttcgacgcgggcaaggcgacgttccgtcatcgcgaatacgaggcctacaaggcgggtcgcctgcagacgccgcccgagctgtccgagcagtttccgtacatccgggagctcgtccgggcgttcggcgtcgcgtccggcgagctggaggaatacgaggcggacgacatgatcggtacgctggcgaaacgggcggaggccgagggcgtcgacacgctggtcgtcaccggcgaccgcgatttgctccagctcgtatcggaccgcgtgaccgtcgcgctgacgcgcaagggcatcacggaaacggagcggtacgacccggcgcgcatccgcgaggaatacggcttcgatcccgaccgcatccgcgacctcaaagggctgatgggcgacgcgtctgacaatcttcccggcgttcccggcgtcggtgagaaaaccgcactgaaactgctcaggcagtacggttcgctggagagcgtcctggaacacgcgtcggaaatcgccggaaagctcggtgaaaatctgcgggcgcacgccgacgccgcccgattgagcaagcggctggcgacgatcgactgcgcggtaccgttgcagtcgggatgggactggctgcgcctcggcgaaccggaccgcgccgcgctcgcctcgctgttgcggcagctcgaattcaagtcgctgttgaaacggctcggactcgacggcacgtccgccgatgccgacgtcgacggcgtccgttcctccgcgcggccggcggacgagaaacggccgagggccgtcgccgtcgctgaggagggcgtcgacgtccgctgtccggatcgcccggaagaagtcgaagaagcgctgtcgcggctggaagccgcccagtcggtcgtcgtcgaggtgacgggcgacaacccgcacgacggcgaagtgcgcggcgtcgcatggtgggacggacatacggcgtatttcattccgtttgaacggctggtgcagtccgacatgcggccgctggccgactggctcgccgacgcgcgtcggccgaagcgtacgcacgactcccatcgcgctgaagtggcgctgttctggcacggccttgcgtttcgcggcacgtcgttctgcacgcatatcgccgcctatttgctcgaccccacggaatcgcgccatacgctggcggacctgtcgcgccgctacggtctgccgccggtaccggaagccgaggacgtttacggcaagggcgcgaagttcaaggttcccgatcgcgacacgctggcgcgttacgtcggccgcaaggccgccctagtcgcgcggctcgttccgctgctcgaggcggatttggcggcctgcggcatgcgttcgcttttttacgacctggagctgccgctttcatccgaactcgccgtcatggagacggtcggcgtccgcgtcgacgcggcggcgctcgccgcctacggcgaggaattgcgcgaggcggcggcgaaagtcgagcgggagatttacgagctggccgggacgacgttcaacatcggatcgacgaaacagctcggcgaaattttgttcgataagctggggctgcccgtcgtcaagaaaacgaaaaccggctattccaccgacgcagacgtgctggaggaactggcgccgtaccatccgatcgtcgaaaagattttgcattaccgccaactgacgaaattgcagtcgacctacatcgaggggcttttgaaagaaatccgtccgcaaaccggtaaaatccatacgtattatcagcagacgatcgcggcgacggggcggctgagcagtcagtttcccaatcttcagaacattccgatccgtctcgaagaggggcggaaaatccgcaaggcgttcgttccgtcagaaccgggatggctgatgctcgccgccgactattcgcagatcgaactgcgcgtgctcgcgcacgtttccggcgacgaacggctgaaggaagcgtttcggacaggcatggacatccacacgaagaccgcgatggacgtgttcggcgtttccgaagaccgcgtcgacgcgcgcatgcggcggcaggcgaaggcggtcaatttcggcatcatctacggcatcagcgatttcggactggcgcaaaacctgaacatttcccgcaaggaggcggcggagttcatccggcaatatttcgccgtcttttcgggcgtcaaggcgtaccgcgagcggatcgtcgagcaggcgcgccgcgacggttacgtgacgaccctgctcggtcgcaggcgctatttgccggacatctgtgcgtcgaattacaacctccgctcgttcgcggagcggacggcgatgaatacgccgatccagggcacggccgccgacatcatcaagaccgcgatggtgcgtctgacgcggcggatgcgcgacgtcggactgaagagccgcatgctgctgcaggttcacgacgagctcgtgtttgaagtgccgccggacgagctcgacgcgatgcgggagcttgtgacggacgtcatggagtcggcggtcccgctcgacgtgccgctgaaggtcgacgtcagctggggcgccgactggtacgcggcgaagtgagggaagcgggatcc

SEQ ID NO: 1135 - DNA, 2792 bp, Artificial Sequence
  Description of Artificial Sequence: Synthetic Caldibacillus cellulovorans CompA.2 DNA Polymerase N826E
atgaaatacctgctgccgaccgctgctgctggtctgctgctcctcgctgcccagccggcgatggccatgggcaaactgattctggtcgacggaaacagcgtcgccaaccgggcgttttacgccgtccggctgctcagcacgcgcggcggcctgcacacaaacgcggtgtacggattcgccaacatgttgctcaagctgatcgaggaggaacggccgacgcattttctcgtcgcgttcgacgcgggcaaggcgacgttccgtcatcgcgaatacgaggcctacaaggcgggtcgcctgcagacgccgcccgagctgtccgagcagtttccgtacatccgggagctcgtccgggcgttcggcgtcgcgtccggcgagctggaggaatacgaggcggacgacatgatcggtacgctggcgaaacgggcggaggccgagggcgtcgacacgctggtcgtcaccggcgaccgcgatttgctccagctcgtatcggaccgcgtgaccgtcgcgctgacgcgcaagggcatcacggaaacggagcggtacgacccggcgcgcatccgcgaggaatacggcttcgatcccgaccgcatccgcgacctcaaagggctgatgggcgacgcgtctgacaatcttcccggcgttcccggcgtcggtgagaaaaccgcactgaaactgctcaggcagtacggttcgctggagagcgtcctggaacacgcgtcggaaatcgccggaaagctcggtgaaaatctgcgggcgcacgccgacgccgcccgattgagcaagcggctggcgacgatcgactgcgcggtaccgttgcagtcgggatgggactggctgcgcctcggcgaaccggaccgcgccgcgctcgcctcgctgttgcggcagctcgaattcaagtcgctgttgaaacggctcggactcgacggcacgtccgccgatgccgacgtcgacggcgtccgttcctccgcgcggccggcggacgagaaacggccgagggccgtcgccgtcgctgaggagggcgtcgacgtccgctgtccggatcgcccggaagaagtcgaagaagcgctgtcgcggctggaagccgcccagtcggtcgtcgtcgaggtgacgggcgacaacccgcacgacggcgaagtgcgcggcgtcgcatggtgggacggacatacggcgtatttcattccgtttgaacggctggtgcagtccgacatgcggccgctggccgactggctcgccgacgcgcgtcggccgaagcgtacgcacgactcccatcgcgctgaagtggcgctgttctggcacggccttgcgtttcgcggcacgtcgttctgcacgcatatcgccgcctatttgctcgaccccacggaatcgcgccatacgctggcggacctgtcgcgccgctacggtctgccgccggtaccggaagccgaggacgtttacggcaagggcgcgaagttcaaggttcccgatcgcgacacgctggcgcgttacgtcggccgcaaggccgccctagtcgcgcggctcgttccgctgctcgaggcggatttggcggcctgcggcatgcgttcgcttttttacgacctggagctgccgctttcatccgaactcgccgtcatggagacggtcggcgtccgcgtcgacgcggcggcgctcgccgcctacggcgaggaattgcgcgaggcggcggcgaaagtcgagcgggagatttacgagctggccgggacgacgttcaacatcggatcgacgaaacagctcggcgaaattttgttcgataagctggggctgcccgtcgtcaagaaaacgaaaaccggctattccaccgacgcagacgtgctggaggaactggcgccgtaccatccgatcgtcgaaaagattttgcattaccgccaactgacgaaattgcagtcgacctacatcgaggggcttttgaaagaaatccgtccgcaaaccggtaaaatccatacgtattatcagcagacgatcgcggcgacggggcggctgagcagtcagtttcccaatcttcagaacattccgatccgtctcgaagaggggcggaaaatccgcaaggcgttcgttccgtcagaaccgggatggctgatgctcgccgccgactattcgcagatcgaactgcgcgtgctcgcgcacgtttccggcgacgaacggctgaaggaagcgtttcggacaggcatggacatccacacgaagaccgcgatggacgtgttcggcgtttccgaagaccgcgtcgacgcgcgcatgcggcggcaggcgaaggcggtcaatttcggcatcatctacggcatcagcgatttcggactggcgcaaaacctgaacatttcccgcaaggaggcggcggagttcatccggcaatatttcgccgtcttttcgggcgtcaaggcgtaccgcgagcggatcgtcgagcaggcgcgccgcgacggttacgtgacgaccctgctcggtcgcaggcgctatttgccggacatcgaagcgtcgaattacaacctccgctcgttcgcggagcggacggcgatgaatacgccgatccagggcacggccgccgacatcatcaagaccgcgatggtgcgtctgacgcggcggatgcgcgacgtcggactgaagagccgcatgctgctgcaggttcacgacgagctcgtgtttgaagtgccgccggacgagctcgacgcgatgcgggagcttgtgacggacgtcatggagtcggcggtcccgctcgacgtgccgctgaaggtcgacgtcagctggggcgccgactggtacgcggcgaagtgagggaagcgggatcc

SEQ ID NO: 1136 - DNA, 2792 bp, Artificial Sequence
  Description of Artificial Sequence: Synthetic Caldibacillus cellulovorans CompA.2 DNA Polymerase N826Q
atgaaatacctgctgccgaccgctgctgctggtctgctgctcctcgctgcccagccggcgatggccatgggcaaactgattctggtcgacggaaacagcgtcgccaaccgggcgttttacgccgtccggctgctcagcacgcgcggcggcctgcacacaaacgcggtgtacggattcgccaacatgttgctcaagctgatcgaggaggaacggccgacgcattttctcgtcgcgttcgacgcgggcaaggcgacgttccgtcatcgcgaatacgaggcctacaaggcgggtcgcctgcagacgccgcccgagctgtccgagcagtttccgtacatccgggagctcgtccgggcgttcggcgtcgcgtccggcgagctggaggaatacgaggcggacgacatgatcggtacgctggcgaaacgggcggaggccgagggcgtcgacacgctggtcgtcaccggcgaccgcgatttgctccagctcgtatcggaccgcgtgaccgtcgcgctgacgcgcaagggcatcacggaaacggagcggtacgacccggcgcgcatccgcgaggaatacggcttcgatcccgaccgcatccgcgacctcaaagggctgatgggcgacgcgtctgacaatcttcccggcgttcccggcgtcggtgagaaaaccgcactgaaactgctcaggcagtacggttcgctggagagcgtcctggaacacgcgtcggaaatcgccggaaagctcggtgaaaatctgcgggcgcacgccgacgccgcccgattgagcaagcggctggcgacgatcgactgcgcggtaccgttgcagtcgggatgggactggctgcgcctcggcgaaccggaccgcgccgcgctcgcctcgctgttgcggcagctcgaattcaagtcgctgttgaaacggctcggactcgacggcacgtccgccgatgccgacgtcgacggcgtccgttcctccgcgcggccggcggacgagaaacggccgagggccgtcgccgtcgctgaggagggcgtcgacgtccgctgtccggatcgcccggaagaagtcgaagaagcgctgtcgcggctggaagccgcccagtcggtcgtcgtcgaggtgacgggcgacaacccgcacgacggcgaagtgcgcggcgtcgcatggtgggacggacatacggcgtatttcattccgtttgaacggctggtgcagtccgacatgcggccgctggccgactggctcgccgacgcgcgtcggccgaagcgtacgcacgactcccatcgcgctgaagtggcgctgttctggcacggccttgcgtttcgcggcacgtcgttctgcacgcatatcgccgcctatttgctcgaccccacggaatcgcgccatacgctggcggacctgtcgcgccgctacggtctgccgccggtaccggaagccgaggacgtttacggcaagggcgcgaagttcaaggttcccgatcgcgacacgctggcgcgttacgtcggccgcaaggccgccctagtcgcgcggctcgttccgctgctcgaggcggatttggcggcctgcggcatgcgttcgcttttttacgacctggagctgccgctttcatccgaactcgccgtcatggagacggtcggcgtccgcgtcgacgcggcggcgctcgccgcctacggcgaggaattgcgcgaggcggcggcgaaagtcgagcgggagatttacgagctggccgggacgacgttcaacatcggatcgacgaaacagctcggcgaaattttgttcgataagctggggctgcccgtcgtcaagaaaacgaaaaccggctattccaccgacgcagacgtgctggaggaactggcgccgtaccatccgatcgtcgaaaagattttgcattaccgccaactgacgaaattgcagtcgacctacatcgaggggcttttgaaagaaatccgtccgcaaaccggtaaaatccatacgtattatcagcagacgatcgcggcgacggggcggctgagcagtcagtttcccaatcttcagaacattccgatccgtctcgaagaggggcggaaaatccgcaaggcgttcgttccgtcagaaccgggatggctgatgctcgccgccgactattcgcagatcgaactgcgcgtgctcgcgcacgtttccggcgacgaacggctgaaggaagcgtttcggacaggcatggacatccacacgaagaccgcgatggacgtgttcggcgtttccgaagaccgcgtcgacgcgcgcatgcggcggcaggcgaaggcggtcaatttcggcatcatctacggcatcagcgatttcggactggcgcaaaacctgaacatttcccgcaaggaggcggcggagttcatccggcaatatttcgccgtcttttcgggcgtcaaggcgtaccgcgagcggatcgtcgagcaggcgcgccgcgacggttacgtgacgaccctgctcggtcgcaggcgctatttgccggacatccaagcgtcgaattacaacctccgctcgttcgcggagcggacggcgatgaatacgccgatccagggcacggccgccgacatcatcaagaccgcgatggtgcgtctgacgcggcggatgcgcgacgtcggactgaagagccgcatgctgctgcaggttcacgacgagctcgtgtttgaagtgccgccggacgagctcgacgcgatgcgggagcttgtgacggacgtcatggagtcggcggtcccgctcgacgtgccgctgaaggtcgacgtcagctggggcgccgactggtacgcggcgaagtgagggaagcgggatcc

SEQ ID NO: 1137 - DNA, 2792 bp, Artificial Sequence
  Description of Artificial Sequence: Synthetic Caldibacillus cellulovorans CompA.2 DNA Polymerase N826G
atgaaatacctgctgccgaccgctgctgctggtctgctgctcctcgctgcccagccggcgatggccatgggcaaactgattctggtcgacggaaacagcgtcgccaaccgggcgttttacgccgtccggctgctcagcacgcgcggcggcctgcacacaaacgcggtgtacggattcgccaacatgttgctcaagctgatcgaggaggaacggccgacgcattttctcgtcgcgttcgacgcgggcaaggcgacgttccgtcatcgcgaatacgaggcctacaaggcgggtcgcctgcagacgccgcccgagctgtccgagcagtttccgtacatccgggagctcgtccgggcgttcggcgtcgcgtccggcgagctggaggaatacgaggcggacgacatgatcggtacgctggcgaaacgggcggaggccgagggcgtcgacacgctggtcgtcaccggcgaccgcgatttgctccagctcgtatcggaccgcgtgaccgtcgcgctgacgcgcaagggcatcacggaaacggagcggtacgacccggcgcgcatccgcgaggaatacggcttcgatcccgaccgcatccgcgacctcaaagggctgatgggcgacgcgtctgacaatcttcccggcgttcccggcgtcggtgagaaaaccgcactgaaactgctcaggcagtacggttcgctggagagcgtcctggaacacgcgtcggaaatcgccggaaagctcggtgaaaatctgcgggcgcacgccgacgccgcccgattgagcaagcggctggcgacgatcgactgcgcggtaccgttgcagtcgggatgggactggctgcgcctcggcgaaccggaccgcgccgcgctcgcctcgctgttgcggcagctcgaattcaagtcgctgttgaaacggctcggactcgacggcacgtccgccgatgccgacgtcgacggcgtccgttcctccgcgcggccggcggacgagaaacggccgagggccgtcgccgtcgctgaggagggcgtcgacgtccgctgtccggatcgcccggaagaagtcgaagaagcgctgtcgcggctggaagccgcccagtcggtcgtcgtcgaggtgacgggcgacaacccgcacgacggcgaagtgcgcggcgtcgcatggtgggacggacatacggcgtatttcattccgtttgaacggctggtgcagtccgacatgcggccgctggccgactggctcgccgacgcgcgtcggccgaagcgtacgcacgactcccatcgcgctgaagtggcgctgttctggcacggccttgcgtttcgcggcacgtcgttctgcacgcatatcgccgcctatttgctcgaccccacggaatcgcgccatacgctggcggacctgtcgcgccgctacggtctgccgccggtaccggaagccgaggacgtttacggcaagggcgcgaagttcaaggttcccgatcgcgacacgctggcgcgttacgtcggccgcaaggccgccctagtcgcgcggctcgttccgctgctcgaggcggatttggcggcctgcggcatgcgttcgcttttttacgacctggagctgccgctttcatccgaactcgccgtcatggagacggtcggcgtccgcgtcgacgcggcggcgctcgccgcctacggcgaggaattgcgcgaggcggcggcgaaagtcgagcgggagatttacgagctggccgggacgacgttcaacatcggatcgacgaaacagctcggcgaaattttgttcgataagctggggctgcccgtcgtcaagaaaacgaaaaccggctattccaccgacgcagacgtgctggaggaactggcgccgtaccatccgatcgtcgaaaagattttgcattaccgccaactgacgaaattgcagtcgacctacatcgaggggcttttgaaagaaatccgtccgcaaaccggtaaaatccatacgtattatcagcagacgatcgcggcgacggggcggctgagcagtcagtttcccaatcttcagaacattccgatccgtctcgaagaggggcggaaaatccgcaaggcgttcgttccgtcagaaccgggatggctgatgctcgccgccgactattcgcagatcgaactgcgcgtgctcgcgcacgtttccggcgacgaacggctgaaggaagcgtttcggacaggcatggacatccacacgaagaccgcgatggacgtgttcggcgtttccgaagaccgcgtcgacgcgcgcatgcggcggcaggcgaaggcggtcaatttcggcatcatctacggcatcagcgatttcggactggcgcaaaacctgaacatttcccgcaaggaggcggcggagttcatccggcaatatttcgccgtcttttcgggcgtcaaggcgtaccgcgagcggatcgtcgagcaggcgcgccgcgacggttacgtgacgaccctgctcggtcgcaggcgctatttgccggacatcggtgcgtcgaattacaacctccgctcgttcgcggagcggacggcgatgaatacgccgatccagggcacggccgccgacatcatcaagaccgcgatggtgcgtctgacgcggcggatgcgcgacgtcggactgaagagccgcatgctgctgcaggttcacgacgagctcgtgtttgaagtgccgccggacgagctcgacgcgatgcgggagcttgtgacggacgtcatggagtcggcggtcccgctcgacgtgccgctgaaggtcgacgtcagctggggcgccgactggtacgcggcgaagtgagggaagcgggatcc

SEQ ID NO: 1138 - DNA, 2792 bp, Artificial Sequence
  Description of Artificial Sequence: Synthetic Caldibacillus cellulovorans CompA.2 DNA Polymerase N826H
atgaaatacctgctgccgaccgctgctgctggtctgctgctcctcgctgcccagccggcgatggccatgggcaaactgattctggtcgacggaaacagcgtcgccaaccgggcgttttacgccgtccggctgctcagcacgcgcggcggcctgcacacaaacgcggtgtacggattcgccaacatgttgctcaagctgatcgaggaggaacggccgacgcattttctcgtcgcgttcgacgcgggcaaggcgacgttccgtcatcgcgaatacgaggcctacaaggcgggtcgcctgcagacgccgcccgagctgtccgagcagtttccgtacatccgggagctcgtccgggcgttcggcgtcgcgtccggcgagctggaggaatacgaggcggacgacatgatcggtacgctggcgaaacgggcggaggccgagggcgtcgacacgctggtcgtcaccggcgaccgcgatttgctccagctcgtatcggaccgcgtgaccgtcgcgctgacgcgcaagggcatcacggaaacggagcggtacgacccggcgcgcatccgcgaggaatacggcttcgatcccgaccgcatccgcgacctcaaagggctgatgggcgacgcgtctgacaatcttcccggcgttcccggcgtcggtgagaaaaccgcactgaaactgctcaggcagtacggttcgctggagagcgtcctggaacacgcgtcggaaatcgccggaaagctcggtgaaaatctgcgggcgcacgccgacgccgcccgattgagcaagcggctggcgacgatcgactgcgcggtaccgttgcagtcgggatgggactggctgcgcctcggcgaaccggaccgcgccgcgctcgcctcgctgttgcggcagctcgaattcaagtcgctgttgaaacggctcggactcgacggcacgtccgccgatgccgacgtcgacggcgtccgttcctccgcgcggccggcggacgagaaacggccgagggccgtcgccgtcgctgaggagggcgtcgacgtccgctgtccggatcgcccggaagaagtcgaagaagcgctgtcgcggctggaagccgcccagtcggtcgtcgtcgaggtgacgggcgacaacccgcacgacggcgaagtgcgcggcgtcgcatggtgggacggacatacggcgtatttcattccgtttgaacggctggtgcagtccgacatgcggccgctggccgactggctcgccgacgcgcgtcggccgaagcgtacgcacgactcccatcgcgctgaagtggcgctgttctggcacggccttgcgtttcgcggcacgtcgttctgcacgcatatcgccgcctatttgctcgaccccacggaatcgcgccatacgctggcggacctgtcgcgccgctacggtctgccgccggtaccggaagccgaggacgtttacggcaagggcgcgaagttcaaggttcccgatcgcgacacgctggcgcgttacgtcggccgcaaggccgccctagtcgcgcggctcgttccgctgctcgaggcggatttggcggcctgcggcatgcgttcgcttttttacgacctggagctgccgctttcatccgaactcgccgtcatggagacggtcggcgtccgcgtcgacgcggcggcgctcgccgcctacggcgaggaattgcgcgaggcggcggcgaaagtcgagcgggagatttacgagctggccgggacgacgttcaacatcggatcgacgaaacagctcggcgaaattttgttcgataagctggggctgcccgtcgtcaagaaaacgaaaaccggctattccaccgacgcagacgtgctggaggaactggcgccgtaccatccgatcgtcgaaaagattttgcattaccgccaactgacgaaattgcagtcgacctacatcgaggggcttttgaaagaaatccgtccgcaaaccggtaaaatccatacgtattatcagcagacgatcgcggcgacggggcggctgagcagtcagtttcccaatcttcagaacattccgatccgtctcgaagaggggcggaaaatccgcaaggcgttcgttccgtcagaaccgggatggctgatgctcgccgccgactattcgcagatcgaactgcgcgtgctcgcgcacgtttccggcgacgaacggctgaaggaagcgtttcggacaggcatggacatccacacgaagaccgcgatggacgtgttcggcgtttccgaagaccgcgtcgacgcgcgcatgcggcggcaggcgaaggcggtcaatttcggcatcatctacggcatcagcgatttcggactggcgcaaaacctgaacatttcccgcaaggaggcggcggagttcatccggcaatatttcgccgtcttttcgggcgtcaaggcgtaccgcgagcggatcgtcgagcaggcgcgccgcgacggttacgtgacgaccctgctcggtcgcaggcgctatttgccggacatccatgcgtcgaattacaacctccgctcgttcgcggagcggacggcgatgaatacgccgatccagggcacggccgccgacatcatcaagaccgcgatggtgcgtctgacgcggcggatgcgcgacgtcggactgaagagccgcatgctgctgcaggttcacgacgagctcgtgtttgaagtgccgccggacgagctcgacgcgatgcgggagcttgtgacggacgtcatggagtcggcggtcccgctcgacgtgccgctgaaggtcgacgtcagctggggcgccgactggtacgcggcgaagtgagggaagcgggatcc

SEQ ID NO: 1139 - DNA, 2792 bp, Artificial Sequence
  Description of Artificial Sequence: Synthetic Caldibacillus cellulovorans CompA.2 DNA Polymerase N826I
atgaaatacctgctgccgaccgctgctgctggtctgctgctcctcgctgcccagccggcgatggccatgggcaaactgattctggtcgacggaaacagcgtcgccaaccgggcgttttacgccgtccggctgctcagcacgcgcggcggcctgcacacaaacgcggtgtacggattcgccaacatgttgctcaagctgatcgaggaggaacggccgacgcattttctcgtcgcgttcgacgcgggcaaggcgacgttccgtcatcgcgaatacgaggcctacaaggcgggtcgcctgcagacgccgcccgagctgtccgagcagtttccgtacatccgggagctcgtccgggcgttcggcgtcgcgtccggcgagctggaggaatacgaggcggacgacatgatcggtacgctggcgaaacgggcggaggccgagggcgtcgacacgctggtcgtcaccggcgaccgcgatttgctccagctcgtatcggaccgcgtgaccgtcgcgctgacgcgcaagggcatcacggaaacggagcggtacgacccggcgcgcatccgcgaggaatacggcttcgatcccgaccgcatccgcgacctcaaagggctgatgggcgacgcgtctgacaatcttcccggcgttcccggcgtcggtgagaaaaccgcactgaaactgctcaggcagtacggttcgctggagagcgtcctggaacacgcgtcggaaatcgccggaaagctcggtgaaaatctgcgggcgcacgccgacgccgcccgattgagcaagcggctggcgacgatcgactgcgcggtaccgttgcagtcgggatgggactggctgcgcctcggcgaaccggaccgcgccgcgctcgcctcgctgttgcggcagctcgaattcaagtcgctgttgaaacggctcggactcgacggcacgtccgccgatgccgacgtcgacggcgtccgttcctccgcgcggccggcggacgagaaacggccgagggccgtcgccgtcgctgaggagggcgtcgacgtccgctgtccggatcgcccggaagaagtcgaagaagcgctgtcgcggctggaagccgcccagtcggtcgtcgtcgaggtgacgggcgacaacccgcacgacggcgaagtgcgcggcgtcgcatggtgggacggacatacggcgtatttcattccgtttgaacggctggtgcagtccgacatgcggccgctggccgactggctcgccgacgcgcgtcggccgaagcgtacgcacgactcccatcgcgctgaagtggcgctgttctggcacggccttgcgtttcgcggcacgtcgttctgcacgcatatcgccgcctatttgctcgaccccacggaatcgcgccatacgctggcggacctgtcgcgccgctacggtctgccgccggtaccggaagccgaggacgtttacggcaagggcgcgaagttcaaggttcccgatcgcgacacgctggcgcgttacgtcggccgcaaggccgccctagtcgcgcggctcgttccgctgctcgaggcggatttggcggcctgcggcatgcgttcgcttttttacgacctggagctgccgctttcatccgaactcgccgtcatggagacggtcggcgtccgcgtcgacgcggcggcgctcgccgcctacggcgaggaattgcgcgaggcggcggcgaaagtcgagcgggagatttacgagctggccgggacgacgttcaacatcggatcgacgaaacagctcggcgaaattttgttcgataagctggggctgcccgtcgtcaagaaaacgaaaaccggctattccaccgacgcagacgtgctggaggaactggcgccgtaccatccgatcgtcgaaaagattttgcattaccgccaactgacgaaattgcagtcgacctacatcgaggggcttttgaaagaaatccgtccgcaaaccggtaaaatccatacgtattatcagcagacgatcgcggcgacggggcggctgagcagtcagtttcccaatcttcagaacattccgatccgtctcgaagaggggcggaaaatccgcaaggcgttcgttccgtcagaaccgggatggctgatgctcgccgccgactattcgcagatcgaactgcgcgtgctcgcgcacgtttccggcgacgaacggctgaaggaagcgtttcggacaggcatggacatccacacgaagaccgcgatggacgtgttcggcgtttccgaagaccgcgtcgacgcgcgcatgcggcggcaggcgaaggcggtcaatttcggcatcatctacggcatcagcgatttcggactggcgcaaaacctgaacatttcccgcaaggaggcggcggagttcatccggcaatatttcgccgtcttttcgggcgtcaaggcgtaccgcgagcggatcgtcgagcaggcgcgccgcgacggttacgtgacgaccctgctcggtcgcaggcgctatttgccggacatcattgcgtcgaattacaacctccgctcgttcgcggagcggacggcgatgaatacgccgatccagggcacggccgccgacatcatcaagaccgcgatggtgcgtctgacgcggcggatgcgcgacgtcggactgaagagccgcatgctgctgcaggttcacgacgagctcgtgtttgaagtgccgccggacgagctcgacgcgatgcgggagcttgtgacggacgtcatggagtcggcggtcccgctcgacgtgccgctgaaggtcgacgtcagctggggcgccgactggtacgcggcgaagtgagggaagcgggatcc

SEQ ID NO: 1140 - DNA, 2792 bp, Artificial Sequence
  Description of Artificial Sequence: Synthetic Caldibacillus cellulovorans CompA.2 DNA Polymerase N826L
atgaaatacctgctgccgaccgctgctgctggtctgctgctcctcgctgcccagccggcgatggccatgggcaaactgattctggtcgacggaaacagcgtcgccaaccgggcgttttacgccgtccggctgctcagcacgcgcggcggcctgcacacaaacgcggtgtacggattcgccaacatgttgctcaagctgatcgaggaggaacggccgacgcattttctcgtcgcgttcgacgcgggcaaggcgacgttccgtcatcgcgaatacgaggcctacaaggcgggtcgcctgcagacgccgcccgagctgtccgagcagtttccgtacatccgggagctcgtccgggcgttcggcgtcgcgtccggcgagctggaggaatacgaggcggacgacatgatcggtacgctggcgaaacgggcggaggccgagggcgtcgacacgctggtcgtcaccggcgaccgcgatttgctccagctcgtatcggaccgcgtgaccgtcgcgctgacgcgcaagggcatcacggaaacggagcggtacgacccggcgcgcatccgcgaggaatacggcttcgatcccgaccgcatccgcgacctcaaagggctgatgggcgacgcgtctgacaatcttcccggcgttcccggcgtcggtgagaaaaccgcactgaaactgctcaggcagtacggttcgctggagagcgtcctggaacacgcgtcggaaatcgccggaaagctcggtgaaaatctgcgggcgcacgccgacgccgcccgattgagcaagcggctggcgacgatcgactgcgcggtaccgttgcagtcgggatgggactggctgcgcctcggcgaaccggaccgcgccgcgctcgcctcgctgttgcggcagctcgaattcaagtcgctgttgaaacggctcggactcgacggcacgtccgccgatgccgacgtcgacggcgtccgttcctccgcgcggccggcggacgagaaacggccgagggccgtcgccgtcgctgaggagggcgtcgacgtccgctgtccggatcgcccggaagaagtcgaagaagcgctgtcgcggctggaagccgcccagtcggtcgtcgtcgaggtgacgggcgacaacccgcacgacggcgaagtgcgcggcgtcgcatggtgggacggacatacggcgtatttcattccgtttgaacggctggtgcagtccgacatgcggccgctggccgactggctcgccgacgcgcgtcggccgaagcgtacgcacgactcccatcgcgctgaagtggcgctgttctggcacggccttgcgtttcgcggcacgtcgttctgcacgcatatcgccgcctatttgctcgaccccacggaatcgcgccatacgctggcggacctgtcgcgccgctacggtctgccgccggtaccggaagccgaggacgtttacggcaagggcgcgaagttcaaggttcccgatcgcgacacgctggcgcgttacgtcggccgcaaggccgccctagtcgcgcggctcgttccgctgctcgaggcggatttggcggcctgcggcatgcgttcgcttttttacgacctggagctgccgctttcatccgaactcgccgtcatggagacggtcggcgtccgcgtcgacgcggcggcgctcgccgcctacggcgaggaattgcgcgaggcggcggcgaaagtcgagcgggagatttacgagctggccgggacgacgttcaacatcggatcgacgaaacagctcggcgaaattttgttcgataagctggggctgcccgtcgtcaagaaaacgaaaaccggctattccaccgacgcagacgtgctggaggaactggcgccgtaccatccgatcgtcgaaaagattttgcattaccgccaactgacgaaattgcagtcgacctacatcgaggggcttttgaaagaaatccgtccgcaaaccggtaaaatccatacgtattatcagcagacgatcgcggcgacggggcggctgagcagtcagtttcccaatcttcagaacattccgatccgtctcgaagaggggcggaaaatccgcaaggcgttcgttccgtcagaaccgggatggctgatgctcgccgccgactattcgcagatcgaactgcgcgtgctcgcgcacgtttccggcgacgaacggctgaaggaagcgtttcggacaggcatggacatccacacgaagaccgcgatggacgtgttcggcgtttccgaagaccgcgtcgacgcgcgcatgcggcggcaggcgaaggcggtcaatttcggcatcatctacggcatcagcgatttcggactggcgcaaaacctgaacatttcccgcaaggaggcggcggagttcatccggcaatatttcgccgtcttttcgggcgtcaaggcgtaccgcgagcggatcgtcgagcaggcgcgccgcgacggttacgtgacgaccctgctcggtcgcaggcgctatttgccggacatccttgcgtcgaattacaacctccgctcgttcgcggagcggacggcgatgaatacgccgatccagggcacggccgccgacatcatcaagaccgcgatggtgcgtctgacgcggcggatgcgcgacgtcggactgaagagccgcatgctgctgcaggttcacgacgagctcgtgtttgaagtgccgccggacgagctcgacgcgatgcgggagcttgtgacggacgtcatggagtcggcggtcccgctcgacgtgccgctgaaggtcgacgtcagctggggcgccgactggtacgcggcgaagtgagggaagcgggatcc

SEQ ID NO: 1141 - DNA, 2792 bp, Artificial Sequence
  Description of Artificial Sequence: Synthetic Caldibacillus cellulovorans CompA.2 DNA Polymerase N826K
atgaaatacctgctgccgaccgctgctgctggtctgctgctcctcgctgcccagccggcgatggccatgggcaaactgattctggtcgacggaaacagcgtcgccaaccgggcgttttacgccgtccggctgctcagcacgcgcggcggcctgcacacaaacgcggtgtacggattcgccaacatgttgctcaagctgatcgaggaggaacggccgacgcattttctcgtcgcgttcgacgcgggcaaggcgacgttccgtcatcgcgaatacgaggcctacaaggcgggtcgcctgcagacgccgcccgagctgtccgagcagtttccgtacatccgggagctcgtccgggcgttcggcgtcgcgtccggcgagctggaggaatacgaggcggacgacatgatcggtacgctggcgaaacgggcggaggccgagggcgtcgacacgctggtcgtcaccggcgaccgcgatttgctccagctcgtatcggaccgcgtgaccgtcgcgctgacgcgcaagggcatcacggaaacggagcggtacgacccggcgcgcatccgcgaggaatacggcttcgatcccgaccgcatccgcgacctcaaagggctgatgggcgacgcgtctgacaatcttcccggcgttcccggcgtcggtgagaaaaccgcactgaaactgctcaggcagtacggttcgctggagagcgtcctggaacacgcgtcggaaatcgccggaaagctcggtgaaaatctgcgggcgcacgccgacgccgcccgattgagcaagcggctggcgacgatcgactgcgcggtaccgttgcagtcgggatgggactggctgcgcctcggcgaaccggaccgcgccgcgctcgcctcgctgttgcggcagctcgaattcaagtcgctgttgaaacggctcggactcgacggcacgtccgccgatgccgacgtcgacggcgtccgttcctccgcgcggccggcggacgagaaacggccgagggccgtcgccgtcgctgaggagggcgtcgacgtccgctgtccggatcgcccggaagaagtcgaagaagcgctgtcgcggctggaagccgcccagtcggtcgtcgtcgaggtgacgggcgacaacccgcacgacggcgaagtgcgcggcgtcgcatggtgggacggacatacggcgtatttcattccgtttgaacggctggtgcagtccgacatgcggccgctggccgactggctcgccgacgcgcgtcggccgaagcgtacgcacgactcccatcgcgctgaagtggcgctgttctggcacggccttgcgtttcgcggcacgtcgttctgcacgcatatcgccgcctatttgctcgaccccacggaatcgcgccatacgctggcggacctgtcgcgccgctacggtctgccgccggtaccggaagccgaggacgtttacggcaagggcgcgaagttcaaggttcccgatcgcgacacgctggcgcgttacgtcggccgcaaggccgccctagtcgcgcggctcgttccgctgctcgaggcggatttggcggcctgcggcatgcgttcgcttttttacgacctggagctgccgctttcatccgaactcgccgtcatggagacggtcggcgtccgcgtcgacgcggcggcgctcgccgcctacggcgaggaattgcgcgaggcggcggcgaaagtcgagcgggagatttacgagctggccgggacgacgttcaacatcggatcgacgaaacagctcggcgaaattttgttcgataagctggggctgcccgtcgtcaagaaaacgaaaaccggctattccaccgacgcagacgtgctggaggaactggcgccgtaccatccgatcgtcgaaaagattttgcattaccgccaactgacgaaattgcagtcgacctacatcgaggggcttttgaaagaaatccgtccgcaaaccggtaaaatccatacgtattatcagcagacgatcgcggcgacggggcggctgagcagtcagtttcccaatcttcagaacattccgatccgtctcgaagaggggcggaaaatccgcaaggcgttcgttccgtcagaaccgggatggctgatgctcgccgccgactattcgcagatcgaactgcgcgtgctcgcgcacgtttccggcgacgaacggctgaaggaagcgtttcggacaggcatggacatccacacgaagaccgcgatggacgtgttcggcgtttccgaagaccgcgtcgacgcgcgcatgcggcggcaggcgaaggcggtcaatttcggcatcatctacggcatcagcgatttcggactggcgcaaaacctgaacatttcccgcaaggaggcggcggagttcatccggcaatatttcgccgtcttttcgggcgtcaaggcgtaccgcgagcggatcgtcgagcaggcgcgccgcgacggttacgtgacgaccctgctcggtcgcaggcgctatttgccggacatcaaagcgtcgaattacaacctccgctcgttcgcggagcggacggcgatgaatacgccgatccagggcacggccgccgacatcatcaagaccgcgatggtgcgtctgacgcggcggatgcgcgacgtcggactgaagagccgcatgctgctgcaggttcacgacgagctcgtgtttgaagtgccgccggacgagctcgacgcgatgcgggagcttgtgacggacgtcatggagtcggcggtcccgctcgacgtgccgctgaaggtcgacgtcagctggggcgccgactggtacgcggcgaagtgagggaagcgggatcc

SEQ ID NO: 1142 - DNA, 2792 bp, Artificial Sequence
  Description of Artificial Sequence: Synthetic Caldibacillus cellulovorans CompA.2 DNA Polymerase N826M
atgaaatacctgctgccgaccgctgctgctggtctgctgctcctcgctgcccagccggcgatggccatgggcaaactgattctggtcgacggaaacagcgtcgccaaccgggcgttttacgccgtccggctgctcagcacgcgcggcggcctgcacacaaacgcggtgtacggattcgccaacatgttgctcaagctgatcgaggaggaacggccgacgcattttctcgtcgcgttcgacgcgggcaaggcgacgttccgtcatcgcgaatacgaggcctacaaggcgggtcgcctgcagacgccgcccgagctgtccgagcagtttccgtacatccgggagctcgtccgggcgttcggcgtcgcgtccggcgagctggaggaatacgaggcggacgacatgatcggtacgctggcgaaacgggcggaggccgagggcgtcgacacgctggtcgtcaccggcgaccgcgatttgctccagctcgtatcggaccgcgtgaccgtcgcgctgacgcgcaagggcatcacggaaacggagcggtacgacccggcgcgcatccgcgaggaatacggcttcgatcccgaccgcatccgcgacctcaaagggctgatgggcgacgcgtctgacaatcttcccggcgttcccggcgtcggtgagaaaaccgcactgaaactgctcaggcagtacggttcgctggagagcgtcctggaacacgcgtcggaaatcgccggaaagctcggtgaaaatctgcgggcgcacgccgacgccgcccgattgagcaagcggctggcgacgatcgactgcgcggtaccgttgcagtcgggatgggactggctgcgcctcggcgaaccggaccgcgccgcgctcgcctcgctgttgcggcagctcgaattcaagtcgctgttgaaacggctcggactcgacggcacgtccgccgatgccgacgtcgacggcgtccgttcctccgcgcggccggcggacgagaaacggccgagggccgtcgccgtcgctgaggagggcgtcgacgtccgctgtccggatcgcccggaagaagtcgaagaagcgctgtcgcggctggaagccgcccagtcggtcgtcgtcgaggtgacgggcgacaacccgcacgacggcgaagtgcgcggcgtcgcatggtgggacggacatacggcgtatttcattccgtttgaacggctggtgcagtccgacatgcggccgctggccgactggctcgccgacgcgcgtcggccgaagcgtacgcacgactcccatcgcgctgaagtggcgctgttctggcacggccttgcgtttcgcggcacgtcgttctgcacgcatatcgccgcctatttgctcgaccccacggaatcgcgccatacgctggcggacctgtcgcgccgctacggtctgccgccggtaccggaagccgaggacgtttacggcaagggcgcgaagttcaaggttcccgatcgcgacacgctggcgcgttacgtcggccgcaaggccgccctagtcgcgcggctcgttccgctgctcgaggcggatttggcggcctgcggcatgcgttcgcttttttacgacctggagctgccgctttcatccgaactcgccgtcatggagacggtcggcgtccgcgtcgacgcggcggcgctcgccgcctacggcgaggaattgcgcgaggcggcggcgaaagtcgagcgggagatttacgagctggccgggacgacgttcaacatcggatcgacgaaacagctcggcgaaattttgttcgataagctggggctgcccgtcgtcaagaaaacgaaaaccggctattccaccgacgcagacgtgctggaggaactggcgccgtaccatccgatcgtcgaaaagattttgcattaccgccaactgacgaaattgcagtcgacctacatcgaggggcttttgaaagaaatccgtccgcaaaccggtaaaatccatacgtattatcagcagacgatcgcggcgacggggcggctgagcagtcagtttcccaatcttcagaacattccgatccgtctcgaagaggggcggaaaatccgcaaggcgttcgttccgtcagaaccgggatggctgatgctcgccgccgactattcgcagatcgaactgcgcgtgctcgcgcacgtttccggcgacgaacggctgaaggaagcgtttcggacaggcatggacatccacacgaagaccgcgatggacgtgttcggcgtttccgaagaccgcgtcgacgcgcgcatgcggcggcaggcgaaggcggtcaatttcggcatcatctacggcatcagcgatttcggactggcgcaaaacctgaacatttcccgcaaggaggcggcggagttcatccggcaatatttcgccgtcttttcgggcgtcaaggcgtaccgcgagcggatcgtcgagcaggcgcgccgcgacggttacgtgacgaccctgctcggtcgcaggcgctatttgccggacatcatggcgtcgaattacaacctccgctcgttcgcggagcggacggcgatgaatacgccgatccagggcacggccgccgacatcatcaagaccgcgatggtgcgtctgacgcggcggatgcgcgacgtcggactgaagagccgcatgctgctgcaggttcacgacgagctcgtgtttgaagtgccgccggacgagctcgacgcgatgcgggagcttgtgacggacgtcatggagtcggcggtcccgctcgacgtgccgctgaaggtcgacgtcagctggggcgccgactggtacgcggcgaagtgagggaagcgggatcc

SEQ ID NO: 1143 - DNA, 2792 bp, Artificial Sequence
  Description of Artificial Sequence: Synthetic Caldibacillus cellulovorans CompA.2 DNA Polymerase N826F
atgaaatacctgctgccgaccgctgctgctggtctgctgctcctcgctgcccagccggcgatggccatgggcaaactgattctggtcgacggaaacagcgtcgccaaccgggcgttttacgccgtccggctgctcagcacgcgcggcggcctgcacacaaacgcggtgtacggattcgccaacatgttgctcaagctgatcgaggaggaacggccgacgcattttctcgtcgcgttcgacgcgggcaaggcgacgttccgtcatcgcgaatacgaggcctacaaggcgggtcgcctgcagacgccgcccgagctgtccgagcagtttccgtacatccgggagctcgtccgggcgttcggcgtcgcgtccggcgagctggaggaatacgaggcggacgacatgatcggtacgctggcgaaacgggcggaggccgagggcgtcgacacgctggtcgtcaccggcgaccgcgatttgctccagctcgtatcggaccgcgtgaccgtcgcgctgacgcgcaagggcatcacggaaacggagcggtacgacccggcgcgcatccgcgaggaatacggcttcgatcccgaccgcatccgcgacctcaaagggctgatgggcgacgcgtctgacaatcttcccggcgttcccggcgtcggtgagaaaaccgcactgaaactgctcaggcagtacggttcgctggagagcgtcctggaacacgcgtcggaaatcgccggaaagctcggtgaaaatctgcgggcgcacgccgacgccgcccgattgagcaagcggctggcgacgatcgactgcgcggtaccgttgcagtcgggatgggactggctgcgcctcggcgaaccggaccgcgccgcgctcgcctcgctgttgcggcagctcgaattcaagtcgctgttgaaacggctcggactcgacggcacgtccgccgatgccgacgtcgacggcgtccgttcctccgcgcggccggcggacgagaaacggccgagggccgtcgccgtcgctgaggagggcgtcgacgtccgctgtccggatcgcccggaagaagtcgaagaagcgctgtcgcggctggaagccgcccagtcggtcgtcgtcgaggtgacgggcgacaacccgcacgacggcgaagtgcgcggcgtcgcatggtgggacggacatacggcgtatttcattccgtttgaacggctggtgcagtccgacatgcggccgctggccgactggctcgccgacgcgcgtcggccgaagcgtacgcacgactcccatcgcgctgaagtggcgctgttctggcacggccttgcgtttcgcggcacgtcgttctgcacgcatatcgccgcctatttgctcgaccccacggaatcgcgccatacgctggcggacctgtcgcgccgctacggtctgccgccggtaccggaagccgaggacgtttacggcaagggcgcgaagttcaaggttcccgatcgcgacacgctggcgcgttacgtcggccgcaaggccgccctagtcgcgcggctcgttccgctgctcgaggcggatttggcggcctgcggcatgcgttcgcttttttacgacctggagctgccgctttcatccgaactcgccgtcatggagacggtcggcgtccgcgtcgacgcggcggcgctcgccgcctacggcgaggaattgcgcgaggcggcggcgaaagtcgagcgggagatttacgagctggccgggacgacgttcaacatcggatcgacgaaacagctcggcgaaattttgttcgataagctggggctgcccgtcgtcaagaaaacgaaaaccggctattccaccgacgcagacgtgctggaggaactggcgccgtaccatccgatcgtcgaaaagattttgcattaccgccaactgacgaaattgcagtcgacctacatcgaggggcttttgaaagaaatccgtccgcaaaccggtaaaatccatacgtattatcagcagacgatcgcggcgacggggcggctgagcagtcagtttcccaatcttcagaacattccgatccgtctcgaagaggggcggaaaatccgcaaggcgttcgttccgtcagaaccgggatggctgatgctcgccgccgactattcgcagatcgaactgcgcgtgctcgcgcacgtttccggcgacgaacggctgaaggaagcgtttcggacaggcatggacatccacacgaagaccgcgatggacgtgttcggcgtttccgaagaccgcgtcgacgcgcgcatgcggcggcaggcgaaggcggtcaatttcggcatcatctacggcatcagcgatttcggactggcgcaaaacctgaacatttcccgcaaggaggcggcggagttcatccggcaatatttcgccgtcttttcgggcgtcaaggcgtaccgcgagcggatcgtcgagcaggcgcgccgcgacggttacgtgacgaccctgctcggtcgcaggcgctatttgccggacatctttgcgtcgaattacaacctccgctcgttcgcggagcggacggcgatgaatacgccgatccagggcacggccgccgacatcatcaagaccgcgatggtgcgtctgacgcggcggatgcgcgacgtcggactgaagagccgcatgctgctgcaggttcacgacgagctcgtgtttgaagtgccgccggacgagctcgacgcgatgcgggagcttgtgacggacgtcatggagtcggcggtcccgctcgacgtgccgctgaaggtcgacgtcagctggggcgccgactggtacgcggcgaagtgagggaagcgggatcc

SEQ ID NO: 1144 - DNA, 2792 bp, Artificial Sequence
  Description of Artificial Sequence: Synthetic Caldibacillus cellulovorans CompA.2 DNA Polymerase N826P
atgaaatacctgctgccgaccgctgctgctggtctgctgctcctcgctgcccagccggcgatggccatgggcaaactgattctggtcgacggaaacagcgtcgccaaccgggcgttttacgccgtccggctgctcagcacgcgcggcggcctgcacacaaacgcggtgtacggattcgccaacatgttgctcaagctgatcgaggaggaacggccgacgcattttctcgtcgcgttcgacgcgggcaaggcgacgttccgtcatcgcgaatacgaggcctacaaggcgggtcgcctgcagacgccgcccgagctgtccgagcagtttccgtacatccgggagctcgtccgggcgttcggcgtcgcgtccggcgagctggaggaatacgaggcggacgacatgatcggtacgctggcgaaacgggcggaggccgagggcgtcgacacgctggtcgtcaccggcgaccgcgatttgctccagctcgtatcggaccgcgtgaccgtcgcgctgacgcgcaagggcatcacggaaacggagcggtacgacccggcgcgcatccgcgaggaatacggcttcgatcccgaccgcatccgcgacctcaaagggctgatgggcgacgcgtctgacaatcttcccggcgttcccggcgtcggtgagaaaaccgcactgaaactgctcaggcagtacggttcgctggagagcgtcctggaacacgcgtcggaaatcgccggaaagctcggtgaaaatctgcgggcgcacgccgacgccgcccgattgagcaagcggctggcgacgatcgactgcgcggtaccgttgcagtcgggatgggactggctgcgcctcggcgaaccggaccgcgccgcgctcgcctcgctgttgcggcagctcgaattcaagtcgctgttgaaacggctcggactcgacggcacgtccgccgatgccgacgtcgacggcgtccgttcctccgcgcggccggcggacgagaaacggccgagggccgtcgccgtcgctgaggagggcgtcgacgtccgctgtccggatcgcccggaagaagtcgaagaagcgctgtcgcggctggaagccgcccagtcggtcgtcgtcgaggtgacgggcgacaacccgcacgacggcgaagtgcgcggcgtcgcatggtgggacggacatacggcgtatttcattccgtttgaacggctggtgcagtccgacatgcggccgctggccgactggctcgccgacgcgcgtcggccgaagcgtacgcacgactcccatcgcgctgaagtggcgctgttctggcacggccttgcgtttcgcggcacgtcgttctgcacgcatatcgccgcctatttgctcgaccccacggaatcgcgccatacgctggcggacctgtcgcgccgctacggtctgccgccggtaccggaagccgaggacgtttacggcaagggcgcgaagttcaaggttcccgatcgcgacacgctggcgcgttacgtcggccgcaaggccgccctagtcgcgcggctcgttccgctgctcgaggcggatttggcggcctgcggcatgcgttcgcttttttacgacctggagctgccgctttcatccgaactcgccgtcatggagacggtcggcgtccgcgtcgacgcggcggcgctcgccgcctacggcgaggaattgcgcgaggcggcggcgaaagtcgagcgggagatttacgagctggccgggacgacgttcaacatcggatcgacgaaacagctcggcgaaattttgttcgataagctggggctgcccgtcgtcaagaaaacgaaaaccggctattccaccgacgcagacgtgctggaggaactggcgccgtaccatccgatcgtcgaaaagattttgcattaccgccaactgacgaaattgcagtcgacctacatcgaggggcttttgaaagaaatccgtccgcaaaccggtaaaatccatacgtattatcagcagacgatcgcggcgacggggcggctgagcagtcagtttcccaatcttcagaacattccgatccgtctcgaagaggggcggaaaatccgcaaggcgttcgttccgtcagaaccgggatggctgatgctcgccgccgactattcgcagatcgaactgcgcgtgctcgcgcacgtttccggcgacgaacggctgaaggaagcgtttcggacaggcatggacatccacacgaagaccgcgatggacgtgttcggcgtttccgaagaccgcgtcgacgcgcgcatgcggcggcaggcgaaggcggtcaatttcggcatcatctacggcatcagcgatttcggactggcgcaaaacctgaacatttcccgcaaggaggcggcggagttcatccggcaatatttcgccgtcttttcgggcgtcaaggcgtaccgcgagcggatcgtcgagcaggcgcgccgcgacggttacgtgacgaccctgctcggtcgcaggcgctatttgccggacatccctgcgtcgaattacaacctccgctcgttcgcggagcggacggcgatgaatacgccgatccagggcacggccgccgacatcatcaagaccgcgatggtgcgtctgacgcggcggatgcgcgacgtcggactgaagagccgcatgctgctgcaggttcacgacgagctcgtgtttgaagtgccgccggacgagctcgacgcgatgcgggagcttgtgacggacgtcatggagtcggcggtcccgctcgacgtgccgctgaaggtcgacgtcagctggggcgccgactggtacgcggcgaagtgagggaagcgggatcc

SEQ ID NO: 1145 - DNA, 2792 bp, Artificial Sequence
  Description of Artificial Sequence: Synthetic Caldibacillus cellulovorans CompA.2 DNA Polymerase N826S
atgaaatacctgctgccgaccgctgctgctggtctgctgctcctcgctgcccagccggcgatggccatgggcaaactgattctggtcgacggaaacagcgtcgccaaccgggcgttttacgccgtccggctgctcagcacgcgcggcggcctgcacacaaacgcggtgtacggattcgccaacatgttgctcaagctgatcgaggaggaacggccgacgcattttctcgtcgcgttcgacgcgggcaaggcgacgttccgtcatcgcgaatacgaggcctacaaggcgggtcgcctgcagacgccgcccgagctgtccgagcagtttccgtacatccgggagctcgtccgggcgttcggcgtcgcgtccggcgagctggaggaatacgaggcggacgacatgatcggtacgctggcgaaacgggcggaggccgagggcgtcgacacgctggtcgtcaccggcgaccgcgatttgctccagctcgtatcggaccgcgtgaccgtcgcgctgacgcgcaagggcatcacggaaacggagcggtacgacccggcgcgcatccgcgaggaatacggcttcgatcccgaccgcatccgcgacctcaaagggctgatgggcgacgcgtctgacaatcttcccggcgttcccggcgtcggtgagaaaaccgcactgaaactgctcaggcagtacggttcgctggagagcgtcctggaacacgcgtcggaaatcgccggaaagctcggtgaaaatctgcgggcgcacgccgacgccgcccgattgagcaagcggctggcgacgatcgactgcgcggtaccgttgcagtcgggatgggactggctgcgcctcggcgaaccggaccgcgccgcgctcgcctcgctgttgcggcagctcgaattcaagtcgctgttgaaacggctcggactcgacggcacgtccgccgatgccgacgtcgacggcgtccgttcctccgcgcggccggcggacgagaaacggccgagggccgtcgccgtcgctgaggagggcgtcgacgtccgctgtccggatcgcccggaagaagtcgaagaagcgctgtcgcggctggaagccgcccagtcggtcgtcgtcgaggtgacgggcgacaacccgcacgacggcgaagtgcgcggcgtcgcatggtgggacggacatacggcgtatttcattccgtttgaacggctggtgcagtccgacatgcggccgctggccgactggctcgccgacgcgcgtcggccgaagcgtacgcacgactcccatcgcgctgaagtggcgctgttctggcacggccttgcgtttcgcggcacgtcgttctgcacgcatatcgccgcctatttgctcgaccccacggaatcgcgccatacgctggcggacctgtcgcgccgctacggtctgccgccggtaccggaagccgaggacgtttacggcaagggcgcgaagttcaaggttcccgatcgcgacacgctggcgcgttacgtcggccgcaaggccgccctagtcgcgcggctcgttccgctgctcgaggcggatttggcggcctgcggcatgcgttcgcttttttacgacctggagctgccgctttcatccgaactcgccgtcatggagacggtcggcgtccgcgtcgacgcggcggcgctcgccgcctacggcgaggaattgcgcgaggcggcggcgaaagtcgagcgggagatttacgagctggccgggacgacgttcaacatcggatcgacgaaacagctcggcgaaattttgttcgataagctggggctgcccgtcgtcaagaaaacgaaaaccggctattccaccgacgcagacgtgctggaggaactggcgccgtaccatccgatcgtcgaaaagattttgcattaccgccaactgacgaaattgcagtcgacctacatcgaggggcttttgaaagaaatccgtccgcaaaccggtaaaatccatacgtattatcagcagacgatcgcggcgacggggcggctgagcagtcagtttcccaatcttcagaacattccgatccgtctcgaagaggggcggaaaatccgcaaggcgttcgttccgtcagaaccgggatggctgatgctcgccgccgactattcgcagatcgaactgcgcgtgctcgcgcacgtttccggcgacgaacggctgaaggaagcgtttcggacaggcatggacatccacacgaagaccgcgatggacgtgttcggcgtttccgaagaccgcgtcgacgcgcgcatgcggcggcaggcgaaggcggtcaatttcggcatcatctacggcatcagcgatttcggactggcgcaaaacctgaacatttcccgcaaggaggcggcggagttcatccggcaatatttcgccgtcttttcgggcgtcaaggcgtaccgcgagcggatcgtcgagcaggcgcgccgcgacggttacgtgacgaccctgctcggtcgcaggcgctatttgccggacatctctgcgtcgaattacaacctccgctcgttcgcggagcggacggcgatgaatacgccgatccagggcacggccgccgacatcatcaagaccgcgatggtgcgtctgacgcggcggatgcgcgacgtcggactgaagagccgcatgctgctgcaggttcacgacgagctcgtgtttgaagtgccgccggacgagctcgacgcgatgcgggagcttgtgacggacgtcatggagtcggcggtcccgctcgacgtgccgctgaaggtcgacgtcagctggggcgccgactggtacgcggcgaagtgagggaagcgggatcc

SEQ ID NO: 1146 - DNA, 2792 bp, Artificial Sequence
  Description of Artificial Sequence: Synthetic Caldibacillus cellulovorans CompA.2 DNA Polymerase N826T
atgaaatacctgctgccgaccgctgctgctggtctgctgctcctcgctgcccagccggcgatggccatgggcaaactgattctggtcgacggaaacagcgtcgccaaccgggcgttttacgccgtccggctgctcagcacgcgcggcggcctgcacacaaacgcggtgtacggattcgccaacatgttgctcaagctgatcgaggaggaacggccgacgcattttctcgtcgcgttcgacgcgggcaaggcgacgttccgtcatcgcgaatacgaggcctacaaggcgggtcgcctgcagacgccgcccgagctgtccgagcagtttccgtacatccgggagctcgtccgggcgttcggcgtcgcgtccggcgagctggaggaatacgaggcggacgacatgatcggtacgctggcgaaacgggcggaggccgagggcgtcgacacgctggtcgtcaccggcgaccgcgatttgctccagctcgtatcggaccgcgtgaccgtcgcgctgacgcgcaagggcatcacggaaacggagcggtacgacccggcgcgcatccgcgaggaatacggcttcgatcccgaccgcatccgcgacctcaaagggctgatgggcgacgcgtctgacaatcttcccggcgttcccggcgtcggtgagaaaaccgcactgaaactgctcaggcagtacggttcgctggagagcgtcctggaacacgcgtcggaaatcgccggaaagctcggtgaaaatctgcgggcgcacgccgacgccgcccgattgagcaagcggctggcgacgatcgactgcgcggtaccgttgcagtcgggatgggactggctgcgcctcggcgaaccggaccgcgccgcgctcgcctcgctgttgcggcagctcgaattcaagtcgctgttgaaacggctcggactcgacggcacgtccgccgatgccgacgtcgacggcgtccgttcctccgcgcggccggcggacgagaaacggccgagggccgtcgccgtcgctgaggagggcgtcgacgtccgctgtccggatcgcccggaagaagtcgaagaagcgctgtcgcggctggaagccgcccagtcggtcgtcgtcgaggtgacgggcgacaacccgcacgacggcgaagtgcgcggcgtcgcatggtgggacggacatacggcgtatttcattccgtttgaacggctggtgcagtccgacatgcggccgctggccgactggctcgccgacgcgcgtcggccgaagcgtacgcacgactcccatcgcgctgaagtggcgctgttctggcacggccttgcgtttcgcggcacgtcgttctgcacgcatatcgccgcctatttgctcgaccccacggaatcgcgccatacgctggcggacctgtcgcgccgctacggtctgccgccggtaccggaagccgaggacgtttacggcaagggcgcgaagttcaaggttcccgatcgcgacacgctggcgcgttacgtcggccgcaaggccgccctagtcgcgcggctcgttccgctgctcgaggcggatttggcggcctgcggcatgcgttcgcttttttacgacctggagctgccgctttcatccgaactcgccgtcatggagacggtcggcgtccgcgtcgacgcggcggcgctcgccgcctacggcgaggaattgcgcgaggcggcggcgaaagtcgagcgggagatttacgagctggccgggacgacgttcaacatcggatcgacgaaacagctcggcgaaattttgttcgataagctggggctgcccgtcgtcaagaaaacgaaaaccggctattccaccgacgcagacgtgctggaggaactggcgccgtaccatccgatcgtcgaaaagattttgcattaccgccaactgacgaaattgcagtcgacctacatcgaggggcttttgaaagaaatccgtccgcaaaccggtaaaatccatacgtattatcagcagacgatcgcggcgacggggcggctgagcagtcagtttcccaatcttcagaacattccgatccgtctcgaagaggggcggaaaatccgcaaggcgttcgttccgtcagaaccgggatggctgatgctcgccgccgactattcgcagatcgaactgcgcgtgctcgcgcacgtttccggcgacgaacggctgaaggaagcgtttcggacaggcatggacatccacacgaagaccgcgatggacgtgttcggcgtttccgaagaccgcgtcgacgcgcgcatgcggcggcaggcgaaggcggtcaatttcggcatcatctacggcatcagcgatttcggactggcgcaaaacctgaacatttcccgcaaggaggcggcggagttcatccggcaatatttcgccgtcttttcgggcgtcaaggcgtaccgcgagcggatcgtcgagcaggcgcgccgcgacggttacgtgacgaccctgctcggtcgcaggcgctatttgccggacatcactgcgtcgaattacaacctccgctcgttcgcggagcggacggcgatgaatacgccgatccagggcacggccgccgacatcatcaagaccgcgatggtgcgtctgacgcggcggatgcgcgacgtcggactgaagagccgcatgctgctgcaggttcacgacgagctcgtgtttgaagtgccgccggacgagctcgacgcgatgcgggagcttgtgacggacgtcatggagtcggcggtcccgctcgacgtgccgctgaaggtcgacgtcagctggggcgccgactggtacgcggcgaagtgagggaagcgggatcc

SEQ ID NO: 1147 - DNA, 2792 bp, Artificial Sequence
  Description of Artificial Sequence: Synthetic Caldibacillus cellulovorans CompA.2 DNA Polymerase N826W
atgaaatacctgctgccgaccgctgctgctggtctgctgctcctcgctgcccagccggcgatggccatgggcaaactgattctggtcgacggaaacagcgtcgccaaccgggcgttttacgccgtccggctgctcagcacgcgcggcggcctgcacacaaacgcggtgtacggattcgccaacatgttgctcaagctgatcgaggaggaacggccgacgcattttctcgtcgcgttcgacgcgggcaaggcgacgttccgtcatcgcgaatacgaggcctacaaggcgggtcgcctgcagacgccgcccgagctgtccgagcagtttccgtacatccgggagctcgtccgggcgttcggcgtcgcgtccggcgagctggaggaatacgaggcggacgacatgatcggtacgctggcgaaacgggcggaggccgagggcgtcgacacgctggtcgtcaccggcgaccgcgatttgctccagctcgtatcggaccgcgtgaccgtcgcgctgacgcgcaagggcatcacggaaacggagcggtacgacccggcgcgcatccgcgaggaatacggcttcgatcccgaccgcatccgcgacctcaaagggctgatgggcgacgcgtctgacaatcttcccggcgttcccggcgtcggtgagaaaaccgcactgaaactgctcaggcagtacggttcgctggagagcgtcctggaacacgcgtcggaaatcgccggaaagctcggtgaaaatctgcgggcgcacgccgacgccgcccgattgagcaagcggctggcgacgatcgactgcgcggtaccgttgcagtcgggatgggactggctgcgcctcggcgaaccggaccgcgccgcgctcgcctcgctgttgcggcagctcgaattcaagtcgctgttgaaacggctcggactcgacggcacgtccgccgatgccgacgtcgacggcgtccgttcctccgcgcggccggcggacgagaaacggccgagggccgtcgccgtcgctgaggagggcgtcgacgtccgctgtccggatcgcccggaagaagtcgaagaagcgctgtcgcggctggaagccgcccagtcggtcgtcgtcgaggtgacgggcgacaacccgcacgacggcgaagtgcgcggcgtcgcatggtgggacggacatacggcgtatttcattccgtttgaacggctggtgcagtccgacatgcggccgctggccgactggctcgccgacgcgcgtcggccgaagcgtacgcacgactcccatcgcgctgaagtggcgctgttctggcacggccttgcgtttcgcggcacgtcgttctgcacgcatatcgccgcctatttgctcgaccccacggaatcgcgccatacgctggcggacctgtcgcgccgctacggtctgccgccggtaccggaagccgaggacgtttacggcaagggcgcgaagttcaaggttcccgatcgcgacacgctggcgcgttacgtcggccgcaaggccgccctagtcgcgcggctcgttccgctgctcgaggcggatttggcggcctgcggcatgcgttcgcttttttacgacctggagctgccgctttcatccgaactcgccgtcatggagacggtcggcgtccgcgtcgacgcggcggcgctcgccgcctacggcgaggaattgcgcgaggcggcggcgaaagtcgagcgggagatttacgagctggccgggacgacgttcaacatcggatcgacgaaacagctcggcgaaattttgttcgataagctggggctgcccgtcgtcaagaaaacgaaaaccggctattccaccgacgcagacgtgctggaggaactggcgccgtaccatccgatcgtcgaaaagattttgcattaccgccaactgacgaaattgcagtcgacctacatcgaggggcttttgaaagaaatccgtccgcaaaccggtaaaatccatacgtattatcagcagacgatcgcggcgacggggcggctgagcagtcagtttcccaatcttcagaacattccgatccgtctcgaagaggggcggaaaatccgcaaggcgttcgttccgtcagaaccgggatggctgatgctcgccgccgactattcgcagatcgaactgcgcgtgctcgcgcacgtttccggcgacgaacggctgaaggaagcgtttcggacaggcatggacatccacacgaagaccgcgatggacgtgttcggcgtttccgaagaccgcgtcgacgcgcgcatgcggcggcaggcgaaggcggtcaatttcggcatcatctacggcatcagcgatttcggactggcgcaaaacctgaacatttcccgcaaggaggcggcggagttcatccggcaatatttcgccgtcttttcgggcgtcaaggcgtaccgcgagcggatcgtcgagcaggcgcgccgcgacggttacgtgacgaccctgctcggtcgcaggcgctatttgccggacatctgggcgtcgaattacaacctccgctcgttcgcggagcggacggcgatgaatacgccgatccagggcacggccgccgacatcatcaagaccgcgatggtgcgtctgacgcggcggatgcgcgacgtcggactgaagagccgcatgctgctgcaggttcacgacgagctcgtgtttgaagtgccgccggacgagctcgacgcgatgcgggagcttgtgacggacgtcatggagtcggcggtcccgctcgacgtgccgctgaaggtcgacgtcagctggggcgccgactggtacgcggcgaagtgagggaagcgggatcc

SEQ ID NO: 1148 - DNA, 2792 bp, Artificial Sequence
  Description of Artificial Sequence: Synthetic Caldibacillus cellulovorans CompA.2 DNA Polymerase N826Y
atgaaatacctgctgccgaccgctgctgctggtctgctgctcctcgctgcccagccggcgatggccatgggcaaactgattctggtcgacggaaacagcgtcgccaaccgggcgttttacgccgtccggctgctcagcacgcgcggcggcctgcacacaaacgcggtgtacggattcgccaacatgttgctcaagctgatcgaggaggaacggccgacgcattttctcgtcgcgttcgacgcgggcaaggcgacgttccgtcatcgcgaatacgaggcctacaaggcgggtcgcctgcagacgccgcccgagctgtccgagcagtttccgtacatccgggagctcgtccgggcgttcggcgtcgcgtccggcgagctggaggaatacgaggcggacgacatgatcggtacgctggcgaaacgggcggaggccgagggcgtcgacacgctggtcgtcaccggcgaccgcgatttgctccagctcgtatcggaccgcgtgaccgtcgcgctgacgcgcaagggcatcacggaaacggagcggtacgacccggcgcgcatccgcgaggaatacggcttcgatcccgaccgcatccgcgacctcaaagggctgatgggcgacgcgtctgacaatcttcccggcgttcccggcgtcggtgagaaaaccgcactgaaactgctcaggcagtacggttcgctggagagcgtcctggaacacgcgtcggaaatcgccggaaagctcggtgaaaatctgcgggcgcacgccgacgccgcccgattgagcaagcggctggcgacgatcgactgcgcggtaccgttgcagtcgggatgggactggctgcgcctcggcgaaccggaccgcgccgcgctcgcctcgctgttgcggcagctcgaattcaagtcgctgttgaaacggctcggactcgacggcacgtccgccgatgccgacgtcgacggcgtccgttcctccgcgcggccggcggacgagaaacggccgagggccgtcgccgtcgctgaggagggcgtcgacgtccgctgtccggatcgcccggaagaagtcgaagaagcgctgtcgcggctggaagccgcccagtcggtcgtcgtcgaggtgacgggcgacaacccgcacgacggcgaagtgcgcggcgtcgcatggtgggacggacatacggcgtatttcattccgtttgaacggctggtgcagtccgacatgcggccgctggccgactggctcgccgacgcgcgtcggccgaagcgtacgcacgactcccatcgcgctgaagtggcgctgttctggcacggccttgcgtttcgcggcacgtcgttctgcacgcatatcgccgcctatttgctcgaccccacggaatcgcgccatacgctggcggacctgtcgcgccgctacggtctgccgccggtaccggaagccgaggacgtttacggcaagggcgcgaagttcaaggttcccgatcgcgacacgctggcgcgttacgtcggccgcaaggccgccctagtcgcgcggctcgttccgctgctcgaggcggatttggcggcctgcggcatgcgttcgcttttttacgacctggagctgccgctttcatccgaactcgccgtcatggagacggtcggcgtccgcgtcgacgcggcggcgctcgccgcctacggcgaggaattgcgcgaggcggcggcgaaagtcgagcgggagatttacgagctggccgggacgacgttcaacatcggatcgacgaaacagctcggcgaaattttgttcgataagctggggctgcccgtcgtcaagaaaacgaaaaccggctattccaccgacgcagacgtgctggaggaactggcgccgtaccatccgatcgtcgaaaagattttgcattaccgccaactgacgaaattgcagtcgacctacatcgaggggcttttgaaagaaatccgtccgcaaaccggtaaaatccatacgtattatcagcagacgatcgcggcgacggggcggctgagcagtcagtttcccaatcttcagaacattccgatccgtctcgaagaggggcggaaaatccgcaaggcgttcgttccgtcagaaccgggatggctgatgctcgccgccgactattcgcagatcgaactgcgcgtgctcgcgcacgtttccggcgacgaacggctgaaggaagcgtttcggacaggcatggacatccacacgaagaccgcgatggacgtgttcggcgtttccgaagaccgcgtcgacgcgcgcatgcggcggcaggcgaaggcggtcaatttcggcatcatctacggcatcagcgatttcggactggcgcaaaacctgaacatttcccgcaaggaggcggcggagttcatccggcaatatttcgccgtcttttcgggcgtcaaggcgtaccgcgagcggatcgtcgagcaggcgcgccgcgacggttacgtgacgaccctgctcggtcgcaggcgctatttgccggacatctatgcgtcgaattacaacctccgctcgttcgcggagcggacggcgatgaatacgccgatccagggcacggccgccgacatcatcaagaccgcgatggtgcgtctgacgcggcggatgcgcgacgtcggactgaagagccgcatgctgctgcaggttcacgacgagctcgtgtttgaagtgccgccggacgagctcgacgcgatgcgggagcttgtgacggacgtcatggagtcggcggtcccgctcgacgtgccgctgaaggtcgacgtcagctggggcgccgactggtacgcggcgaagtgagggaagcgggatcc

SEQ ID NO: 1149 - DNA, 2792 bp, Artificial Sequence
  Description of Artificial Sequence: Synthetic Caldibacillus cellulovorans CompA.2 DNA Polymerase N826V
atgaaatacctgctgccgaccgctgctgctggtctgctgctcctcgctgcccagccggcgatggccatgggcaaactgattctggtcgacggaaacagcgtcgccaaccgggcgttttacgccgtccggctgctcagcacgcgcggcggcctgcacacaaacgcggtgtacggattcgccaacatgttgctcaagctgatcgaggaggaacggccgacgcattttctcgtcgcgttcgacgcgggcaaggcgacgttccgtcatcgcgaatacgaggcctacaaggcgggtcgcctgcagacgccgcccgagctgtccgagcagtttccgtacatccgggagctcgtccgggcgttcggcgtcgcgtccggcgagctggaggaatacgaggcggacgacatgatcggtacgctggcgaaacgggcggaggccgagggcgtcgacacgctggtcgtcaccggcgaccgcgatttgctccagctcgtatcggaccgcgtgaccgtcgcgctgacgcgcaagggcatcacggaaacggagcggtacgacccggcgcgcatccgcgaggaatacggcttcgatcccgaccgcatccgcgacctcaaagggctgatgggcgacgcgtctgacaatcttcccggcgttcccggcgtcggtgagaaaaccgcactgaaactgctcaggcagtacggttcgctggagagcgtcctggaacacgcgtcggaaatcgccggaaagctcggtgaaaatctgcgggcgcacgccgacgccgcccgattgagcaagcggctggcgacgatcgactgcgcggtaccgttgcagtcgggatgggactggctgcgcctcggcgaaccggaccgcgccgcgctcgcctcgctgttgcggcagctcgaattcaagtcgctgttgaaacggctcggactcgacggcacgtccgccgatgccgacgtcgacggcgtccgttcctccgcgcggccggcggacgagaaacggccgagggccgtcgccgtcgctgaggagggcgtcgacgtccgctgtccggatcgcccggaagaagtcgaagaagcgctgtcgcggctggaagccgcccagtcggtcgtcgtcgaggtgacgggcgacaacccgcacgacggcgaagtgcgcggcgtcgcatggtgggacggacatacggcgtatttcattccgtttgaacggctggtgcagtccgacatgcggccgctggccgactggctcgccgacgcgcgtcggccgaagcgtacgcacgactcccatcgcgctgaagtggcgctgttctggcacggccttgcgtttcgcggcacgtcgttctgcacgcatatcgccgcctatttgctcgaccccacggaatcgcgccatacgctggcggacctgtcgcgccgctacggtctgccgccggtaccggaagccgaggacgtttacggcaagggcgcgaagttcaaggttcccgatcgcgacacgctggcgcgttacgtcggccgcaaggccgccctagtcgcgcggctcgttccgctgctcgaggcggatttggcggcctgcggcatgcgttcgcttttttacgacctggagctgccgctttcatccgaactcgccgtcatggagacggtcggcgtccgcgtcgacgcggcggcgctcgccgcctacggcgaggaattgcgcgaggcggcggcgaaagtcgagcgggagatttacgagctggccgggacgacgttcaacatcggatcgacgaaacagctcggcgaaattttgttcgataagctggggctgcccgtcgtcaagaaaacgaaaaccggctattccaccgacgcagacgtgctggaggaactggcgccgtaccatccgatcgtcgaaaagattttgcattaccgccaactgacgaaattgcagtcgacctacatcgaggggcttttgaaagaaatccgtccgcaaaccggtaaaatccatacgtattatcagcagacgatcgcggcgacggggcggctgagcagtcagtttcccaatcttcagaacattccgatccgtctcgaagaggggcggaaaatccgcaaggcgttcgttccgtcagaaccgggatggctgatgctcgccgccgactattcgcagatcgaactgcgcgtgctcgcgcacgtttccggcgacgaacggctgaaggaagcgtttcggacaggcatggacatccacacgaagaccgcgatggacgtgttcggcgtttccgaagaccgcgtcgacgcgcgcatgcggcggcaggcgaaggcggtcaatttcggcatcatctacggcatcagcgatttcggactggcgcaaaacctgaacatttcccgcaaggaggcggcggagttcatccggcaatatttcgccgtcttttcgggcgtcaaggcgtaccgcgagcggatcgtcgagcaggcgcgccgcgacggttacgtgacgaccctgctcggtcgcaggcgctatttgccggacatcgttgcgtcgaattacaacctccgctcgttcgcggagcggacggcgatgaatacgccgatccagggcacggccgccgacatcatcaagaccgcgatggtgcgtctgacgcggcggatgcgcgacgtcggactgaagagccgcatgctgctgcaggttcacgacgagctcgtgtttgaagtgccgccggacgagctcgacgcgatgcgggagcttgtgacggacgtcatggagtcggcggtcccgctcgacgtgccgctgaaggtcgacgtcagctggggcgccgactggtacgcggcgaagtgagggaagcgggatcc

SEQ ID NO: 1150 - DNA, 2792 bp, Artificial Sequence
  Description of Artificial Sequence: Synthetic Caldibacillus cellulovorans CompA.2 DNA Polymerase A827R
atgaaatacctgctgccgaccgctgctgctggtctgctgctcctcgctgcccagccggcgatggccatgggcaaactgattctggtcgacggaaacagcgtcgccaaccgggcgttttacgccgtccggctgctcagcacgcgcggcggcctgcacacaaacgcggtgtacggattcgccaacatgttgctcaagctgatcgaggaggaacggccgacgcattttctcgtcgcgttcgacgcgggcaaggcgacgttccgtcatcgcgaatacgaggcctacaaggcgggtcgcctgcagacgccgcccgagctgtccgagcagtttccgtacatccgggagctcgtccgggcgttcggcgtcgcgtccggcgagctggaggaatacgaggcggacgacatgatcggtacgctggcgaaacgggcggaggccgagggcgtcgacacgctggtcgtcaccggcgaccgcgatttgctccagctcgtatcggaccgcgtgaccgtcgcgctgacgcgcaagggcatcacggaaacggagcggtacgacccggcgcgcatccgcgaggaatacggcttcgatcccgaccgcatccgcgacctcaaagggctgatgggcgacgcgtctgacaatcttcccggcgttcccggcgtcggtgagaaaaccgcactgaaactgctcaggcagtacggttcgctggagagcgtcctggaacacgcgtcggaaatcgccggaaagctcggtgaaaatctgcgggcgcacgccgacgccgcccgattgagcaagcggctggcgacgatcgactgcgcggtaccgttgcagtcgggatgggactggctgcgcctcggcgaaccggaccgcgccgcgctcgcctcgctgttgcggcagctcgaattcaagtcgctgttgaaacggctcggactcgacggcacgtccgccgatgccgacgtcgacggcgtccgttcctccgcgcggccggcggacgagaaacggccgagggccgtcgccgtcgctgaggagggcgtcgacgtccgctgtccggatcgcccggaagaagtcgaagaagcgctgtcgcggctggaagccgcccagtcggtcgtcgtcgaggtgacgggcgacaacccgcacgacggcgaagtgcgcggcgtcgcatggtgggacggacatacggcgtatttcattccgtttgaacggctggtgcagtccgacatgcggccgctggccgactggctcgccgacgcgcgtcggccgaagcgtacgcacgactcccatcgcgctgaagtggcgctgttctggcacggccttgcgtttcgcggcacgtcgttctgcacgcatatcgccgcctatttgctcgaccccacggaatcgcgccatacgctggcggacctgtcgcgccgctacggtctgccgccggtaccggaagccgaggacgtttacggcaagggcgcgaagttcaaggttcccgatcgcgacacgctggcgcgttacgtcggccgcaaggccgccctagtcgcgcggctcgttccgctgctcgaggcggatttggcggcctgcggcatgcgttcgcttttttacgacctggagctgccgctttcatccgaactcgccgtcatggagacggtcggcgtccgcgtcgacgcggcggcgctcgccgcctacggcgaggaattgcgcgaggcggcggcgaaagtcgagcgggagatttacgagctggccgggacgacgttcaacatcggatcgacgaaacagctcggcgaaattttgttcgataagctggggctgcccgtcgtcaagaaaacgaaaaccggctattccaccgacgcagacgtgctggaggaactggcgccgtaccatccgatcgtcgaaaagattttgcattaccgccaactgacgaaattgcagtcgacctacatcgaggggcttttgaaagaaatccgtccgcaaaccggtaaaatccatacgtattatcagcagacgatcgcggcgacggggcggctgagcagtcagtttcccaatcttcagaacattccgatccgtctcgaagaggggcggaaaatccgcaaggcgttcgttccgtcagaaccgggatggctgatgctcgccgccgactattcgcagatcgaactgcgcgtgctcgcgcacgtttccggcgacgaacggctgaaggaagcgtttcggacaggcatggacatccacacgaagaccgcgatggacgtgttcggcgtttccgaagaccgcgtcgacgcgcgcatgcggcggcaggcgaaggcggtcaatttcggcatcatctacggcatcagcgatttcggactggcgcaaaacctgaacatttcccgcaaggaggcggcggagttcatccggcaatatttcgccgtcttttcgggcgtcaaggcgtaccgcgagcggatcgtcgagcaggcgcgccgcgacggttacgtgacgaccctgctcggtcgcaggcgctatttgccggacatcaaccgttcgaattacaacctccgctcgttcgcggagcggacggcgatgaatacgccgatccagggcacggccgccgacatcatcaagaccgcgatggtgcgtctgacgcggcggatgcgcgacgtcggactgaagagccgcatgctgctgcaggttcacgacgagctcgtgtttgaagtgccgccggacgagctcgacgcgatgcgggagcttgtgacggacgtcatggagtcggcggtcccgctcgacgtgccgctgaaggtcgacgtcagctggggcgccgactggtacgcggcgaagtgagggaagcgggatcc

SEQ ID NO: 1151 - DNA, 2792 bp, Artificial Sequence
  Description of Artificial Sequence: Synthetic Caldibacillus cellulovorans CompA.2 DNA Polymerase A827N
atgaaatacctgctgccgaccgctgctgctggtctgctgctcctcgctgcccagccggcgatggccatgggcaaactgattctggtcgacggaaacagcgtcgccaaccgggcgttttacgccgtccggctgctcagcacgcgcggcggcctgcacacaaacgcggtgtacggattcgccaacatgttgctcaagctgatcgaggaggaacggccgacgcattttctcgtcgcgttcgacgcgggcaaggcgacgttccgtcatcgcgaatacgaggcctacaaggcgggtcgcctgcagacgccgcccgagctgtccgagcagtttccgtacatccgggagctcgtccgggcgttcggcgtcgcgtccggcgagctggaggaatacgaggcggacgacatgatcggtacgctggcgaaacgggcggaggccgagggcgtcgacacgctggtcgtcaccggcgaccgcgatttgctccagctcgtatcggaccgcgtgaccgtcgcgctgacgcgcaagggcatcacggaaacggagcggtacgacccggcgcgcatccgcgaggaatacggcttcgatcccgaccgcatccgcgacctcaaagggctgatgggcgacgcgtctgacaatcttcccggcgttcccggcgtcggtgagaaaaccgcactgaaactgctcaggcagtacggttcgctggagagcgtcctggaacacgcgtcggaaatcgccggaaagctcggtgaaaatctgcgggcgcacgccgacgccgcccgattgagcaagcggctggcgacgatcgactgcgcggtaccgttgcagtcgggatgggactggctgcgcctcggcgaaccggaccgcgccgcgctcgcctcgctgttgcggcagctcgaattcaagtcgctgttgaaacggctcggactcgacggcacgtccgccgatgccgacgtcgacggcgtccgttcctccgcgcggccggcggacgagaaacggccgagggccgtcgccgtcgctgaggagggcgtcgacgtccgctgtccggatcgcccggaagaagtcgaagaagcgctgtcgcggctggaagccgcccagtcggtcgtcgtcgaggtgacgggcgacaacccgcacgacggcgaagtgcgcggcgtcgcatggtgggacggacatacggcgtatttcattccgtttgaacggctggtgcagtccgacatgcggccgctggccgactggctcgccgacgcgcgtcggccgaagcgtacgcacgactcccatcgcgctgaagtggcgctgttctggcacggccttgcgtttcgcggcacgtcgttctgcacgcatatcgccgcctatttgctcgaccccacggaatcgcgccatacgctggcggacctgtcgcgccgctacggtctgccgccggtaccggaagccgaggacgtttacggcaagggcgcgaagttcaaggttcccgatcgcgacacgctggcgcgttacgtcggccgcaaggccgccctagtcgcgcggctcgttccgctgctcgaggcggatttggcggcctgcggcatgcgttcgcttttttacgacctggagctgccgctttcatccgaactcgccgtcatggagacggtcggcgtccgcgtcgacgcggcggcgctcgccgcctacggcgaggaattgcgcgaggcggcggcgaaagtcgagcgggagatttacgagctggccgggacgacgttcaacatcggatcgacgaaacagctcggcgaaattttgttcgataagctggggctgcccgtcgtcaagaaaacgaaaaccggctattccaccgacgcagacgtgctggaggaactggcgccgtaccatccgatcgtcgaaaagattttgcattaccgccaactgacgaaattgcagtcgacctacatcgaggggcttttgaaagaaatccgtccgcaaaccggtaaaatccatacgtattatcagcagacgatcgcggcgacggggcggctgagcagtcagtttcccaatcttcagaacattccgatccgtctcgaagaggggcggaaaatccgcaaggcgttcgttccgtcagaaccgggatggctgatgctcgccgccgactattcgcagatcgaactgcgcgtgctcgcgcacgtttccggcgacgaacggctgaaggaagcgtttcggacaggcatggacatccacacgaagaccgcgatggacgtgttcggcgtttccgaagaccgcgtcgacgcgcgcatgcggcggcaggcgaaggcggtcaatttcggcatcatctacggcatcagcgatttcggactggcgcaaaacctgaacatttcccgcaaggaggcggcggagttcatccggcaatatttcgccgtcttttcgggcgtcaaggcgtaccgcgagcggatcgtcgagcaggcgcgccgcgacggttacgtgacgaccctgctcggtcgcaggcgctatttgccggacatcaacaattcgaattacaacctccgctcgttcgcggagcggacggcgatgaatacgccgatccagggcacggccgccgacatcatcaagaccgcgatggtgcgtctgacgcggcggatgcgcgacgtcggactgaagagccgcatgctgctgcaggttcacgacgagctcgtgtttgaagtgccgccggacgagctcgacgcgatgcgggagcttgtgacggacgtcatggagtcggcggtcccgctcgacgtgccgctgaaggtcgacgtcagctggggcgccgactggtacgcggcgaagtgagggaagcgggatcc

SEQ ID NO: 1152 - DNA, 2792 bp, Artificial Sequence
  Description of Artificial Sequence: Synthetic Caldibacillus cellulovorans CompA.2 DNA Polymerase A827D
atgaaatacctgctgccgaccgctgctgctggtctgctgctcctcgctgcccagccggcgatggccatgggcaaactgattctggtcgacggaaacagcgtcgccaaccgggcgttttacgccgtccggctgctcagcacgcgcggcggcctgcacacaaacgcggtgtacggattcgccaacatgttgctcaagctgatcgaggaggaacggccgacgcattttctcgtcgcgttcgacgcgggcaaggcgacgttccgtcatcgcgaatacgaggcctacaaggcgggtcgcctgcagacgccgcccgagctgtccgagcagtttccgtacatccgggagctcgtccgggcgttcggcgtcgcgtccggcgagctggaggaatacgaggcggacgacatgatcggtacgctggcgaaacgggcggaggccgagggcgtcgacacgctggtcgtcaccggcgaccgcgatttgctccagctcgtatcggaccgcgtgaccgtcgcgctgacgcgcaagggcatcacggaaacggagcggtacgacccggcgcgcatccgcgaggaatacggcttcgatcccgaccgcatccgcgacctcaaagggctgatgggcgacgcgtctgacaatcttcccggcgttcccggcgtcggtgagaaaaccgcactgaaactgctcaggcagtacggttcgctggagagcgtcctggaacacgcgtcggaaatcgccggaaagctcggtgaaaatctgcgggcgcacgccgacgccgcccgattgagcaagcggctggcgacgatcgactgcgcggtaccgttgcagtcgggatgggactggctgcgcctcggcgaaccggaccgcgccgcgctcgcctcgctgttgcggcagctcgaattcaagtcgctgttgaaacggctcggactcgacggcacgtccgccgatgccgacgtcgacggcgtccgttcctccgcgcggccggcggacgagaaacggccgagggccgtcgccgtcgctgaggagggcgtcgacgtccgctgtccggatcgcccggaagaagtcgaagaagcgctgtcgcggctggaagccgcccagtcggtcgtcgtcgaggtgacgggcgacaacccgcacgacggcgaagtgcgcggcgtcgcatggtgggacggacatacggcgtatttcattccgtttgaacggctggtgcagtccgacatgcggccgctggccgactggctcgccgacgcgcgtcggccgaagcgtacgcacgactcccatcgcgctgaagtggcgctgttctggcacggccttgcgtttcgcggcacgtcgttctgcacgcatatcgccgcctatttgctcgaccccacggaatcgcgccatacgctggcggacctgtcgcgccgctacggtctgccgccggtaccggaagccgaggacgtttacggcaagggcgcgaagttcaaggttcccgatcgcgacacgctggcgcgttacgtcggccgcaaggccgccctagtcgcgcggctcgttccgctgctcgaggcggatttggcggcctgcggcatgcgttcgcttttttacgacctggagctgccgctttcatccgaactcgccgtcatggagacggtcggcgtccgcgtcgacgcggcggcgctcgccgcctacggcgaggaattgcgcgaggcggcggcgaaagtcgagcgggagatttacgagctggccgggacgacgttcaacatcggatcgacgaaacagctcggcgaaattttgttcgataagctggggctgcccgtcgtcaagaaaacgaaaaccggctattccaccgacgcagacgtgctggaggaactggcgccgtaccatccgatcgtcgaaaagattttgcattaccgccaactgacgaaattgcagtcgacctacatcgaggggcttttgaaagaaatccgtccgcaaaccggtaaaatccatacgtattatcagcagacgatcgcggcgacggggcggctgagcagtcagtttcccaatcttcagaacattccgatccgtctcgaagaggggcggaaaatccgcaaggcgttcgttccgtcagaaccgggatggctgatgctcgccgccgactattcgcagatcgaactgcgcgtgctcgcgcacgtttccggcgacgaacggctgaaggaagcgtttcggacaggcatggacatccacacgaagaccgcgatggacgtgttcggcgtttccgaagaccgcgtcgacgcgcgcatgcggcggcaggcgaaggcggtcaatttcggcatcatctacggcatcagcgatttcggactggcgcaaaacctgaacatttcccgcaaggaggcggcggagttcatccggcaatatttcgccgtcttttcgggcgtcaaggcgtaccgcgagcggatcgtcgagcaggcgcgccgcgacggttacgtgacgaccctgctcggtcgcaggcgctatttgccggacatcaacgattcgaattacaacctccgctcgttcgcggagcggacggcgatgaatacgccgatccagggcacggccgccgacatcatcaagaccgcgatggtgcgtctgacgcggcggatgcgcgacgtcggactgaagagccgcatgctgctgcaggttcacgacgagctcgtgtttgaagtgccgccggacgagctcgacgcgatgcgggagcttgtgacggacgtcatggagtcggcggtcccgctcgacgtgccgctgaaggtcgacgtcagctggggcgccgactggtacgcggcgaagtgagggaagcgggatcc

SEQ ID NO: 1153 - DNA, 2792 bp, Artificial Sequence
  Description of Artificial Sequence: Synthetic Caldibacillus cellulovorans CompA.2 DNA Polymerase A827C
atgaaatacctgctgccgaccgctgctgctggtctgctgctcctcgctgcccagccggcgatggccatgggcaaactgattctggtcgacggaaacagcgtcgccaaccgggcgttttacgccgtccggctgctcagcacgcgcggcggcctgcacacaaacgcggtgtacggattcgccaacatgttgctcaagctgatcgaggaggaacggccgacgcattttctcgtcgcgttcgacgcgggcaaggcgacgttccgtcatcgcgaatacgaggcctacaaggcgggtcgcctgcagacgccgcccgagctgtccgagcagtttccgtacatccgggagctcgtccgggcgttcggcgtcgcgtccggcgagctggaggaatacgaggcggacgacatgatcggtacgctggcgaaacgggcggaggccgagggcgtcgacacgctggtcgtcaccggcgaccgcgatttgctccagctcgtatcggaccgcgtgaccgtcgcgctgacgcgcaagggcatcacggaaacggagcggtacgacccggcgcgcatccgcgaggaatacggcttcgatcccgaccgcatccgcgacctcaaagggctgatgggcgacgcgtctgacaatcttcccggcgttcccggcgtcggtgagaaaaccgcactgaaactgctcaggcagtacggttcgctggagagcgtcctggaacacgcgtcggaaatcgccggaaagctcggtgaaaatctgcgggcgcacgccgacgccgcccgattgagcaagcggctggcgacgatcgactgcgcggtaccgttgcagtcgggatgggactggctgcgcctcggcgaaccggaccgcgccgcgctcgcctcgctgttgcggcagctcgaattcaagtcgctgttgaaacggctcggactcgacggcacgtccgccgatgccgacgtcgacggcgtccgttcctccgcgcggccggcggacgagaaacggccgagggccgtcgccgtcgctgaggagggcgtcgacgtccgctgtccggatcgcccggaagaagtcgaagaagcgctgtcgcggctggaagccgcccagtcggtcgtcgtcgaggtgacgggcgacaacccgcacgacggcgaagtgcgcggcgtcgcatggtgggacggacatacggcgtatttcattccgtttgaacggctggtgcagtccgacatgcggccgctggccgactggctcgccgacgcgcgtcggccgaagcgtacgcacgactcccatcgcgctgaagtggcgctgttctggcacggccttgcgtttcgcggcacgtcgttctgcacgcatatcgccgcctatttgctcgaccccacggaatcgcgccatacgctggcggacctgtcgcgccgctacggtctgccgccggtaccggaagccgaggacgtttacggcaagggcgcgaagttcaaggttcccgatcgcgacacgctggcgcgttacgtcggccgcaaggccgccctagtcgcgcggctcgttccgctgctcgaggcggatttggcggcctgcggcatgcgttcgcttttttacgacctggagctgccgctttcatccgaactcgccgtcatggagacggtcggcgtccgcgtcgacgcggcggcgctcgccgcctacggcgaggaattgcgcgaggcggcggcgaaagtcgagcgggagatttacgagctggccgggacgacgttcaacatcggatcgacgaaacagctcggcgaaattttgttcgataagctggggctgcccgtcgtcaagaaaacgaaaaccggctattccaccgacgcagacgtgctggaggaactggcgccgtaccatccgatcgtcgaaaagattttgcattaccgccaactgacgaaattgcagtcgacctacatcgaggggcttttgaaagaaatccgtccgcaaaccggtaaaatccatacgtattatcagcagacgatcgcggcgacggggcggctgagcagtcagtttcccaatcttcagaacattccgatccgtctcgaagaggggcggaaaatccgcaaggcgttcgttccgtcagaaccgggatggctgatgctcgccgccgactattcgcagatcgaactgcgcgtgctcgcgcacgtttccggcgacgaacggctgaaggaagcgtttcggacaggcatggacatccacacgaagaccgcgatggacgtgttcggcgtttccgaagaccgcgtcgacgcgcgcatgcggcggcaggcgaaggcggtcaatttcggcatcatctacggcatcagcgatttcggactggcgcaaaacctgaacatttcccgcaaggaggcggcggagttcatccggcaatatttcgccgtcttttcgggcgtcaaggcgtaccgcgagcggatcgtcgagcaggcgcgccgcgacggttacgtgacgaccctgctcggtcgcaggcgctatttgccggacatcaactgttcgaattacaacctccgctcgttcgcggagcggacggcgatgaatacgccgatccagggcacggccgccgacatcatcaagaccgcgatggtgcgtctgacgcggcggatgcgcgacgtcggactgaagagccgcatgctgctgcaggttcacgacgagctcgtgtttgaagtgccgccggacgagctcgacgcgatgcgggagcttgtgacggacgtcatggagtcggcggtcccgctcgacgtgccgctgaaggtcgacgtcagctggggcgccgactggtacgcggcgaagtgagggaagcgggatcc

SEQ ID NO: 1154 - DNA, 2792 bp, Artificial Sequence
  Description of Artificial Sequence: Synthetic Caldibacillus cellulovorans CompA.2 DNA Polymerase A827E
atgaaatacctgctgccgaccgctgctgctggtctgctgctcctcgctgcccagccggcgatggccatgggcaaactgattctggtcgacggaaacagcgtcgccaaccgggcgttttacgccgtccggctgctcagcacgcgcggcggcctgcacacaaacgcggtgtacggattcgccaacatgttgctcaagctgatcgaggaggaacggccgacgcattttctcgtcgcgttcgacgcgggcaaggcgacgttccgtcatcgcgaatacgaggcctacaaggcgggtcgcctgcagacgccgcccgagctgtccgagcagtttccgtacatccgggagctcgtccgggcgttcggcgtcgcgtccggcgagctggaggaatacgaggcggacgacatgatcggtacgctggcgaaacgggcggaggccgagggcgtcgacacgctggtcgtcaccggcgaccgcgatttgctccagctcgtatcggaccgcgtgaccgtcgcgctgacgcgcaagggcatcacggaaacggagcggtacgacccggcgcgcatccgcgaggaatacggcttcgatcccgaccgcatccgcgacctcaaagggctgatgggcgacgcgtctgacaatcttcccggcgttcccggcgtcggtgagaaaaccgcactgaaactgctcaggcagtacggttcgctggagagcgtcctggaacacgcgtcggaaatcgccggaaagctcggtgaaaatctgcgggcgcacgccgacgccgcccgattgagcaagcggctggcgacgatcgactgcgcggtaccgttgcagtcgggatgggactggctgcgcctcggcgaaccggaccgcgccgcgctcgcctcgctgttgcggcagctcgaattcaagtcgctgttgaaacggctcggactcgacggcacgtccgccgatgccgacgtcgacggcgtccgttcctccgcgcggccggcggacgagaaacggccgagggccgtcgccgtcgctgaggagggcgtcgacgtccgctgtccggatcgcccggaagaagtcgaagaagcgctgtcgcggctggaagccgcccagtcggtcgtcgtcgaggtgacgggcgacaacccgcacgacggcgaagtgcgcggcgtcgcatggtgggacggacatacggcgtatttcattccgtttgaacggctggtgcagtccgacatgcggccgctggccgactggctcgccgacgcgcgtcggccgaagcgtacgcacgactcccatcgcgctgaagtggcgctgttctggcacggccttgcgtttcgcggcacgtcgttctgcacgcatatcgccgcctatttgctcgaccccacggaatcgcgccatacgctggcggacctgtcgcgccgctacggtctgccgccggtaccggaagccgaggacgtttacggcaagggcgcgaagttcaaggttcccgatcgcgacacgctggcgcgttacgtcggccgcaaggccgccctagtcgcgcggctcgttccgctgctcgaggcggatttggcggcctgcggcatgcgttcgcttttttacgacctggagctgccgctttcatccgaactcgccgtcatggagacggtcggcgtccgcgtcgacgcggcggcgctcgccgcctacggcgaggaattgcgcgaggcggcggcgaaagtcgagcgggagatttacgagctggccgggacgacgttcaacatcggatcgacgaaacagctcggcgaaattttgttcgataagctggggctgcccgtcgtcaagaaaacgaaaaccggctattccaccgacgcagacgtgctggaggaactggcgccgtaccatccgatcgtcgaaaagattttgcattaccgccaactgacgaaattgcagtcgacctacatcgaggggcttttgaaagaaatccgtccgcaaaccggtaaaatccatacgtattatcagcagacgatcgcggcgacggggcggctgagcagtcagtttcccaatcttcagaacattccgatccgtctcgaagaggggcggaaaatccgcaaggcgttcgttccgtcagaaccgggatggctgatgctcgccgccgactattcgcagatcgaactgcgcgtgctcgcgcacgtttccggcgacgaacggctgaaggaagcgtttcggacaggcatggacatccacacgaagaccgcgatggacgtgttcggcgtttccgaagaccgcgtcgacgcgcgcatgcggcggcaggcgaaggcggtcaatttcggcatcatctacggcatcagcgatttcggactggcgcaaaacctgaacatttcccgcaaggaggcggcggagttcatccggcaatatttcgccgtcttttcgggcgtcaaggcgtaccgcgagcggatcgtcgagcaggcgcgccgcgacggttacgtgacgaccctgctcggtcgcaggcgctatttgccggacatcaacgaatcgaattacaacctccgctcgttcgcggagcggacggcgatgaatacgccgatccagggcacggccgccgacatcatcaagaccgcgatggtgcgtctgacgcggcggatgcgcgacgtcggactgaagagccgcatgctgctgcaggttcacgacgagctcgtgtttgaagtgccgccggacgagctcgacgcgatgcgggagcttgtgacggacgtcatggagtcggcggtcccgctcgacgtgccgctgaaggtcgacgtcagctggggcgccgactggtacgcggcgaagtgagggaagcgggatcc

SEQ ID NO: 1155 - DNA, 2792 bp, Artificial Sequence
  Description of Artificial Sequence: Synthetic Caldibacillus cellulovorans CompA.2 DNA Polymerase A827Q
atgaaatacctgctgccgaccgctgctgctggtctgctgctcctcgctgcccagccggcgatggccatgggcaaactgattctggtcgacggaaacagcgtcgccaaccgggcgttttacgccgtccggctgctcagcacgcgcggcggcctgcacacaaacgcggtgtacggattcgccaacatgttgctcaagctgatcgaggaggaacggccgacgcattttctcgtcgcgttcgacgcgggcaaggcgacgttccgtcatcgcgaatacgaggcctacaaggcgggtcgcctgcagacgccgcccgagctgtccgagcagtttccgtacatccgggagctcgtccgggcgttcggcgtcgcgtccggcgagctggaggaatacgaggcggacgacatgatcggtacgctggcgaaacgggcggaggccgagggcgtcgacacgctggtcgtcaccggcgaccgcgatttgctccagctcgtatcggaccgcgtgaccgtcgcgctgacgcgcaagggcatcacggaaacggagcggtacgacccggcgcgcatccgcgaggaatacggcttcgatcccgaccgcatccgcgacctcaaagggctgatgggcgacgcgtctgacaatcttcccggcgttcccggcgtcggtgagaaaaccgcactgaaactgctcaggcagtacggttcgctggagagcgtcctggaacacgcgtcggaaatcgccggaaagctcggtgaaaatctgcgggcgcacgccgacgccgcccgattgagcaagcggctggcgacgatcgactgcgcggtaccgttgcagtcgggatgggactggctgcgcctcggcgaaccggaccgcgccgcgctcgcctcgctgttgcggcagctcgaattcaagtcgctgttgaaacggctcggactcgacggcacgtccgccgatgccgacgtcgacggcgtccgttcctccgcgcggccggcggacgagaaacggccgagggccgtcgccgtcgctgaggagggcgtcgacgtccgctgtccggatcgcccggaagaagtcgaagaagcgctgtcgcggctggaagccgcccagtcggtcgtcgtcgaggtgacgggcgacaacccgcacgacggcgaagtgcgcggcgtcgcatggtgggacggacatacggcgtatttcattccgtttgaacggctggtgcagtccgacatgcggccgctggccgactggctcgccgacgcgcgtcggccgaagcgtacgcacgactcccatcgcgctgaagtggcgctgttctggcacggccttgcgtttcgcggcacgtcgttctgcacgcatatcgccgcctatttgctcgaccccacggaatcgcgccatacgctggcggacctgtcgcgccgctacggtctgccgccggtaccggaagccgaggacgtttacggcaagggcgcgaagttcaaggttcccgatcgcgacacgctggcgcgttacgtcggccgcaaggccgccctagtcgcgcggctcgttccgctgctcgaggcggatttggcggcctgcggcatgcgttcgcttttttacgacctggagctgccgctttcatccgaactcgccgtcatggagacggtcggcgtccgcgtcgacgcggcggcgctcgccgcctacggcgaggaattgcgcgaggcggcggcgaaagtcgagcgggagatttacgagctggccgggacgacgttcaacatcggatcgacgaaacagctcggcgaaattttgttcgataagctggggctgcccgtcgtcaagaaaacgaaaaccggctattccaccgacgcagacgtgctggaggaactggcgccgtaccatccgatcgtcgaaaagattttgcattaccgccaactgacgaaattgcagtcgacctacatcgaggggcttttgaaagaaatccgtccgcaaaccggtaaaatccatacgtattatcagcagacgatcgcggcgacggggcggctgagcagtcagtttcccaatcttcagaacattccgatccgtctcgaagaggggcggaaaatccgcaaggcgttcgttccgtcagaaccgggatggctgatgctcgccgccgactattcgcagatcgaactgcgcgtgctcgcgcacgtttccggcgacgaacggctgaaggaagcgtttcggacaggcatggacatccacacgaagaccgcgatggacgtgttcggcgtttccgaagaccgcgtcgacgcgcgcatgcggcggcaggcgaaggcggtcaatttcggcatcatctacggcatcagcgatttcggactggcgcaaaacctgaacatttcccgcaaggaggcggcggagttcatccggcaatatttcgccgtcttttcgggcgtcaaggcgtaccgcgagcggatcgtcgagcaggcgcgccgcgacggttacgtgacgaccctgctcggtcgcaggcgctatttgccggacatcaaccaatcgaattacaacctccgctcgttcgcggagcggacggcgatgaatacgccgatccagggcacggccgccgacatcatcaagaccgcgatggtgcgtctgacgcggcggatgcgcgacgtcggactgaagagccgcatgctgctgcaggttcacgacgagctcgtgtttgaagtgccgccggacgagctcgacgcgatgcgggagcttgtgacggacgtcatggagtcggcggtcccgctcgacgtgccgctgaaggtcgacgtcagctggggcgccgactggtacgcggcgaagtgagggaagcgggatcc

SEQ ID NO: 1156 - DNA, 2792 bp, Artificial Sequence
  Description of Artificial Sequence: Synthetic Caldibacillus cellulovorans CompA.2 DNA Polymerase A827G
atgaaatacctgctgccgaccgctgctgctggtctgctgctcctcgctgcccagccggcgatggccatgggcaaactgattctggtcgacggaaacagcgtcgccaaccgggcgttttacgccgtccggctgctcagcacgcgcggcggcctgcacacaaacgcggtgtacggattcgccaacatgttgctcaagctgatcgaggaggaacggccgacgcattttctcgtcgcgttcgacgcgggcaaggcgacgttccgtcatcgcgaatacgaggcctacaaggcgggtcgcctgcagacgccgcccgagctgtccgagcagtttccgtacatccgggagctcgtccgggcgttcggcgtcgcgtccggcgagctggaggaatacgaggcggacgacatgatcggtacgctggcgaaacgggcggaggccgagggcgtcgacacgctggtcgtcaccggcgaccgcgatttgctccagctcgtatcggaccgcgtgaccgtcgcgctgacgcgcaagggcatcacggaaacggagcggtacgacccggcgcgcatccgcgaggaatacggcttcgatcccgaccgcatccgcgacctcaaagggctgatgggcgacgcgtctgacaatcttcccggcgttcccggcgtcggtgagaaaaccgcactgaaactgctcaggcagtacggttcgctggagagcgtcctggaacacgcgtcggaaatcgccggaaagctcggtgaaaatctgcgggcgcacgccgacgccgcccgattgagcaagcggctggcgacgatcgactgcgcggtaccgttgcagtcgggatgggactggctgcgcctcggcgaaccggaccgcgccgcgctcgcctcgctgttgcggcagctcgaattcaagtcgctgttgaaacggctcggactcgacggcacgtccgccgatgccgacgtcgacggcgtccgttcctccgcgcggccggcggacgagaaacggccgagggccgtcgccgtcgctgaggagggcgtcgacgtccgctgtccggatcgcccggaagaagtcgaagaagcgctgtcgcggctggaagccgcccagtcggtcgtcgtcgaggtgacgggcgacaacccgcacgacggcgaagtgcgcggcgtcgcatggtgggacggacatacggcgtatttcattccgtttgaacggctggtgcagtccgacatgcggccgctggccgactggctcgccgacgcgcgtcggccgaagcgtacgcacgactcccatcgcgctgaagtggcgctgttctggcacggccttgcgtttcgcggcacgtcgttctgcacgcatatcgccgcctatttgctcgaccccacggaatcgcgccatacgctggcggacctgtcgcgccgctacggtctgccgccggtaccggaagccgaggacgtttacggcaagggcgcgaagttcaaggttcccgatcgcgacacgctggcgcgttacgtcggccgcaaggccgccctagtcgcgcggctcgttccgctgctcgaggcggatttggcggcctgcggcatgcgttcgcttttttacgacctggagctgccgctttcatccgaactcgccgtcatggagacggtcggcgtccgcgtcgacgcggcggcgctcgccgcctacggcgaggaattgcgcgaggcggcggcgaaagtcgagcgggagatttacgagctggccgggacgacgttcaacatcggatcgacgaaacagctcggcgaaattttgttcgataagctggggctgcccgtcgtcaagaaaacgaaaaccggctattccaccgacgcagacgtgctggaggaactggcgccgtaccatccgatcgtcgaaaagattttgcattaccgccaactgacgaaattgcagtcgacctacatcgaggggcttttgaaagaaatccgtccgcaaaccggtaaaatccatacgtattatcagcagacgatcgcggcgacggggcggctgagcagtcagtttcccaatcttcagaacattccgatccgtctcgaagaggggcggaaaatccgcaaggcgttcgttccgtcagaaccgggatggctgatgctcgccgccgactattcgcagatcgaactgcgcgtgctcgcgcacgtttccggcgacgaacggctgaaggaagcgtttcggacaggcatggacatccacacgaagaccgcgatggacgtgttcggcgtttccgaagaccgcgtcgacgcgcgcatgcggcggcaggcgaaggcggtcaatttcggcatcatctacggcatcagcgatttcggactggcgcaaaacctgaacatttcccgcaaggaggcggcggagttcatccggcaatatttcgccgtcttttcgggcgtcaaggcgtaccgcgagcggatcgtcgagcaggcgcgccgcgacggttacgtgacgaccctgctcggtcgcaggcgctatttgccggacatcaacggttcgaattacaacctccgctcgttcgcggagcggacggcgatgaatacgccgatccagggcacggccgccgacatcatcaagaccgcgatggtgcgtctgacgcggcggatgcgcgacgtcggactgaagagccgcatgctgctgcaggttcacgacgagctcgtgtttgaagtgccgccggacgagctcgacgcgatgcgggagcttgtgacggacgtcatggagtcggcggtcccgctcgacgtgccgctgaaggtcgacgtcagctggggcgccgactggtacgcggcgaagtgagggaagcgggatcc

SEQ ID NO: 1157 - DNA, 2792 bp, Artificial Sequence
  Description of Artificial Sequence: Synthetic Caldibacillus cellulovorans CompA.2 DNA Polymerase A827H
atgaaatacctgctgccgaccgctgctgctggtctgctgctcctcgctgcccagccggcgatggccatgggcaaactgattctggtcgacggaaacagcgtcgccaaccgggcgttttacgccgtccggctgctcagcacgcgcggcggcctgcacacaaacgcggtgtacggattcgccaacatgttgctcaagctgatcgaggaggaacggccgacgcattttctcgtcgcgttcgacgcgggcaaggcgacgttccgtcatcgcgaatacgaggcctacaaggcgggtcgcctgcagacgccgcccgagctgtccgagcagtttccgtacatccgggagctcgtccgggcgttcggcgtcgcgtccggcgagctggaggaatacgaggcggacgacatgatcggtacgctggcgaaacgggcggaggccgagggcgtcgacacgctggtcgtcaccggcgaccgcgatttgctccagctcgtatcggaccgcgtgaccgtcgcgctgacgcgcaagggcatcacggaaacggagcggtacgacccggcgcgcatccgcgaggaatacggcttcgatcccgaccgcatccgcgacctcaaagggctgatgggcgacgcgtctgacaatcttcccggcgttcccggcgtcggtgagaaaaccgcactgaaactgctcaggcagtacggttcgctggagagcgtcctggaacacgcgtcggaaatcgccggaaagctcggtgaaaatctgcgggcgcacgccgacgccgcccgattgagcaagcggctggcgacgatcgactgcgcggtaccgttgcagtcgggatgggactggctgcgcctcggcgaaccggaccgcgccgcgctcgcctcgctgttgcggcagctcgaattcaagtcgctgttgaaacggctcggactcgacggcacgtccgccgatgccgacgtcgacggcgtccgttcctccgcgcggccggcggacgagaaacggccgagggccgtcgccgtcgctgaggagggcgtcgacgtccgctgtccggatcgcccggaagaagtcgaagaagcgctgtcgcggctggaagccgcccagtcggtcgtcgtcgaggtgacgggcgacaacccgcacgacggcgaagtgcgcggcgtcgcatggtgggacggacatacggcgtatttcattccgtttgaacggctggtgcagtccgacatgcggccgctggccgactggctcgccgacgcgcgtcggccgaagcgtacgcacgactcccatcgcgctgaagtggcgctgttctggcacggccttgcgtttcgcggcacgtcgttctgcacgcatatcgccgcctatttgctcgaccccacggaatcgcgccatacgctggcggacctgtcgcgccgctacggtctgccgccggtaccggaagccgaggacgtttacggcaagggcgcgaagttcaaggttcccgatcgcgacacgctggcgcgttacgtcggccgcaaggccgccctagtcgcgcggctcgttccgctgctcgaggcggatttggcggcctgcggcatgcgttcgcttttttacgacctggagctgccgctttcatccgaactcgccgtcatggagacggtcggcgtccgcgtcgacgcggcggcgctcgccgcctacggcgaggaattgcgcgaggcggcggcgaaagtcgagcgggagatttacgagctggccgggacgacgttcaacatcggatcgacgaaacagctcggcgaaattttgttcgataagctggggctgcccgtcgtcaagaaaacgaaaaccggctattccaccgacgcagacgtgctggaggaactggcgccgtaccatccgatcgtcgaaaagattttgcattaccgccaactgacgaaattgcagtcgacctacatcgaggggcttttgaaagaaatccgtccgcaaaccggtaaaatccatacgtattatcagcagacgatcgcggcgacggggcggctgagcagtcagtttcccaatcttcagaacattccgatccgtctcgaagaggggcggaaaatccgcaaggcgttcgttccgtcagaaccgggatggctgatgctcgccgccgactattcgcagatcgaactgcgcgtgctcgcgcacgtttccggcgacgaacggctgaaggaagcgtttcggacaggcatggacatccacacgaagaccgcgatggacgtgttcggcgtttccgaagaccgcgtcgacgcgcgcatgcggcggcaggcgaaggcggtcaatttcggcatcatctacggcatcagcgatttcggactggcgcaaaacctgaacatttcccgcaaggaggcggcggagttcatccggcaatatttcgccgtcttttcgggcgtcaaggcgtaccgcgagcggatcgtcgagcaggcgcgccgcgacggttacgtgacgaccctgctcggtcgcaggcgctatttgccggacatcaaccattcgaattacaacctccgctcgttcgcggagcggacggcgatgaatacgccgatccagggcacggccgccgacatcatcaagaccgcgatggtgcgtctgacgcggcggatgcgcgacgtcggactgaagagccgcatgctgctgcaggttcacgacgagctcgtgtttgaagtgccgccggacgagctcgacgcgatgcgggagcttgtgacggacgtcatggagtcggcggtcccgctcgacgtgccgctgaaggtcgacgtcagctggggcgccgactggtacgcggcgaagtgagggaagcgggatcc

SEQ ID NO: 1158 - DNA, 2792 bp, Artificial Sequence
  Description of Artificial Sequence: Synthetic Caldibacillus cellulovorans CompA.2 DNA Polymerase A827I
atgaaatacctgctgccgaccgctgctgctggtctgctgctcctcgctgcccagccggcgatggccatgggcaaactgattctggtcgacggaaacagcgtcgccaaccgggcgttttacgccgtccggctgctcagcacgcgcggcggcctgcacacaaacgcggtgtacggattcgccaacatgttgctcaagctgatcgaggaggaacggccgacgcattttctcgtcgcgttcgacgcgggcaaggcgacgttccgtcatcgcgaatacgaggcctacaaggcgggtcgcctgcagacgccgcccgagctgtccgagcagtttccgtacatccgggagctcgtccgggcgttcggcgtcgcgtccggcgagctggaggaatacgaggcggacgacatgatcggtacgctggcgaaacgggcggaggccgagggcgtcgacacgctggtcgtcaccggcgaccgcgatttgctccagctcgtatcggaccgcgtgaccgtcgcgctgacgcgcaagggcatcacggaaacggagcggtacgacccggcgcgcatccgcgaggaatacggcttcgatcccgaccgcatccgcgacctcaaagggctgatgggcgacgcgtctgacaatcttcccggcgttcccggcgtcggtgagaaaaccgcactgaaactgctcaggcagtacggttcgctggagagcgtcctggaacacgcgtcggaaatcgccggaaagctcggtgaaaatctgcgggcgcacgccgacgccgcccgattgagcaagcggctggcgacgatcgactgcgcggtaccgttgcagtcgggatgggactggctgcgcctcggcgaaccggaccgcgccgcgctcgcctcgctgttgcggcagctcgaattcaagtcgctgttgaaacggctcggactcgacggcacgtccgccgatgccgacgtcgacggcgtccgttcctccgcgcggccggcggacgagaaacggccgagggccgtcgccgtcgctgaggagggcgtcgacgtccgctgtccggatcgcccggaagaagtcgaagaagcgctgtcgcggctggaagccgcccagtcggtcgtcgtcgaggtgacgggcgacaacccgcacgacggcgaagtgcgcggcgtcgcatggtgggacggacatacggcgtatttcattccgtttgaacggctggtgcagtccgacatgcggccgctggccgactggctcgccgacgcgcgtcggccgaagcgtacgcacgactcccatcgcgctgaagtggcgctgttctggcacggccttgcgtttcgcggcacgtcgttctgcacgcatatcgccgcctatttgctcgaccccacggaatcgcgccatacgctggcggacctgtcgcgccgctacggtctgccgccggtaccggaagccgaggacgtttacggcaagggcgcgaagttcaaggttcccgatcgcgacacgctggcgcgttacgtcggccgcaaggccgccctagtcgcgcggctcgttccgctgctcgaggcggatttggcggcctgcggcatgcgttcgcttttttacgacctggagctgccgctttcatccgaactcgccgtcatggagacggtcggcgtccgcgtcgacgcggcggcgctcgccgcctacggcgaggaattgcgcgaggcggcggcgaaagtcgagcgggagatttacgagctggccgggacgacgttcaacatcggatcgacgaaacagctcggcgaaattttgttcgataagctggggctgcccgtcgtcaagaaaacgaaaaccggctattccaccgacgcagacgtgctggaggaactggcgccgtaccatccgatcgtcgaaaagattttgcattaccgccaactgacgaaattgcagtcgacctacatcgaggggcttttgaaagaaatccgtccgcaaaccggtaaaatccatacgtattatcagcagacgatcgcggcgacggggcggctgagcagtcagtttcccaatcttcagaacattccgatccgtctcgaagaggggcggaaaatccgcaaggcgttcgttccgtcagaaccgggatggctgatgctcgccgccgactattcgcagatcgaactgcgcgtgctcgcgcacgtttccggcgacgaacggctgaaggaagcgtttcggacaggcatggacatccacacgaagaccgcgatggacgtgttcggcgtttccgaagaccgcgtcgacgcgcgcatgcggcggcaggcgaaggcggtcaatttcggcatcatctacggcatcagcgatttcggactggcgcaaaacctgaacatttcccgcaaggaggcggcggagttcatccggcaatatttcgccgtcttttcgggcgtcaaggcgtaccgcgagcggatcgtcgagcaggcgcgccgcgacggttacgtgacgaccctgctcggtcgcaggcgctatttgccggacatcaacatttcgaattacaacctccgctcgttcgcggagcggacggcgatgaatacgccgatccagggcacggccgccgacatcatcaagaccgcgatggtgcgtctgacgcggcggatgcgcgacgtcggactgaagagccgcatgctgctgcaggttcacgacgagctcgtgtttgaagtgccgccggacgagctcgacgcgatgcgggagcttgtgacggacgtcatggagtcggcggtcccgctcgacgtgccgctgaaggtcgacgtcagctggggcgccgactggtacgcggcgaagtgagggaagcgggatcc

SEQ ID NO: 1159 - DNA, 2792 bp, Artificial Sequence
  Description of Artificial Sequence: Synthetic Caldibacillus cellulovorans CompA.2 DNA Polymerase A827L
atgaaatacctgctgccgaccgctgctgctggtctgctgctcctcgctgcccagccggcgatggccatgggcaaactgattctggtcgacggaaacagcgtcgccaaccgggcgttttacgccgtccggctgctcagcacgcgcggcggcctgcacacaaacgcggtgtacggattcgccaacatgttgctcaagctgatcgaggaggaacggccgacgcattttctcgtcgcgttcgacgcgggcaaggcgacgttccgtcatcgcgaatacgaggcctacaaggcgggtcgcctgcagacgccgcccgagctgtccgagcagtttccgtacatccgggagctcgtccgggcgttcggcgtcgcgtccggcgagctggaggaatacgaggcggacgacatgatcggtacgctggcgaaacgggcggaggccgagggcgtcgacacgctggtcgtcaccggcgaccgcgatttgctccagctcgtatcggaccgcgtgaccgtcgcgctgacgcgcaagggcatcacggaaacggagcggtacgacccggcgcgcatccgcgaggaatacggcttcgatcccgaccgcatccgcgacctcaaagggctgatgggcgacgcgtctgacaatcttcccggcgttcccggcgtcggtgagaaaaccgcactgaaactgctcaggcagtacggttcgctggagagcgtcctggaacacgcgtcggaaatcgccggaaagctcggtgaaaatctgcgggcgcacgccgacgccgcccgattgagcaagcggctggcgacgatcgactgcgcggtaccgttgcagtcgggatgggactggctgcgcctcggcgaaccggaccgcgccgcgctcgcctcgctgttgcggcagctcgaattcaagtcgctgttgaaacggctcggactcgacggcacgtccgccgatgccgacgtcgacggcgtccgttcctccgcgcggccggcggacgagaaacggccgagggccgtcgccgtcgctgaggagggcgtcgacgtccgctgtccggatcgcccggaagaagtcgaagaagcgctgtcgcggctggaagccgcccagtcggtcgtcgtcgaggtgacgggcgacaacccgcacgacggcgaagtgcgcggcgtcgcatggtgggacggacatacggcgtatttcattccgtttgaacggctggtgcagtccgacatgcggccgctggccgactggctcgccgacgcgcgtcggccgaagcgtacgcacgactcccatcgcgctgaagtggcgctgttctggcacggccttgcgtttcgcggcacgtcgttctgcacgcatatcgccgcctatttgctcgaccccacggaatcgcgccatacgctggcggacctgtcgcgccgctacggtctgccgccggtaccggaagccgaggacgtttacggcaagggcgcgaagttcaaggttcccgatcgcgacacgctggcgcgttacgtcggccgcaaggccgccctagtcgcgcggctcgttccgctgctcgaggcggatttggcggcctgcggcatgcgttcgcttttttacgacctggagctgccgctttcatccgaactcgccgtcatggagacggtcggcgtccgcgtcgacgcggcggcgctcgccgcctacggcgaggaattgcgcgaggcggcggcgaaagtcgagcgggagatttacgagctggccgggacgacgttcaacatcggatcgacgaaacagctcggcgaaattttgttcgataagctggggctgcccgtcgtcaagaaaacgaaaaccggctattccaccgacgcagacgtgctggaggaactggcgccgtaccatccgatcgtcgaaaagattttgcattaccgccaactgacgaaattgcagtcgacctacatcgaggggcttttgaaagaaatccgtccgcaaaccggtaaaatccatacgtattatcagcagacgatcgcggcgacggggcggctgagcagtcagtttcccaatcttcagaacattccgatccgtctcgaagaggggcggaaaatccgcaaggcgttcgttccgtcagaaccgggatggctgatgctcgccgccgactattcgcagatcgaactgcgcgtgctcgcgcacgtttccggcgacgaacggctgaaggaagcgtttcggacaggcatggacatccacacgaagaccgcgatggacgtgttcggcgtttccgaagaccgcgtcgacgcgcgcatgcggcggcaggcgaaggcggtcaatttcggcatcatctacggcatcagcgatttcggactggcgcaaaacctgaacatttcccgcaaggaggcggcggagttcatccggcaatatttcgccgtcttttcgggcgtcaaggcgtaccgcgagcggatcgtcgagcaggcgcgccgcgacggttacgtgacgaccctgctcggtcgcaggcgctatttgccggacatcaacctttcgaattacaacctccgctcgttcgcggagcggacggcgatgaatacgccgatccagggcacggccgccgacatcatcaagaccgcgatggtgcgtctgacgcggcggatgcgcgacgtcggactgaagagccgcatgctgctgcaggttcacgacgagctcgtgtttgaagtgccgccggacgagctcgacgcgatgcgggagcttgtgacggacgtcatggagtcggcggtcccgctcgacgtgccgctgaaggtcgacgtcagctggggcgccgactggtacgcggcgaagtgagggaagcgggatcc

SEQ ID NO: 1160 - DNA, 2792 bp, Artificial Sequence
  Description of Artificial Sequence: Synthetic Caldibacillus cellulovorans CompA.2 DNA Polymerase A827K
atgaaatacctgctgccgaccgctgctgctggtctgctgctcctcgctgcccagccggcgatggccatgggcaaactgattctggtcgacggaaacagcgtcgccaaccgggcgttttacgccgtccggctgctcagcacgcgcggcggcctgcacacaaacgcggtgtacggattcgccaacatgttgctcaagctgatcgaggaggaacggccgacgcattttctcgtcgcgttcgacgcgggcaaggcgacgttccgtcatcgcgaatacgaggcctacaaggcgggtcgcctgcagacgccgcccgagctgtccgagcagtttccgtacatccgggagctcgtccgggcgttcggcgtcgcgtccggcgagctggaggaatacgaggcggacgacatgatcggtacgctggcgaaacgggcggaggccgagggcgtcgacacgctggtcgtcaccggcgaccgcgatttgctccagctcgtatcggaccgcgtgaccgtcgcgctgacgcgcaagggcatcacggaaacggagcggtacgacccggcgcgcatccgcgaggaatacggcttcgatcccgaccgcatccgcgacctcaaagggctgatgggcgacgcgtctgacaatcttcccggcgttcccggcgtcggtgagaaaaccgcactgaaactgctcaggcagtacggttcgctggagagcgtcctggaacacgcgtcggaaatcgccggaaagctcggtgaaaatctgcgggcgcacgccgacgccgcccgattgagcaagcggctggcgacgatcgactgcgcggtaccgttgcagtcgggatgggactggctgcgcctcggcgaaccggaccgcgccgcgctcgcctcgctgttgcggcagctcgaattcaagtcgctgttgaaacggctcggactcgacggcacgtccgccgatgccgacgtcgacggcgtccgttcctccgcgcggccggcggacgagaaacggccgagggccgtcgccgtcgctgaggagggcgtcgacgtccgctgtccggatcgcccggaagaagtcgaagaagcgctgtcgcggctggaagccgcccagtcggtcgtcgtcgaggtgacgggcgacaacccgcacgacggcgaagtgcgcggcgtcgcatggtgggacggacatacggcgtatttcattccgtttgaacggctggtgcagtccgacatgcggccgctggccgactggctcgccgacgcgcgtcggccgaagcgtacgcacgactcccatcgcgctgaagtggcgctgttctggcacggccttgcgtttcgcggcacgtcgttctgcacgcatatcgccgcctatttgctcgaccccacggaatcgcgccatacgctggcggacctgtcgcgccgctacggtctgccgccggtaccggaagccgaggacgtttacggcaagggcgcgaagttcaaggttcccgatcgcgacacgctggcgcgttacgtcggccgcaaggccgccctagtcgcgcggctcgttccgctgctcgaggcggatttggcggcctgcggcatgcgttcgcttttttacgacctggagctgccgctttcatccgaactcgccgtcatggagacggtcggcgtccgcgtcgacgcggcggcgctcgccgcctacggcgaggaattgcgcgaggcggcggcgaaagtcgagcgggagatttacgagctggccgggacgacgttcaacatcggatcgacgaaacagctcggcgaaattttgttcgataagctggggctgcccgtcgtcaagaaaacgaaaaccggctattccaccgacgcagacgtgctggaggaactggcgccgtaccatccgatcgtcgaaaagattttgcattaccgccaactgacgaaattgcagtcgacctacatcgaggggcttttgaaagaaatccgtccgcaaaccggtaaaatccatacgtattatcagcagacgatcgcggcgacggggcggctgagcagtcagtttcccaatcttcagaacattccgatccgtctcgaagaggggcggaaaatccgcaaggcgttcgttccgtcagaaccgggatggctgatgctcgccgccgactattcgcagatcgaactgcgcgtgctcgcgcacgtttccggcgacgaacggctgaaggaagcgtttcggacaggcatggacatccacacgaagaccgcgatggacgtgttcggcgtttccgaagaccgcgtcgacgcgcgcatgcggcggcaggcgaaggcggtcaatttcggcatcatctacggcatcagcgatttcggactggcgcaaaacctgaacatttcccgcaaggaggcggcggagttcatccggcaatatttcgccgtcttttcgggcgtcaaggcgtaccgcgagcggatcgtcgagcaggcgcgccgcgacggttacgtgacgaccctgctcggtcgcaggcgctatttgccggacatcaacaaatcgaattacaacctccgctcgttcgcggagcggacggcgatgaatacgccgatccagggcacggccgccgacatcatcaagaccgcgatggtgcgtctgacgcggcggatgcgcgacgtcggactgaagagccgcatgctgctgcaggttcacgacgagctcgtgtttgaagtgccgccggacgagctcgacgcgatgcgggagcttgtgacggacgtcatggagtcggcggtcccgctcgacgtgccgctgaaggtcgacgtcagctggggcgccgactggtacgcggcgaagtgagggaagcgggatcc

SEQ ID NO: 1161 - DNA, 2792 bp, Artificial Sequence
  Description of Artificial Sequence: Synthetic Caldibacillus cellulovorans CompA.2 DNA Polymerase A827M
atgaaatacctgctgccgaccgctgctgctggtctgctgctcctcgctgcccagccggcgatggccatgggcaaactgattctggtcgacggaaacagcgtcgccaaccgggcgttttacgccgtccggctgctcagcacgcgcggcggcctgcacacaaacgcggtgtacggattcgccaacatgttgctcaagctgatcgaggaggaacggccgacgcattttctcgtcgcgttcgacgcgggcaaggcgacgttccgtcatcgcgaatacgaggcctacaaggcgggtcgcctgcagacgccgcccgagctgtccgagcagtttccgtacatccgggagctcgtccgggcgttcggcgtcgcgtccggcgagctggaggaatacgaggcggacgacatgatcggtacgctggcgaaacgggcggaggccgagggcgtcgacacgctggtcgtcaccggcgaccgcgatttgctccagctcgtatcggaccgcgtgaccgtcgcgctgacgcgcaagggcatcacggaaacggagcggtacgacccggcgcgcatccgcgaggaatacggcttcgatcccgaccgcatccgcgacctcaaagggctgatgggcgacgcgtctgacaatcttcccggcgttcccggcgtcggtgagaaaaccgcactgaaactgctcaggcagtacggttcgctggagagcgtcctggaacacgcgtcggaaatcgccggaaagctcggtgaaaatctgcgggcgcacgccgacgccgcccgattgagcaagcggctggcgacgatcgactgcgcggtaccgttgcagtcgggatgggactggctgcgcctcggcgaaccggaccgcgccgcgctcgcctcgctgttgcggcagctcgaattcaagtcgctgttgaaacggctcggactcgacggcacgtccgccgatgccgacgtcgacggcgtccgttcctccgcgcggccggcggacgagaaacggccgagggccgtcgccgtcgctgaggagggcgtcgacgtccgctgtccggatcgcccggaagaagtcgaagaagcgctgtcgcggctggaagccgcccagtcggtcgtcgtcgaggtgacgggcgacaacccgcacgacggcgaagtgcgcggcgtcgcatggtgggacggacatacggcgtatttcattccgtttgaacggctggtgcagtccgacatgcggccgctggccgactggctcgccgacgcgcgtcggccgaagcgtacgcacgactcccatcgcgctgaagtggcgctgttctggcacggccttgcgtttcgcggcacgtcgttctgcacgcatatcgccgcctatttgctcgaccccacggaatcgcgccatacgctggcggacctgtcgcgccgctacggtctgccgccggtaccggaagccgaggacgtttacggcaagggcgcgaagttcaaggttcccgatcgcgacacgctggcgcgttacgtcggccgcaaggccgccctagtcgcgcggctcgttccgctgctcgaggcggatttggcggcctgcggcatgcgttcgcttttttacgacctggagctgccgctttcatccgaactcgccgtcatggagacggtcggcgtccgcgtcgacgcggcggcgctcgccgcctacggcgaggaattgcgcgaggcggcggcgaaagtcgagcgggagatttacgagctggccgggacgacgttcaacatcggatcgacgaaacagctcggcgaaattttgttcgataagctggggctgcccgtcgtcaagaaaacgaaaaccggctattccaccgacgcagacgtgctggaggaactggcgccgtaccatccgatcgtcgaaaagattttgcattaccgccaactgacgaaattgcagtcgacctacatcgaggggcttttgaaagaaatccgtccgcaaaccggtaaaatccatacgtattatcagcagacgatcgcggcgacggggcggctgagcagtcagtttcccaatcttcagaacattccgatccgtctcgaagaggggcggaaaatccgcaaggcgttcgttccgtcagaaccgggatggctgatgctcgccgccgactattcgcagatcgaactgcgcgtgctcgcgcacgtttccggcgacgaacggctgaaggaagcgtttcggacaggcatggacatccacacgaagaccgcgatggacgtgttcggcgtttccgaagaccgcgtcgacgcgcgcatgcggcggcaggcgaaggcggtcaatttcggcatcatctacggcatcagcgatttcggactggcgcaaaacctgaacatttcccgcaaggaggcggcggagttcatccggcaatatttcgccgtcttttcgggcgtcaaggcgtaccgcgagcggatcgtcgagcaggcgcgccgcgacggttacgtgacgaccctgctcggtcgcaggcgctatttgccggacatcaacatgtcgaattacaacctccgctcgttcgcggagcggacggcgatgaatacgccgatccagggcacggccgccgacatcatcaagaccgcgatggtgcgtctgacgcggcggatgcgcgacgtcggactgaagagccgcatgctgctgcaggttcacgacgagctcgtgtttgaagtgccgccggacgagctcgacgcgatgcgggagcttgtgacggacgtcatggagtcggcggtcccgctcgacgtgccgctgaaggtcgacgtcagctggggcgccgactggtacgcggcgaagtgagggaagcgggatcc

SEQ ID NO: 1162 - DNA, 2792 bp, Artificial Sequence
  Description of Artificial Sequence: Synthetic Caldibacillus cellulovorans CompA.2 DNA Polymerase A827F
atgaaatacctgctgccgaccgctgctgctggtctgctgctcctcgctgcccagccggcgatggccatgggcaaactgattctggtcgacggaaacagcgtcgccaaccgggcgttttacgccgtccggctgctcagcacgcgcggcggcctgcacacaaacgcggtgtacggattcgccaacatgttgctcaagctgatcgaggaggaacggccgacgcattttctcgtcgcgttcgacgcgggcaaggcgacgttccgtcatcgcgaatacgaggcctacaaggcgggtcgcctgcagacgccgcccgagctgtccgagcagtttccgtacatccgggagctcgtccgggcgttcggcgtcgcgtccggcgagctggaggaatacgaggcggacgacatgatcggtacgctggcgaaacgggcggaggccgagggcgtcgacacgctggtcgtcaccggcgaccgcgatttgctccagctcgtatcggaccgcgtgaccgtcgcgctgacgcgcaagggcatcacggaaacggagcggtacgacccggcgcgcatccgcgaggaatacggcttcgatcccgaccgcatccgcgacctcaaagggctgatgggcgacgcgtctgacaatcttcccggcgttcccggcgtcggtgagaaaaccgcactgaaactgctcaggcagtacggttcgctggagagcgtcctggaacacgcgtcggaaatcgccggaaagctcggtgaaaatctgcgggcgcacgccgacgccgcccgattgagcaagcggctggcgacgatcgactgcgcggtaccgttgcagtcgggatgggactggctgcgcctcggcgaaccggaccgcgccgcgctcgcctcgctgttgcggcagctcgaattcaagtcgctgttgaaacggctcggactcgacggcacgtccgccgatgccgacgtcgacggcgtccgttcctccgcgcggccggcggacgagaaacggccgagggccgtcgccgtcgctgaggagggcgtcgacgtccgctgtccggatcgcccggaagaagtcgaagaagcgctgtcgcggctggaagccgcccagtcggtcgtcgtcgaggtgacgggcgacaacccgcacgacggcgaagtgcgcggcgtcgcatggtgggacggacatacggcgtatttcattccgtttgaacggctggtgcagtccgacatgcggccgctggccgactggctcgccgacgcgcgtcggccgaagcgtacgcacgactcccatcgcgctgaagtggcgctgttctggcacggccttgcgtttcgcggcacgtcgttctgcacgcatatcgccgcctatttgctcgaccccacggaatcgcgccatacgctggcggacctgtcgcgccgctacggtctgccgccggtaccggaagccgaggacgtttacggcaagggcgcgaagttcaaggttcccgatcgcgacacgctggcgcgttacgtcggccgcaaggccgccctagtcgcgcggctcgttccgctgctcgaggcggatttggcggcctgcggcatgcgttcgcttttttacgacctggagctgccgctttcatccgaactcgccgtcatggagacggtcggcgtccgcgtcgacgcggcggcgctcgccgcctacggcgaggaattgcgcgaggcggcggcgaaagtcgagcgggagatttacgagctggccgggacgacgttcaacatcggatcgacgaaacagctcggcgaaattttgttcgataagctggggctgcccgtcgtcaagaaaacgaaaaccggctattccaccgacgcagacgtgctggaggaactggcgccgtaccatccgatcgtcgaaaagattttgcattaccgccaactgacgaaattgcagtcgacctacatcgaggggcttttgaaagaaatccgtccgcaaaccggtaaaatccatacgtattatcagcagacgatcgcggcgacggggcggctgagcagtcagtttcccaatcttcagaacattccgatccgtctcgaagaggggcggaaaatccgcaaggcgttcgttccgtcagaaccgggatggctgatgctcgccgccgactattcgcagatcgaactgcgcgtgctcgcgcacgtttccggcgacgaacggctgaaggaagcgtttcggacaggcatggacatccacacgaagaccgcgatggacgtgttcggcgtttccgaagaccgcgtcgacgcgcgcatgcggcggcaggcgaaggcggtcaatttcggcatcatctacggcatcagcgatttcggactggcgcaaaacctgaacatttcccgcaaggaggcggcggagttcatccggcaatatttcgccgtcttttcgggcgtcaaggcgtaccgcgagcggatcgtcgagcaggcgcgccgcgacggttacgtgacgaccctgctcggtcgcaggcgctatttgccggacatcaacttttcgaattacaacctccgctcgttcgcggagcggacggcgatgaatacgccgatccagggcacggccgccgacatcatcaagaccgcgatggtgcgtctgacgcggcggatgcgcgacgtcggactgaagagccgcatgctgctgcaggttcacgacgagctcgtgtttgaagtgccgccggacgagctcgacgcgatgcgggagcttgtgacggacgtcatggagtcggcggtcccgctcgacgtgccgctgaaggtcgacgtcagctggggcgccgactggtacgcggcgaagtgagggaagcgggatcc

SEQ ID NO: 1163 - DNA, 2792 bp, Artificial Sequence
  Description of Artificial Sequence: Synthetic Caldibacillus cellulovorans CompA.2 DNA Polymerase A827P
atgaaatacctgctgccgaccgctgctgctggtctgctgctcctcgctgcccagccggcgatggccatgggcaaactgattctggtcgacggaaacagcgtcgccaaccgggcgttttacgccgtccggctgctcagcacgcgcggcggcctgcacacaaacgcggtgtacggattcgccaacatgttgctcaagctgatcgaggaggaacggccgacgcattttctcgtcgcgttcgacgcgggcaaggcgacgttccgtcatcgcgaatacgaggcctacaaggcgggtcgcctgcagacgccgcccgagctgtccgagcagtttccgtacatccgggagctcgtccgggcgttcggcgtcgcgtccggcgagctggaggaatacgaggcggacgacatgatcggtacgctggcgaaacgggcggaggccgagggcgtcgacacgctggtcgtcaccggcgaccgcgatttgctccagctcgtatcggaccgcgtgaccgtcgcgctgacgcgcaagggcatcacggaaacggagcggtacgacccggcgcgcatccgcgaggaatacggcttcgatcccgaccgcatccgcgacctcaaagggctgatgggcgacgcgtctgacaatcttcccggcgttcccggcgtcggtgagaaaaccgcactgaaactgctcaggcagtacggttcgctggagagcgtcctggaacacgcgtcggaaatcgccggaaagctcggtgaaaatctgcgggcgcacgccgacgccgcccgattgagcaagcggctggcgacgatcgactgcgcggtaccgttgcagtcgggatgggactggctgcgcctcggcgaaccggaccgcgccgcgctcgcctcgctgttgcggcagctcgaattcaagtcgctgttgaaacggctcggactcgacggcacgtccgccgatgccgacgtcgacggcgtccgttcctccgcgcggccggcggacgagaaacggccgagggccgtcgccgtcgctgaggagggcgtcgacgtccgctgtccggatcgcccggaagaagtcgaagaagcgctgtcgcggctggaagccgcccagtcggtcgtcgtcgaggtgacgggcgacaacccgcacgacggcgaagtgcgcggcgtcgcatggtgggacggacatacggcgtatttcattccgtttgaacggctggtgcagtccgacatgcggccgctggccgactggctcgccgacgcgcgtcggccgaagcgtacgcacgactcccatcgcgctgaagtggcgctgttctggcacggccttgcgtttcgcggcacgtcgttctgcacgcatatcgccgcctatttgctcgaccccacggaatcgcgccatacgctggcggacctgtcgcgccgctacggtctgccgccggtaccggaagccgaggacgtttacggcaagggcgcgaagttcaaggttcccgatcgcgacacgctggcgcgttacgtcggccgcaaggccgccctagtcgcgcggctcgttccgctgctcgaggcggatttggcggcctgcggcatgcgttcgcttttttacgacctggagctgccgctttcatccgaactcgccgtcatggagacggtcggcgtccgcgtcgacgcggcggcgctcgccgcctacggcgaggaattgcgcgaggcggcggcgaaagtcgagcgggagatttacgagctggccgggacgacgttcaacatcggatcgacgaaacagctcggcgaaattttgttcgataagctggggctgcccgtcgtcaagaaaacgaaaaccggctattccaccgacgcagacgtgctggaggaactggcgccgtaccatccgatcgtcgaaaagattttgcattaccgccaactgacgaaattgcagtcgacctacatcgaggggcttttgaaagaaatccgtccgcaaaccggtaaaatccatacgtattatcagcagacgatcgcggcgacggggcggctgagcagtcagtttcccaatcttcagaacattccgatccgtctcgaagaggggcggaaaatccgcaaggcgttcgttccgtcagaaccgggatggctgatgctcgccgccgactattcgcagatcgaactgcgcgtgctcgcgcacgtttccggcgacgaacggctgaaggaagcgtttcggacaggcatggacatccacacgaagaccgcgatggacgtgttcggcgtttccgaagaccgcgtcgacgcgcgcatgcggcggcaggcgaaggcggtcaatttcggcatcatctacggcatcagcgatttcggactggcgcaaaacctgaacatttcccgcaaggaggcggcggagttcatccggcaatatttcgccgtcttttcgggcgtcaaggcgtaccgcgagcggatcgtcgagcaggcgcgccgcgacggttacgtgacgaccctgctcggtcgcaggcgctatttgccggacatcaacccttcgaattacaacctccgctcgttcgcggagcggacggcgatgaatacgccgatccagggcacggccgccgacatcatcaagaccgcgatggtgcgtctgacgcggcggatgcgcgacgtcggactgaagagccgcatgctgctgcaggttcacgacgagctcgtgtttgaagtgccgccggacgagctcgacgcgatgcgggagcttgtgacggacgtcatggagtcggcggtcccgctcgacgtgccgctgaaggtcgacgtcagctggggcgccgactggtacgcggcgaagtgagggaagcgggatcc

SEQ ID NO: 1164 - DNA, 2792 bp, Artificial Sequence
  Description of Artificial Sequence: Synthetic Caldibacillus cellulovorans CompA.2 DNA Polymerase A827S
atgaaatacctgctgccgaccgctgctgctggtctgctgctcctcgctgcccagccggcgatggccatgggcaaactgattctggtcgacggaaacagcgtcgccaaccgggcgttttacgccgtccggctgctcagcacgcgcggcggcctgcacacaaacgcggtgtacggattcgccaacatgttgctcaagctgatcgaggaggaacggccgacgcattttctcgtcgcgttcgacgcgggcaaggcgacgttccgtcatcgcgaatacgaggcctacaaggcgggtcgcctgcagacgccgcccgagctgtccgagcagtttccgtacatccgggagctcgtccgggcgttcggcgtcgcgtccggcgagctggaggaatacgaggcggacgacatgatcggtacgctggcgaaacgggcggaggccgagggcgtcgacacgctggtcgtcaccggcgaccgcgatttgctccagctcgtatcggaccgcgtgaccgtcgcgctgacgcgcaagggcatcacggaaacggagcggtacgacccggcgcgcatccgcgaggaatacggcttcgatcccgaccgcatccgcgacctcaaagggctgatgggcgacgcgtctgacaatcttcccggcgttcccggcgtcggtgagaaaaccgcactgaaactgctcaggcagtacggttcgctggagagcgtcctggaacacgcgtcggaaatcgccggaaagctcggtgaaaatctgcgggcgcacgccgacgccgcccgattgagcaagcggctggcgacgatcgactgcgcggtaccgttgcagtcgggatgggactggctgcgcctcggcgaaccggaccgcgccgcgctcgcctcgctgttgcggcagctcgaattcaagtcgctgttgaaacggctcggactcgacggcacgtccgccgatgccgacgtcgacggcgtccgttcctccgcgcggccggcggacgagaaacggccgagggccgtcgccgtcgctgaggagggcgtcgacgtccgctgtccggatcgcccggaagaagtcgaagaagcgctgtcgcggctggaagccgcccagtcggtcgtcgtcgaggtgacgggcgacaacccgcacgacggcgaagtgcgcggcgtcgcatggtgggacggacatacggcgtatttcattccgtttgaacggctggtgcagtccgacatgcggccgctggccgactggctcgccgacgcgcgtcggccgaagcgtacgcacgactcccatcgcgctgaagtggcgctgttctggcacggccttgcgtttcgcggcacgtcgttctgcacgcatatcgccgcctatttgctcgaccccacggaatcgcgccatacgctggcggacctgtcgcgccgctacggtctgccgccggtaccggaagccgaggacgtttacggcaagggcgcgaagttcaaggttcccgatcgcgacacgctggcgcgttacgtcggccgcaaggccgccctagtcgcgcggctcgttccgctgctcgaggcggatttggcggcctgcggcatgcgttcgcttttttacgacctggagctgccgctttcatccgaactcgccgtcatggagacggtcggcgtccgcgtcgacgcggcggcgctcgccgcctacggcgaggaattgcgcgaggcggcggcgaaagtcgagcgggagatttacgagctggccgggacgacgttcaacatcggatcgacgaaacagctcggcgaaattttgttcgataagctggggctgcccgtcgtcaagaaaacgaaaaccggctattccaccgacgcagacgtgctggaggaactggcgccgtaccatccgatcgtcgaaaagattttgcattaccgccaactgacgaaattgcagtcgacctacatcgaggggcttttgaaagaaatccgtccgcaaaccggtaaaatccatacgtattatcagcagacgatcgcggcgacggggcggctgagcagtcagtttcccaatcttcagaacattccgatccgtctcgaagaggggcggaaaatccgcaaggcgttcgttccgtcagaaccgggatggctgatgctcgccgccgactattcgcagatcgaactgcgcgtgctcgcgcacgtttccggcgacgaacggctgaaggaagcgtttcggacaggcatggacatccacacgaagaccgcgatggacgtgttcggcgtttccgaagaccgcgtcgacgcgcgcatgcggcggcaggcgaaggcggtcaatttcggcatcatctacggcatcagcgatttcggactggcgcaaaacctgaacatttcccgcaaggaggcggcggagttcatccggcaatatttcgccgtcttttcgggcgtcaaggcgtaccgcgagcggatcgtcgagcaggcgcgccgcgacggttacgtgacgaccctgctcggtcgcaggcgctatttgccggacatcaactcttcgaattacaacctccgctcgttcgcggagcggacggcgatgaatacgccgatccagggcacggccgccgacatcatcaagaccgcgatggtgcgtctgacgcggcggatgcgcgacgtcggactgaagagccgcatgctgctgcaggttcacgacgagctcgtgtttgaagtgccgccggacgagctcgacgcgatgcgggagcttgtgacggacgtcatggagtcggcggtcccgctcgacgtgccgctgaaggtcgacgtcagctggggcgccgactggtacgcggcgaagtgagggaagcgggatcc

SEQ ID NO: 1165 - DNA, 2792 bp, Artificial Sequence
  Description of Artificial Sequence: Synthetic Caldibacillus cellulovorans CompA.2 DNA Polymerase  A827T
atgaaatacctgctgccgaccgctgctgctggtctgctgctcctcgctgcccagccggcgatggccatgggcaaactgattctggtcgacggaaacagcgtcgccaaccgggcgttttacgccgtccggctgctcagcacgcgcggcggcctgcacacaaacgcggtgtacggattcgccaacatgttgctcaagctgatcgaggaggaacggccgacgcattttctcgtcgcgttcgacgcgggcaaggcgacgttccgtcatcgcgaatacgaggcctacaaggcgggtcgcctgcagacgccgcccgagctgtccgagcagtttccgtacatccgggagctcgtccgggcgttcggcgtcgcgtccggcgagctggaggaatacgaggcggacgacatgatcggtacgctggcgaaacgggcggaggccgagggcgtcgacacgctggtcgtcaccggcgaccgcgatttgctccagctcgtatcggaccgcgtgaccgtcgcgctgacgcgcaagggcatcacggaaacggagcggtacgacccggcgcgcatccgcgaggaatacggcttcgatcccgaccgcatccgcgacctcaaagggctgatgggcgacgcgtctgacaatcttcccggcgttcccggcgtcggtgagaaaaccgcactgaaactgctcaggcagtacggttcgctggagagcgtcctggaacacgcgtcggaaatcgccggaaagctcggtgaaaatctgcgggcgcacgccgacgccgcccgattgagcaagcggctggcgacgatcgactgcgcggtaccgttgcagtcgggatgggactggctgcgcctcggcgaaccggaccgcgccgcgctcgcctcgctgttgcggcagctcgaattcaagtcgctgttgaaacggctcggactcgacggcacgtccgccgatgccgacgtcgacggcgtccgttcctccgcgcggccggcggacgagaaacggccgagggccgtcgccgtcgctgaggagggcgtcgacgtccgctgtccggatcgcccggaagaagtcgaagaagcgctgtcgcggctggaagccgcccagtcggtcgtcgtcgaggtgacgggcgacaacccgcacgacggcgaagtgcgcggcgtcgcatggtgggacggacatacggcgtatttcattccgtttgaacggctggtgcagtccgacatgcggccgctggccgactggctcgccgacgcgcgtcggccgaagcgtacgcacgactcccatcgcgctgaagtggcgctgttctggcacggccttgcgtttcgcggcacgtcgttctgcacgcatatcgccgcctatttgctcgaccccacggaatcgcgccatacgctggcggacctgtcgcgccgctacggtctgccgccggtaccggaagccgaggacgtttacggcaagggcgcgaagttcaaggttcccgatcgcgacacgctggcgcgttacgtcggccgcaaggccgccctagtcgcgcggctcgttccgctgctcgaggcggatttggcggcctgcggcatgcgttcgcttttttacgacctggagctgccgctttcatccgaactcgccgtcatggagacggtcggcgtccgcgtcgacgcggcggcgctcgccgcctacggcgaggaattgcgcgaggcggcggcgaaagtcgagcgggagatttacgagctggccgggacgacgttcaacatcggatcgacgaaacagctcggcgaaattttgttcgataagctggggctgcccgtcgtcaagaaaacgaaaaccggctattccaccgacgcagacgtgctggaggaactggcgccgtaccatccgatcgtcgaaaagattttgcattaccgccaactgacgaaattgcagtcgacctacatcgaggggcttttgaaagaaatccgtccgcaaaccggtaaaatccatacgtattatcagcagacgatcgcggcgacggggcggctgagcagtcagtttcccaatcttcagaacattccgatccgtctcgaagaggggcggaaaatccgcaaggcgttcgttccgtcagaaccgggatggctgatgctcgccgccgactattcgcagatcgaactgcgcgtgctcgcgcacgtttccggcgacgaacggctgaaggaagcgtttcggacaggcatggacatccacacgaagaccgcgatggacgtgttcggcgtttccgaagaccgcgtcgacgcgcgcatgcggcggcaggcgaaggcggtcaatttcggcatcatctacggcatcagcgatttcggactggcgcaaaacctgaacatttcccgcaaggaggcggcggagttcatccggcaatatttcgccgtcttttcgggcgtcaaggcgtaccgcgagcggatcgtcgagcaggcgcgccgcgacggttacgtgacgaccctgctcggtcgcaggcgctatttgccggacatcaacacttcgaattacaacctccgctcgttcgcggagcggacggcgatgaatacgccgatccagggcacggccgccgacatcatcaagaccgcgatggtgcgtctgacgcggcggatgcgcgacgtcggactgaagagccgcatgctgctgcaggttcacgacgagctcgtgtttgaagtgccgccggacgagctcgacgcgatgcgggagcttgtgacggacgtcatggagtcggcggtcccgctcgacgtgccgctgaaggtcgacgtcagctggggcgccgactggtacgcggcgaagtgagggaagcgggatcc

SEQ ID NO: 1166 - DNA, 2792 bp, Artificial Sequence
  Description of Artificial Sequence: Synthetic Caldibacillus cellulovorans CompA.2 DNA Polymerase A827W
atgaaatacctgctgccgaccgctgctgctggtctgctgctcctcgctgcccagccggcgatggccatgggcaaactgattctggtcgacggaaacagcgtcgccaaccgggcgttttacgccgtccggctgctcagcacgcgcggcggcctgcacacaaacgcggtgtacggattcgccaacatgttgctcaagctgatcgaggaggaacggccgacgcattttctcgtcgcgttcgacgcgggcaaggcgacgttccgtcatcgcgaatacgaggcctacaaggcgggtcgcctgcagacgccgcccgagctgtccgagcagtttccgtacatccgggagctcgtccgggcgttcggcgtcgcgtccggcgagctggaggaatacgaggcggacgacatgatcggtacgctggcgaaacgggcggaggccgagggcgtcgacacgctggtcgtcaccggcgaccgcgatttgctccagctcgtatcggaccgcgtgaccgtcgcgctgacgcgcaagggcatcacggaaacggagcggtacgacccggcgcgcatccgcgaggaatacggcttcgatcccgaccgcatccgcgacctcaaagggctgatgggcgacgcgtctgacaatcttcccggcgttcccggcgtcggtgagaaaaccgcactgaaactgctcaggcagtacggttcgctggagagcgtcctggaacacgcgtcggaaatcgccggaaagctcggtgaaaatctgcgggcgcacgccgacgccgcccgattgagcaagcggctggcgacgatcgactgcgcggtaccgttgcagtcgggatgggactggctgcgcctcggcgaaccggaccgcgccgcgctcgcctcgctgttgcggcagctcgaattcaagtcgctgttgaaacggctcggactcgacggcacgtccgccgatgccgacgtcgacggcgtccgttcctccgcgcggccggcggacgagaaacggccgagggccgtcgccgtcgctgaggagggcgtcgacgtccgctgtccggatcgcccggaagaagtcgaagaagcgctgtcgcggctggaagccgcccagtcggtcgtcgtcgaggtgacgggcgacaacccgcacgacggcgaagtgcgcggcgtcgcatggtgggacggacatacggcgtatttcattccgtttgaacggctggtgcagtccgacatgcggccgctggccgactggctcgccgacgcgcgtcggccgaagcgtacgcacgactcccatcgcgctgaagtggcgctgttctggcacggccttgcgtttcgcggcacgtcgttctgcacgcatatcgccgcctatttgctcgaccccacggaatcgcgccatacgctggcggacctgtcgcgccgctacggtctgccgccggtaccggaagccgaggacgtttacggcaagggcgcgaagttcaaggttcccgatcgcgacacgctggcgcgttacgtcggccgcaaggccgccctagtcgcgcggctcgttccgctgctcgaggcggatttggcggcctgcggcatgcgttcgcttttttacgacctggagctgccgctttcatccgaactcgccgtcatggagacggtcggcgtccgcgtcgacgcggcggcgctcgccgcctacggcgaggaattgcgcgaggcggcggcgaaagtcgagcgggagatttacgagctggccgggacgacgttcaacatcggatcgacgaaacagctcggcgaaattttgttcgataagctggggctgcccgtcgtcaagaaaacgaaaaccggctattccaccgacgcagacgtgctggaggaactggcgccgtaccatccgatcgtcgaaaagattttgcattaccgccaactgacgaaattgcagtcgacctacatcgaggggcttttgaaagaaatccgtccgcaaaccggtaaaatccatacgtattatcagcagacgatcgcggcgacggggcggctgagcagtcagtttcccaatcttcagaacattccgatccgtctcgaagaggggcggaaaatccgcaaggcgttcgttccgtcagaaccgggatggctgatgctcgccgccgactattcgcagatcgaactgcgcgtgctcgcgcacgtttccggcgacgaacggctgaaggaagcgtttcggacaggcatggacatccacacgaagaccgcgatggacgtgttcggcgtttccgaagaccgcgtcgacgcgcgcatgcggcggcaggcgaaggcggtcaatttcggcatcatctacggcatcagcgatttcggactggcgcaaaacctgaacatttcccgcaaggaggcggcggagttcatccggcaatatttcgccgtcttttcgggcgtcaaggcgtaccgcgagcggatcgtcgagcaggcgcgccgcgacggttacgtgacgaccctgctcggtcgcaggcgctatttgccggacatcaactggtcgaattacaacctccgctcgttcgcggagcggacggcgatgaatacgccgatccagggcacggccgccgacatcatcaagaccgcgatggtgcgtctgacgcggcggatgcgcgacgtcggactgaagagccgcatgctgctgcaggttcacgacgagctcgtgtttgaagtgccgccggacgagctcgacgcgatgcgggagcttgtgacggacgtcatggagtcggcggtcccgctcgacgtgccgctgaaggtcgacgtcagctggggcgccgactggtacgcggcgaagtgagggaagcgggatcc

SEQ ID NO: 1167 - DNA, 2792 bp, Artificial Sequence
  Description of Artificial Sequence: Synthetic Caldibacillus cellulovorans CompA.2 DNA Polymerase A827Y
atgaaatacctgctgccgaccgctgctgctggtctgctgctcctcgctgcccagccggcgatggccatgggcaaactgattctggtcgacggaaacagcgtcgccaaccgggcgttttacgccgtccggctgctcagcacgcgcggcggcctgcacacaaacgcggtgtacggattcgccaacatgttgctcaagctgatcgaggaggaacggccgacgcattttctcgtcgcgttcgacgcgggcaaggcgacgttccgtcatcgcgaatacgaggcctacaaggcgggtcgcctgcagacgccgcccgagctgtccgagcagtttccgtacatccgggagctcgtccgggcgttcggcgtcgcgtccggcgagctggaggaatacgaggcggacgacatgatcggtacgctggcgaaacgggcggaggccgagggcgtcgacacgctggtcgtcaccggcgaccgcgatttgctccagctcgtatcggaccgcgtgaccgtcgcgctgacgcgcaagggcatcacggaaacggagcggtacgacccggcgcgcatccgcgaggaatacggcttcgatcccgaccgcatccgcgacctcaaagggctgatgggcgacgcgtctgacaatcttcccggcgttcccggcgtcggtgagaaaaccgcactgaaactgctcaggcagtacggttcgctggagagcgtcctggaacacgcgtcggaaatcgccggaaagctcggtgaaaatctgcgggcgcacgccgacgccgcccgattgagcaagcggctggcgacgatcgactgcgcggtaccgttgcagtcgggatgggactggctgcgcctcggcgaaccggaccgcgccgcgctcgcctcgctgttgcggcagctcgaattcaagtcgctgttgaaacggctcggactcgacggcacgtccgccgatgccgacgtcgacggcgtccgttcctccgcgcggccggcggacgagaaacggccgagggccgtcgccgtcgctgaggagggcgtcgacgtccgctgtccggatcgcccggaagaagtcgaagaagcgctgtcgcggctggaagccgcccagtcggtcgtcgtcgaggtgacgggcgacaacccgcacgacggcgaagtgcgcggcgtcgcatggtgggacggacatacggcgtatttcattccgtttgaacggctggtgcagtccgacatgcggccgctggccgactggctcgccgacgcgcgtcggccgaagcgtacgcacgactcccatcgcgctgaagtggcgctgttctggcacggccttgcgtttcgcggcacgtcgttctgcacgcatatcgccgcctatttgctcgaccccacggaatcgcgccatacgctggcggacctgtcgcgccgctacggtctgccgccggtaccggaagccgaggacgtttacggcaagggcgcgaagttcaaggttcccgatcgcgacacgctggcgcgttacgtcggccgcaaggccgccctagtcgcgcggctcgttccgctgctcgaggcggatttggcggcctgcggcatgcgttcgcttttttacgacctggagctgccgctttcatccgaactcgccgtcatggagacggtcggcgtccgcgtcgacgcggcggcgctcgccgcctacggcgaggaattgcgcgaggcggcggcgaaagtcgagcgggagatttacgagctggccgggacgacgttcaacatcggatcgacgaaacagctcggcgaaattttgttcgataagctggggctgcccgtcgtcaagaaaacgaaaaccggctattccaccgacgcagacgtgctggaggaactggcgccgtaccatccgatcgtcgaaaagattttgcattaccgccaactgacgaaattgcagtcgacctacatcgaggggcttttgaaagaaatccgtccgcaaaccggtaaaatccatacgtattatcagcagacgatcgcggcgacggggcggctgagcagtcagtttcccaatcttcagaacattccgatccgtctcgaagaggggcggaaaatccgcaaggcgttcgttccgtcagaaccgggatggctgatgctcgccgccgactattcgcagatcgaactgcgcgtgctcgcgcacgtttccggcgacgaacggctgaaggaagcgtttcggacaggcatggacatccacacgaagaccgcgatggacgtgttcggcgtttccgaagaccgcgtcgacgcgcgcatgcggcggcaggcgaaggcggtcaatttcggcatcatctacggcatcagcgatttcggactggcgcaaaacctgaacatttcccgcaaggaggcggcggagttcatccggcaatatttcgccgtcttttcgggcgtcaaggcgtaccgcgagcggatcgtcgagcaggcgcgccgcgacggttacgtgacgaccctgctcggtcgcaggcgctatttgccggacatcaactattcgaattacaacctccgctcgttcgcggagcggacggcgatgaatacgccgatccagggcacggccgccgacatcatcaagaccgcgatggtgcgtctgacgcggcggatgcgcgacgtcggactgaagagccgcatgctgctgcaggttcacgacgagctcgtgtttgaagtgccgccggacgagctcgacgcgatgcgggagcttgtgacggacgtcatggagtcggcggtcccgctcgacgtgccgctgaaggtcgacgtcagctggggcgccgactggtacgcggcgaagtgagggaagcgggatcc

SEQ ID NO: 1168 - DNA, 2792 bp, Artificial Sequence
  Description of Artificial Sequence: Synthetic Caldibacillus cellulovorans CompA.2 DNA Polymerase A827V
atgaaatacctgctgccgaccgctgctgctggtctgctgctcctcgctgcccagccggcgatggccatgggcaaactgattctggtcgacggaaacagcgtcgccaaccgggcgttttacgccgtccggctgctcagcacgcgcggcggcctgcacacaaacgcggtgtacggattcgccaacatgttgctcaagctgatcgaggaggaacggccgacgcattttctcgtcgcgttcgacgcgggcaaggcgacgttccgtcatcgcgaatacgaggcctacaaggcgggtcgcctgcagacgccgcccgagctgtccgagcagtttccgtacatccgggagctcgtccgggcgttcggcgtcgcgtccggcgagctggaggaatacgaggcggacgacatgatcggtacgctggcgaaacgggcggaggccgagggcgtcgacacgctggtcgtcaccggcgaccgcgatttgctccagctcgtatcggaccgcgtgaccgtcgcgctgacgcgcaagggcatcacggaaacggagcggtacgacccggcgcgcatccgcgaggaatacggcttcgatcccgaccgcatccgcgacctcaaagggctgatgggcgacgcgtctgacaatcttcccggcgttcccggcgtcggtgagaaaaccgcactgaaactgctcaggcagtacggttcgctggagagcgtcctggaacacgcgtcggaaatcgccggaaagctcggtgaaaatctgcgggcgcacgccgacgccgcccgattgagcaagcggctggcgacgatcgactgcgcggtaccgttgcagtcgggatgggactggctgcgcctcggcgaaccggaccgcgccgcgctcgcctcgctgttgcggcagctcgaattcaagtcgctgttgaaacggctcggactcgacggcacgtccgccgatgccgacgtcgacggcgtccgttcctccgcgcggccggcggacgagaaacggccgagggccgtcgccgtcgctgaggagggcgtcgacgtccgctgtccggatcgcccggaagaagtcgaagaagcgctgtcgcggctggaagccgcccagtcggtcgtcgtcgaggtgacgggcgacaacccgcacgacggcgaagtgcgcggcgtcgcatggtgggacggacatacggcgtatttcattccgtttgaacggctggtgcagtccgacatgcggccgctggccgactggctcgccgacgcgcgtcggccgaagcgtacgcacgactcccatcgcgctgaagtggcgctgttctggcacggccttgcgtttcgcggcacgtcgttctgcacgcatatcgccgcctatttgctcgaccccacggaatcgcgccatacgctggcggacctgtcgcgccgctacggtctgccgccggtaccggaagccgaggacgtttacggcaagggcgcgaagttcaaggttcccgatcgcgacacgctggcgcgttacgtcggccgcaaggccgccctagtcgcgcggctcgttccgctgctcgaggcggatttggcggcctgcggcatgcgttcgcttttttacgacctggagctgccgctttcatccgaactcgccgtcatggagacggtcggcgtccgcgtcgacgcggcggcgctcgccgcctacggcgaggaattgcgcgaggcggcggcgaaagtcgagcgggagatttacgagctggccgggacgacgttcaacatcggatcgacgaaacagctcggcgaaattttgttcgataagctggggctgcccgtcgtcaagaaaacgaaaaccggctattccaccgacgcagacgtgctggaggaactggcgccgtaccatccgatcgtcgaaaagattttgcattaccgccaactgacgaaattgcagtcgacctacatcgaggggcttttgaaagaaatccgtccgcaaaccggtaaaatccatacgtattatcagcagacgatcgcggcgacggggcggctgagcagtcagtttcccaatcttcagaacattccgatccgtctcgaagaggggcggaaaatccgcaaggcgttcgttccgtcagaaccgggatggctgatgctcgccgccgactattcgcagatcgaactgcgcgtgctcgcgcacgtttccggcgacgaacggctgaaggaagcgtttcggacaggcatggacatccacacgaagaccgcgatggacgtgttcggcgtttccgaagaccgcgtcgacgcgcgcatgcggcggcaggcgaaggcggtcaatttcggcatcatctacggcatcagcgatttcggactggcgcaaaacctgaacatttcccgcaaggaggcggcggagttcatccggcaatatttcgccgtcttttcgggcgtcaaggcgtaccgcgagcggatcgtcgagcaggcgcgccgcgacggttacgtgacgaccctgctcggtcgcaggcgctatttgccggacatcaacgtttcgaattacaacctccgctcgttcgcggagcggacggcgatgaatacgccgatccagggcacggccgccgacatcatcaagaccgcgatggtgcgtctgacgcggcggatgcgcgacgtcggactgaagagccgcatgctgctgcaggttcacgacgagctcgtgtttgaagtgccgccggacgagctcgacgcgatgcgggagcttgtgacggacgtcatggagtcggcggtcccgctcgacgtgccgctgaaggtcgacgtcagctggggcgccgactggtacgcggcgaagtgagggaagcgggatcc

SEQ ID NO: 1169 - DNA, 2792 bp, Artificial Sequence
  Description of Artificial Sequence: Synthetic Caldibacillus cellulovorans CompA.2 DNA Polymerase S828A
atgaaatacctgctgccgaccgctgctgctggtctgctgctcctcgctgcccagccggcgatggccatgggcaaactgattctggtcgacggaaacagcgtcgccaaccgggcgttttacgccgtccggctgctcagcacgcgcggcggcctgcacacaaacgcggtgtacggattcgccaacatgttgctcaagctgatcgaggaggaacggccgacgcattttctcgtcgcgttcgacgcgggcaaggcgacgttccgtcatcgcgaatacgaggcctacaaggcgggtcgcctgcagacgccgcccgagctgtccgagcagtttccgtacatccgggagctcgtccgggcgttcggcgtcgcgtccggcgagctggaggaatacgaggcggacgacatgatcggtacgctggcgaaacgggcggaggccgagggcgtcgacacgctggtcgtcaccggcgaccgcgatttgctccagctcgtatcggaccgcgtgaccgtcgcgctgacgcgcaagggcatcacggaaacggagcggtacgacccggcgcgcatccgcgaggaatacggcttcgatcccgaccgcatccgcgacctcaaagggctgatgggcgacgcgtctgacaatcttcccggcgttcccggcgtcggtgagaaaaccgcactgaaactgctcaggcagtacggttcgctggagagcgtcctggaacacgcgtcggaaatcgccggaaagctcggtgaaaatctgcgggcgcacgccgacgccgcccgattgagcaagcggctggcgacgatcgactgcgcggtaccgttgcagtcgggatgggactggctgcgcctcggcgaaccggaccgcgccgcgctcgcctcgctgttgcggcagctcgaattcaagtcgctgttgaaacggctcggactcgacggcacgtccgccgatgccgacgtcgacggcgtccgttcctccgcgcggccggcggacgagaaacggccgagggccgtcgccgtcgctgaggagggcgtcgacgtccgctgtccggatcgcccggaagaagtcgaagaagcgctgtcgcggctggaagccgcccagtcggtcgtcgtcgaggtgacgggcgacaacccgcacgacggcgaagtgcgcggcgtcgcatggtgggacggacatacggcgtatttcattccgtttgaacggctggtgcagtccgacatgcggccgctggccgactggctcgccgacgcgcgtcggccgaagcgtacgcacgactcccatcgcgctgaagtggcgctgttctggcacggccttgcgtttcgcggcacgtcgttctgcacgcatatcgccgcctatttgctcgaccccacggaatcgcgccatacgctggcggacctgtcgcgccgctacggtctgccgccggtaccggaagccgaggacgtttacggcaagggcgcgaagttcaaggttcccgatcgcgacacgctggcgcgttacgtcggccgcaaggccgccctagtcgcgcggctcgttccgctgctcgaggcggatttggcggcctgcggcatgcgttcgcttttttacgacctggagctgccgctttcatccgaactcgccgtcatggagacggtcggcgtccgcgtcgacgcggcggcgctcgccgcctacggcgaggaattgcgcgaggcggcggcgaaagtcgagcgggagatttacgagctggccgggacgacgttcaacatcggatcgacgaaacagctcggcgaaattttgttcgataagctggggctgcccgtcgtcaagaaaacgaaaaccggctattccaccgacgcagacgtgctggaggaactggcgccgtaccatccgatcgtcgaaaagattttgcattaccgccaactgacgaaattgcagtcgacctacatcgaggggcttttgaaagaaatccgtccgcaaaccggtaaaatccatacgtattatcagcagacgatcgcggcgacggggcggctgagcagtcagtttcccaatcttcagaacattccgatccgtctcgaagaggggcggaaaatccgcaaggcgttcgttccgtcagaaccgggatggctgatgctcgccgccgactattcgcagatcgaactgcgcgtgctcgcgcacgtttccggcgacgaacggctgaaggaagcgtttcggacaggcatggacatccacacgaagaccgcgatggacgtgttcggcgtttccgaagaccgcgtcgacgcgcgcatgcggcggcaggcgaaggcggtcaatttcggcatcatctacggcatcagcgatttcggactggcgcaaaacctgaacatttcccgcaaggaggcggcggagttcatccggcaatatttcgccgtcttttcgggcgtcaaggcgtaccgcgagcggatcgtcgagcaggcgcgccgcgacggttacgtgacgaccctgctcggtcgcaggcgctatttgccggacatcaacgcggctaattacaacctccgctcgttcgcggagcggacggcgatgaatacgccgatccagggcacggccgccgacatcatcaagaccgcgatggtgcgtctgacgcggcggatgcgcgacgtcggactgaagagccgcatgctgctgcaggttcacgacgagctcgtgtttgaagtgccgccggacgagctcgacgcgatgcgggagcttgtgacggacgtcatggagtcggcggtcccgctcgacgtgccgctgaaggtcgacgtcagctggggcgccgactggtacgcggcgaagtgagggaagcgggatcc

SEQ ID NO: 1170 - DNA, 2792 bp, Artificial Sequence
  Description of Artificial Sequence: Synthetic Caldibacillus cellulovorans CompA.2 DNA Polymerase S828R
atgaaatacctgctgccgaccgctgctgctggtctgctgctcctcgctgcccagccggcgatggccatgggcaaactgattctggtcgacggaaacagcgtcgccaaccgggcgttttacgccgtccggctgctcagcacgcgcggcggcctgcacacaaacgcggtgtacggattcgccaacatgttgctcaagctgatcgaggaggaacggccgacgcattttctcgtcgcgttcgacgcgggcaaggcgacgttccgtcatcgcgaatacgaggcctacaaggcgggtcgcctgcagacgccgcccgagctgtccgagcagtttccgtacatccgggagctcgtccgggcgttcggcgtcgcgtccggcgagctggaggaatacgaggcggacgacatgatcggtacgctggcgaaacgggcggaggccgagggcgtcgacacgctggtcgtcaccggcgaccgcgatttgctccagctcgtatcggaccgcgtgaccgtcgcgctgacgcgcaagggcatcacggaaacggagcggtacgacccggcgcgcatccgcgaggaatacggcttcgatcccgaccgcatccgcgacctcaaagggctgatgggcgacgcgtctgacaatcttcccggcgttcccggcgtcggtgagaaaaccgcactgaaactgctcaggcagtacggttcgctggagagcgtcctggaacacgcgtcggaaatcgccggaaagctcggtgaaaatctgcgggcgcacgccgacgccgcccgattgagcaagcggctggcgacgatcgactgcgcggtaccgttgcagtcgggatgggactggctgcgcctcggcgaaccggaccgcgccgcgctcgcctcgctgttgcggcagctcgaattcaagtcgctgttgaaacggctcggactcgacggcacgtccgccgatgccgacgtcgacggcgtccgttcctccgcgcggccggcggacgagaaacggccgagggccgtcgccgtcgctgaggagggcgtcgacgtccgctgtccggatcgcccggaagaagtcgaagaagcgctgtcgcggctggaagccgcccagtcggtcgtcgtcgaggtgacgggcgacaacccgcacgacggcgaagtgcgcggcgtcgcatggtgggacggacatacggcgtatttcattccgtttgaacggctggtgcagtccgacatgcggccgctggccgactggctcgccgacgcgcgtcggccgaagcgtacgcacgactcccatcgcgctgaagtggcgctgttctggcacggccttgcgtttcgcggcacgtcgttctgcacgcatatcgccgcctatttgctcgaccccacggaatcgcgccatacgctggcggacctgtcgcgccgctacggtctgccgccggtaccggaagccgaggacgtttacggcaagggcgcgaagttcaaggttcccgatcgcgacacgctggcgcgttacgtcggccgcaaggccgccctagtcgcgcggctcgttccgctgctcgaggcggatttggcggcctgcggcatgcgttcgcttttttacgacctggagctgccgctttcatccgaactcgccgtcatggagacggtcggcgtccgcgtcgacgcggcggcgctcgccgcctacggcgaggaattgcgcgaggcggcggcgaaagtcgagcgggagatttacgagctggccgggacgacgttcaacatcggatcgacgaaacagctcggcgaaattttgttcgataagctggggctgcccgtcgtcaagaaaacgaaaaccggctattccaccgacgcagacgtgctggaggaactggcgccgtaccatccgatcgtcgaaaagattttgcattaccgccaactgacgaaattgcagtcgacctacatcgaggggcttttgaaagaaatccgtccgcaaaccggtaaaatccatacgtattatcagcagacgatcgcggcgacggggcggctgagcagtcagtttcccaatcttcagaacattccgatccgtctcgaagaggggcggaaaatccgcaaggcgttcgttccgtcagaaccgggatggctgatgctcgccgccgactattcgcagatcgaactgcgcgtgctcgcgcacgtttccggcgacgaacggctgaaggaagcgtttcggacaggcatggacatccacacgaagaccgcgatggacgtgttcggcgtttccgaagaccgcgtcgacgcgcgcatgcggcggcaggcgaaggcggtcaatttcggcatcatctacggcatcagcgatttcggactggcgcaaaacctgaacatttcccgcaaggaggcggcggagttcatccggcaatatttcgccgtcttttcgggcgtcaaggcgtaccgcgagcggatcgtcgagcaggcgcgccgcgacggttacgtgacgaccctgctcggtcgcaggcgctatttgccggacatcaacgcgcgtaattacaacctccgctcgttcgcggagcggacggcgatgaatacgccgatccagggcacggccgccgacatcatcaagaccgcgatggtgcgtctgacgcggcggatgcgcgacgtcggactgaagagccgcatgctgctgcaggttcacgacgagctcgtgtttgaagtgccgccggacgagctcgacgcgatgcgggagcttgtgacggacgtcatggagtcggcggtcccgctcgacgtgccgctgaaggtcgacgtcagctggggcgccgactggtacgcggcgaagtgagggaagcgggatcc

SEQ ID NO: 1171 - DNA, 2792 bp, Artificial Sequence
  Description of Artificial Sequence: Synthetic Caldibacillus cellulovorans CompA.2 DNA Polymerase S828N
atgaaatacctgctgccgaccgctgctgctggtctgctgctcctcgctgcccagccggcgatggccatgggcaaactgattctggtcgacggaaacagcgtcgccaaccgggcgttttacgccgtccggctgctcagcacgcgcggcggcctgcacacaaacgcggtgtacggattcgccaacatgttgctcaagctgatcgaggaggaacggccgacgcattttctcgtcgcgttcgacgcgggcaaggcgacgttccgtcatcgcgaatacgaggcctacaaggcgggtcgcctgcagacgccgcccgagctgtccgagcagtttccgtacatccgggagctcgtccgggcgttcggcgtcgcgtccggcgagctggaggaatacgaggcggacgacatgatcggtacgctggcgaaacgggcggaggccgagggcgtcgacacgctggtcgtcaccggcgaccgcgatttgctccagctcgtatcggaccgcgtgaccgtcgcgctgacgcgcaagggcatcacggaaacggagcggtacgacccggcgcgcatccgcgaggaatacggcttcgatcccgaccgcatccgcgacctcaaagggctgatgggcgacgcgtctgacaatcttcccggcgttcccggcgtcggtgagaaaaccgcactgaaactgctcaggcagtacggttcgctggagagcgtcctggaacacgcgtcggaaatcgccggaaagctcggtgaaaatctgcgggcgcacgccgacgccgcccgattgagcaagcggctggcgacgatcgactgcgcggtaccgttgcagtcgggatgggactggctgcgcctcggcgaaccggaccgcgccgcgctcgcctcgctgttgcggcagctcgaattcaagtcgctgttgaaacggctcggactcgacggcacgtccgccgatgccgacgtcgacggcgtccgttcctccgcgcggccggcggacgagaaacggccgagggccgtcgccgtcgctgaggagggcgtcgacgtccgctgtccggatcgcccggaagaagtcgaagaagcgctgtcgcggctggaagccgcccagtcggtcgtcgtcgaggtgacgggcgacaacccgcacgacggcgaagtgcgcggcgtcgcatggtgggacggacatacggcgtatttcattccgtttgaacggctggtgcagtccgacatgcggccgctggccgactggctcgccgacgcgcgtcggccgaagcgtacgcacgactcccatcgcgctgaagtggcgctgttctggcacggccttgcgtttcgcggcacgtcgttctgcacgcatatcgccgcctatttgctcgaccccacggaatcgcgccatacgctggcggacctgtcgcgccgctacggtctgccgccggtaccggaagccgaggacgtttacggcaagggcgcgaagttcaaggttcccgatcgcgacacgctggcgcgttacgtcggccgcaaggccgccctagtcgcgcggctcgttccgctgctcgaggcggatttggcggcctgcggcatgcgttcgcttttttacgacctggagctgccgctttcatccgaactcgccgtcatggagacggtcggcgtccgcgtcgacgcggcggcgctcgccgcctacggcgaggaattgcgcgaggcggcggcgaaagtcgagcgggagatttacgagctggccgggacgacgttcaacatcggatcgacgaaacagctcggcgaaattttgttcgataagctggggctgcccgtcgtcaagaaaacgaaaaccggctattccaccgacgcagacgtgctggaggaactggcgccgtaccatccgatcgtcgaaaagattttgcattaccgccaactgacgaaattgcagtcgacctacatcgaggggcttttgaaagaaatccgtccgcaaaccggtaaaatccatacgtattatcagcagacgatcgcggcgacggggcggctgagcagtcagtttcccaatcttcagaacattccgatccgtctcgaagaggggcggaaaatccgcaaggcgttcgttccgtcagaaccgggatggctgatgctcgccgccgactattcgcagatcgaactgcgcgtgctcgcgcacgtttccggcgacgaacggctgaaggaagcgtttcggacaggcatggacatccacacgaagaccgcgatggacgtgttcggcgtttccgaagaccgcgtcgacgcgcgcatgcggcggcaggcgaaggcggtcaatttcggcatcatctacggcatcagcgatttcggactggcgcaaaacctgaacatttcccgcaaggaggcggcggagttcatccggcaatatttcgccgtcttttcgggcgtcaaggcgtaccgcgagcggatcgtcgagcaggcgcgccgcgacggttacgtgacgaccctgctcggtcgcaggcgctatttgccggacatcaacgcgaataattacaacctccgctcgttcgcggagcggacggcgatgaatacgccgatccagggcacggccgccgacatcatcaagaccgcgatggtgcgtctgacgcggcggatgcgcgacgtcggactgaagagccgcatgctgctgcaggttcacgacgagctcgtgtttgaagtgccgccggacgagctcgacgcgatgcgggagcttgtgacggacgtcatggagtcggcggtcccgctcgacgtgccgctgaaggtcgacgtcagctggggcgccgactggtacgcggcgaagtgagggaagcgggatcc

SEQ ID NO: 1172 - DNA, 2792 bp, Artificial Sequence
  Description of Artificial Sequence: Synthetic Caldibacillus cellulovorans CompA.2 DNA Polymerase S828D
atgaaatacctgctgccgaccgctgctgctggtctgctgctcctcgctgcccagccggcgatggccatgggcaaactgattctggtcgacggaaacagcgtcgccaaccgggcgttttacgccgtccggctgctcagcacgcgcggcggcctgcacacaaacgcggtgtacggattcgccaacatgttgctcaagctgatcgaggaggaacggccgacgcattttctcgtcgcgttcgacgcgggcaaggcgacgttccgtcatcgcgaatacgaggcctacaaggcgggtcgcctgcagacgccgcccgagctgtccgagcagtttccgtacatccgggagctcgtccgggcgttcggcgtcgcgtccggcgagctggaggaatacgaggcggacgacatgatcggtacgctggcgaaacgggcggaggccgagggcgtcgacacgctggtcgtcaccggcgaccgcgatttgctccagctcgtatcggaccgcgtgaccgtcgcgctgacgcgcaagggcatcacggaaacggagcggtacgacccggcgcgcatccgcgaggaatacggcttcgatcccgaccgcatccgcgacctcaaagggctgatgggcgacgcgtctgacaatcttcccggcgttcccggcgtcggtgagaaaaccgcactgaaactgctcaggcagtacggttcgctggagagcgtcctggaacacgcgtcggaaatcgccggaaagctcggtgaaaatctgcgggcgcacgccgacgccgcccgattgagcaagcggctggcgacgatcgactgcgcggtaccgttgcagtcgggatgggactggctgcgcctcggcgaaccggaccgcgccgcgctcgcctcgctgttgcggcagctcgaattcaagtcgctgttgaaacggctcggactcgacggcacgtccgccgatgccgacgtcgacggcgtccgttcctccgcgcggccggcggacgagaaacggccgagggccgtcgccgtcgctgaggagggcgtcgacgtccgctgtccggatcgcccggaagaagtcgaagaagcgctgtcgcggctggaagccgcccagtcggtcgtcgtcgaggtgacgggcgacaacccgcacgacggcgaagtgcgcggcgtcgcatggtgggacggacatacggcgtatttcattccgtttgaacggctggtgcagtccgacatgcggccgctggccgactggctcgccgacgcgcgtcggccgaagcgtacgcacgactcccatcgcgctgaagtggcgctgttctggcacggccttgcgtttcgcggcacgtcgttctgcacgcatatcgccgcctatttgctcgaccccacggaatcgcgccatacgctggcggacctgtcgcgccgctacggtctgccgccggtaccggaagccgaggacgtttacggcaagggcgcgaagttcaaggttcccgatcgcgacacgctggcgcgttacgtcggccgcaaggccgccctagtcgcgcggctcgttccgctgctcgaggcggatttggcggcctgcggcatgcgttcgcttttttacgacctggagctgccgctttcatccgaactcgccgtcatggagacggtcggcgtccgcgtcgacgcggcggcgctcgccgcctacggcgaggaattgcgcgaggcggcggcgaaagtcgagcgggagatttacgagctggccgggacgacgttcaacatcggatcgacgaaacagctcggcgaaattttgttcgataagctggggctgcccgtcgtcaagaaaacgaaaaccggctattccaccgacgcagacgtgctggaggaactggcgccgtaccatccgatcgtcgaaaagattttgcattaccgccaactgacgaaattgcagtcgacctacatcgaggggcttttgaaagaaatccgtccgcaaaccggtaaaatccatacgtattatcagcagacgatcgcggcgacggggcggctgagcagtcagtttcccaatcttcagaacattccgatccgtctcgaagaggggcggaaaatccgcaaggcgttcgttccgtcagaaccgggatggctgatgctcgccgccgactattcgcagatcgaactgcgcgtgctcgcgcacgtttccggcgacgaacggctgaaggaagcgtttcggacaggcatggacatccacacgaagaccgcgatggacgtgttcggcgtttccgaagaccgcgtcgacgcgcgcatgcggcggcaggcgaaggcggtcaatttcggcatcatctacggcatcagcgatttcggactggcgcaaaacctgaacatttcccgcaaggaggcggcggagttcatccggcaatatttcgccgtcttttcgggcgtcaaggcgtaccgcgagcggatcgtcgagcaggcgcgccgcgacggttacgtgacgaccctgctcggtcgcaggcgctatttgccggacatcaacgcggataattacaacctccgctcgttcgcggagcggacggcgatgaatacgccgatccagggcacggccgccgacatcatcaagaccgcgatggtgcgtctgacgcggcggatgcgcgacgtcggactgaagagccgcatgctgctgcaggttcacgacgagctcgtgtttgaagtgccgccggacgagctcgacgcgatgcgggagcttgtgacggacgtcatggagtcggcggtcccgctcgacgtgccgctgaaggtcgacgtcagctggggcgccgactggtacgcggcgaagtgagggaagcgggatcc

SEQ ID NO: 1173 - DNA, 2792 bp, Artificial Sequence
  Description of Artificial Sequence: Synthetic Caldibacillus cellulovorans CompA.2 DNA Polymerase S828C
atgaaatacctgctgccgaccgctgctgctggtctgctgctcctcgctgcccagccggcgatggccatgggcaaactgattctggtcgacggaaacagcgtcgccaaccgggcgttttacgccgtccggctgctcagcacgcgcggcggcctgcacacaaacgcggtgtacggattcgccaacatgttgctcaagctgatcgaggaggaacggccgacgcattttctcgtcgcgttcgacgcgggcaaggcgacgttccgtcatcgcgaatacgaggcctacaaggcgggtcgcctgcagacgccgcccgagctgtccgagcagtttccgtacatccgggagctcgtccgggcgttcggcgtcgcgtccggcgagctggaggaatacgaggcggacgacatgatcggtacgctggcgaaacgggcggaggccgagggcgtcgacacgctggtcgtcaccggcgaccgcgatttgctccagctcgtatcggaccgcgtgaccgtcgcgctgacgcgcaagggcatcacggaaacggagcggtacgacccggcgcgcatccgcgaggaatacggcttcgatcccgaccgcatccgcgacctcaaagggctgatgggcgacgcgtctgacaatcttcccggcgttcccggcgtcggtgagaaaaccgcactgaaactgctcaggcagtacggttcgctggagagcgtcctggaacacgcgtcggaaatcgccggaaagctcggtgaaaatctgcgggcgcacgccgacgccgcccgattgagcaagcggctggcgacgatcgactgcgcggtaccgttgcagtcgggatgggactggctgcgcctcggcgaaccggaccgcgccgcgctcgcctcgctgttgcggcagctcgaattcaagtcgctgttgaaacggctcggactcgacggcacgtccgccgatgccgacgtcgacggcgtccgttcctccgcgcggccggcggacgagaaacggccgagggccgtcgccgtcgctgaggagggcgtcgacgtccgctgtccggatcgcccggaagaagtcgaagaagcgctgtcgcggctggaagccgcccagtcggtcgtcgtcgaggtgacgggcgacaacccgcacgacggcgaagtgcgcggcgtcgcatggtgggacggacatacggcgtatttcattccgtttgaacggctggtgcagtccgacatgcggccgctggccgactggctcgccgacgcgcgtcggccgaagcgtacgcacgactcccatcgcgctgaagtggcgctgttctggcacggccttgcgtttcgcggcacgtcgttctgcacgcatatcgccgcctatttgctcgaccccacggaatcgcgccatacgctggcggacctgtcgcgccgctacggtctgccgccggtaccggaagccgaggacgtttacggcaagggcgcgaagttcaaggttcccgatcgcgacacgctggcgcgttacgtcggccgcaaggccgccctagtcgcgcggctcgttccgctgctcgaggcggatttggcggcctgcggcatgcgttcgcttttttacgacctggagctgccgctttcatccgaactcgccgtcatggagacggtcggcgtccgcgtcgacgcggcggcgctcgccgcctacggcgaggaattgcgcgaggcggcggcgaaagtcgagcgggagatttacgagctggccgggacgacgttcaacatcggatcgacgaaacagctcggcgaaattttgttcgataagctggggctgcccgtcgtcaagaaaacgaaaaccggctattccaccgacgcagacgtgctggaggaactggcgccgtaccatccgatcgtcgaaaagattttgcattaccgccaactgacgaaattgcagtcgacctacatcgaggggcttttgaaagaaatccgtccgcaaaccggtaaaatccatacgtattatcagcagacgatcgcggcgacggggcggctgagcagtcagtttcccaatcttcagaacattccgatccgtctcgaagaggggcggaaaatccgcaaggcgttcgttccgtcagaaccgggatggctgatgctcgccgccgactattcgcagatcgaactgcgcgtgctcgcgcacgtttccggcgacgaacggctgaaggaagcgtttcggacaggcatggacatccacacgaagaccgcgatggacgtgttcggcgtttccgaagaccgcgtcgacgcgcgcatgcggcggcaggcgaaggcggtcaatttcggcatcatctacggcatcagcgatttcggactggcgcaaaacctgaacatttcccgcaaggaggcggcggagttcatccggcaatatttcgccgtcttttcgggcgtcaaggcgtaccgcgagcggatcgtcgagcaggcgcgccgcgacggttacgtgacgaccctgctcggtcgcaggcgctatttgccggacatcaacgcgtgtaattacaacctccgctcgttcgcggagcggacggcgatgaatacgccgatccagggcacggccgccgacatcatcaagaccgcgatggtgcgtctgacgcggcggatgcgcgacgtcggactgaagagccgcatgctgctgcaggttcacgacgagctcgtgtttgaagtgccgccggacgagctcgacgcgatgcgggagcttgtgacggacgtcatggagtcggcggtcccgctcgacgtgccgctgaaggtcgacgtcagctggggcgccgactggtacgcggcgaagtgagggaagcgggatcc

SEQ ID NO: 1174 - DNA, 2792 bp, Artificial Sequence
  Description of Artificial Sequence: Synthetic Caldibacillus cellulovorans CompA.2 DNA Polymerase S828E
atgaaatacctgctgccgaccgctgctgctggtctgctgctcctcgctgcccagccggcgatggccatgggcaaactgattctggtcgacggaaacagcgtcgccaaccgggcgttttacgccgtccggctgctcagcacgcgcggcggcctgcacacaaacgcggtgtacggattcgccaacatgttgctcaagctgatcgaggaggaacggccgacgcattttctcgtcgcgttcgacgcgggcaaggcgacgttccgtcatcgcgaatacgaggcctacaaggcgggtcgcctgcagacgccgcccgagctgtccgagcagtttccgtacatccgggagctcgtccgggcgttcggcgtcgcgtccggcgagctggaggaatacgaggcggacgacatgatcggtacgctggcgaaacgggcggaggccgagggcgtcgacacgctggtcgtcaccggcgaccgcgatttgctccagctcgtatcggaccgcgtgaccgtcgcgctgacgcgcaagggcatcacggaaacggagcggtacgacccggcgcgcatccgcgaggaatacggcttcgatcccgaccgcatccgcgacctcaaagggctgatgggcgacgcgtctgacaatcttcccggcgttcccggcgtcggtgagaaaaccgcactgaaactgctcaggcagtacggttcgctggagagcgtcctggaacacgcgtcggaaatcgccggaaagctcggtgaaaatctgcgggcgcacgccgacgccgcccgattgagcaagcggctggcgacgatcgactgcgcggtaccgttgcagtcgggatgggactggctgcgcctcggcgaaccggaccgcgccgcgctcgcctcgctgttgcggcagctcgaattcaagtcgctgttgaaacggctcggactcgacggcacgtccgccgatgccgacgtcgacggcgtccgttcctccgcgcggccggcggacgagaaacggccgagggccgtcgccgtcgctgaggagggcgtcgacgtccgctgtccggatcgcccggaagaagtcgaagaagcgctgtcgcggctggaagccgcccagtcggtcgtcgtcgaggtgacgggcgacaacccgcacgacggcgaagtgcgcggcgtcgcatggtgggacggacatacggcgtatttcattccgtttgaacggctggtgcagtccgacatgcggccgctggccgactggctcgccgacgcgcgtcggccgaagcgtacgcacgactcccatcgcgctgaagtggcgctgttctggcacggccttgcgtttcgcggcacgtcgttctgcacgcatatcgccgcctatttgctcgaccccacggaatcgcgccatacgctggcggacctgtcgcgccgctacggtctgccgccggtaccggaagccgaggacgtttacggcaagggcgcgaagttcaaggttcccgatcgcgacacgctggcgcgttacgtcggccgcaaggccgccctagtcgcgcggctcgttccgctgctcgaggcggatttggcggcctgcggcatgcgttcgcttttttacgacctggagctgccgctttcatccgaactcgccgtcatggagacggtcggcgtccgcgtcgacgcggcggcgctcgccgcctacggcgaggaattgcgcgaggcggcggcgaaagtcgagcgggagatttacgagctggccgggacgacgttcaacatcggatcgacgaaacagctcggcgaaattttgttcgataagctggggctgcccgtcgtcaagaaaacgaaaaccggctattccaccgacgcagacgtgctggaggaactggcgccgtaccatccgatcgtcgaaaagattttgcattaccgccaactgacgaaattgcagtcgacctacatcgaggggcttttgaaagaaatccgtccgcaaaccggtaaaatccatacgtattatcagcagacgatcgcggcgacggggcggctgagcagtcagtttcccaatcttcagaacattccgatccgtctcgaagaggggcggaaaatccgcaaggcgttcgttccgtcagaaccgggatggctgatgctcgccgccgactattcgcagatcgaactgcgcgtgctcgcgcacgtttccggcgacgaacggctgaaggaagcgtttcggacaggcatggacatccacacgaagaccgcgatggacgtgttcggcgtttccgaagaccgcgtcgacgcgcgcatgcggcggcaggcgaaggcggtcaatttcggcatcatctacggcatcagcgatttcggactggcgcaaaacctgaacatttcccgcaaggaggcggcggagttcatccggcaatatttcgccgtcttttcgggcgtcaaggcgtaccgcgagcggatcgtcgagcaggcgcgccgcgacggttacgtgacgaccctgctcggtcgcaggcgctatttgccggacatcaacgcggaaaattacaacctccgctcgttcgcggagcggacggcgatgaatacgccgatccagggcacggccgccgacatcatcaagaccgcgatggtgcgtctgacgcggcggatgcgcgacgtcggactgaagagccgcatgctgctgcaggttcacgacgagctcgtgtttgaagtgccgccggacgagctcgacgcgatgcgggagcttgtgacggacgtcatggagtcggcggtcccgctcgacgtgccgctgaaggtcgacgtcagctggggcgccgactggtacgcggcgaagtgagggaagcgggatcc

SEQ ID NO: 1175 - DNA, 2792 bp, Artificial Sequence
  Description of Artificial Sequence: Synthetic Caldibacillus cellulovorans CompA.2 DNA Polymerase S828Q
atgaaatacctgctgccgaccgctgctgctggtctgctgctcctcgctgcccagccggcgatggccatgggcaaactgattctggtcgacggaaacagcgtcgccaaccgggcgttttacgccgtccggctgctcagcacgcgcggcggcctgcacacaaacgcggtgtacggattcgccaacatgttgctcaagctgatcgaggaggaacggccgacgcattttctcgtcgcgttcgacgcgggcaaggcgacgttccgtcatcgcgaatacgaggcctacaaggcgggtcgcctgcagacgccgcccgagctgtccgagcagtttccgtacatccgggagctcgtccgggcgttcggcgtcgcgtccggcgagctggaggaatacgaggcggacgacatgatcggtacgctggcgaaacgggcggaggccgagggcgtcgacacgctggtcgtcaccggcgaccgcgatttgctccagctcgtatcggaccgcgtgaccgtcgcgctgacgcgcaagggcatcacggaaacggagcggtacgacccggcgcgcatccgcgaggaatacggcttcgatcccgaccgcatccgcgacctcaaagggctgatgggcgacgcgtctgacaatcttcccggcgttcccggcgtcggtgagaaaaccgcactgaaactgctcaggcagtacggttcgctggagagcgtcctggaacacgcgtcggaaatcgccggaaagctcggtgaaaatctgcgggcgcacgccgacgccgcccgattgagcaagcggctggcgacgatcgactgcgcggtaccgttgcagtcgggatgggactggctgcgcctcggcgaaccggaccgcgccgcgctcgcctcgctgttgcggcagctcgaattcaagtcgctgttgaaacggctcggactcgacggcacgtccgccgatgccgacgtcgacggcgtccgttcctccgcgcggccggcggacgagaaacggccgagggccgtcgccgtcgctgaggagggcgtcgacgtccgctgtccggatcgcccggaagaagtcgaagaagcgctgtcgcggctggaagccgcccagtcggtcgtcgtcgaggtgacgggcgacaacccgcacgacggcgaagtgcgcggcgtcgcatggtgggacggacatacggcgtatttcattccgtttgaacggctggtgcagtccgacatgcggccgctggccgactggctcgccgacgcgcgtcggccgaagcgtacgcacgactcccatcgcgctgaagtggcgctgttctggcacggccttgcgtttcgcggcacgtcgttctgcacgcatatcgccgcctatttgctcgaccccacggaatcgcgccatacgctggcggacctgtcgcgccgctacggtctgccgccggtaccggaagccgaggacgtttacggcaagggcgcgaagttcaaggttcccgatcgcgacacgctggcgcgttacgtcggccgcaaggccgccctagtcgcgcggctcgttccgctgctcgaggcggatttggcggcctgcggcatgcgttcgcttttttacgacctggagctgccgctttcatccgaactcgccgtcatggagacggtcggcgtccgcgtcgacgcggcggcgctcgccgcctacggcgaggaattgcgcgaggcggcggcgaaagtcgagcgggagatttacgagctggccgggacgacgttcaacatcggatcgacgaaacagctcggcgaaattttgttcgataagctggggctgcccgtcgtcaagaaaacgaaaaccggctattccaccgacgcagacgtgctggaggaactggcgccgtaccatccgatcgtcgaaaagattttgcattaccgccaactgacgaaattgcagtcgacctacatcgaggggcttttgaaagaaatccgtccgcaaaccggtaaaatccatacgtattatcagcagacgatcgcggcgacggggcggctgagcagtcagtttcccaatcttcagaacattccgatccgtctcgaagaggggcggaaaatccgcaaggcgttcgttccgtcagaaccgggatggctgatgctcgccgccgactattcgcagatcgaactgcgcgtgctcgcgcacgtttccggcgacgaacggctgaaggaagcgtttcggacaggcatggacatccacacgaagaccgcgatggacgtgttcggcgtttccgaagaccgcgtcgacgcgcgcatgcggcggcaggcgaaggcggtcaatttcggcatcatctacggcatcagcgatttcggactggcgcaaaacctgaacatttcccgcaaggaggcggcggagttcatccggcaatatttcgccgtcttttcgggcgtcaaggcgtaccgcgagcggatcgtcgagcaggcgcgccgcgacggttacgtgacgaccctgctcggtcgcaggcgctatttgccggacatcaacgcgcaaaattacaacctccgctcgttcgcggagcggacggcgatgaatacgccgatccagggcacggccgccgacatcatcaagaccgcgatggtgcgtctgacgcggcggatgcgcgacgtcggactgaagagccgcatgctgctgcaggttcacgacgagctcgtgtttgaagtgccgccggacgagctcgacgcgatgcgggagcttgtgacggacgtcatggagtcggcggtcccgctcgacgtgccgctgaaggtcgacgtcagctggggcgccgactggtacgcggcgaagtgagggaagcgggatcc

SEQ ID NO: 1176 - DNA, 2792 bp, Artificial Sequence
  Description of Artificial Sequence: Synthetic Caldibacillus cellulovorans CompA.2 DNA Polymerase S828G
atgaaatacctgctgccgaccgctgctgctggtctgctgctcctcgctgcccagccggcgatggccatgggcaaactgattctggtcgacggaaacagcgtcgccaaccgggcgttttacgccgtccggctgctcagcacgcgcggcggcctgcacacaaacgcggtgtacggattcgccaacatgttgctcaagctgatcgaggaggaacggccgacgcattttctcgtcgcgttcgacgcgggcaaggcgacgttccgtcatcgcgaatacgaggcctacaaggcgggtcgcctgcagacgccgcccgagctgtccgagcagtttccgtacatccgggagctcgtccgggcgttcggcgtcgcgtccggcgagctggaggaatacgaggcggacgacatgatcggtacgctggcgaaacgggcggaggccgagggcgtcgacacgctggtcgtcaccggcgaccgcgatttgctccagctcgtatcggaccgcgtgaccgtcgcgctgacgcgcaagggcatcacggaaacggagcggtacgacccggcgcgcatccgcgaggaatacggcttcgatcccgaccgcatccgcgacctcaaagggctgatgggcgacgcgtctgacaatcttcccggcgttcccggcgtcggtgagaaaaccgcactgaaactgctcaggcagtacggttcgctggagagcgtcctggaacacgcgtcggaaatcgccggaaagctcggtgaaaatctgcgggcgcacgccgacgccgcccgattgagcaagcggctggcgacgatcgactgcgcggtaccgttgcagtcgggatgggactggctgcgcctcggcgaaccggaccgcgccgcgctcgcctcgctgttgcggcagctcgaattcaagtcgctgttgaaacggctcggactcgacggcacgtccgccgatgccgacgtcgacggcgtccgttcctccgcgcggccggcggacgagaaacggccgagggccgtcgccgtcgctgaggagggcgtcgacgtccgctgtccggatcgcccggaagaagtcgaagaagcgctgtcgcggctggaagccgcccagtcggtcgtcgtcgaggtgacgggcgacaacccgcacgacggcgaagtgcgcggcgtcgcatggtgggacggacatacggcgtatttcattccgtttgaacggctggtgcagtccgacatgcggccgctggccgactggctcgccgacgcgcgtcggccgaagcgtacgcacgactcccatcgcgctgaagtggcgctgttctggcacggccttgcgtttcgcggcacgtcgttctgcacgcatatcgccgcctatttgctcgaccccacggaatcgcgccatacgctggcggacctgtcgcgccgctacggtctgccgccggtaccggaagccgaggacgtttacggcaagggcgcgaagttcaaggttcccgatcgcgacacgctggcgcgttacgtcggccgcaaggccgccctagtcgcgcggctcgttccgctgctcgaggcggatttggcggcctgcggcatgcgttcgcttttttacgacctggagctgccgctttcatccgaactcgccgtcatggagacggtcggcgtccgcgtcgacgcggcggcgctcgccgcctacggcgaggaattgcgcgaggcggcggcgaaagtcgagcgggagatttacgagctggccgggacgacgttcaacatcggatcgacgaaacagctcggcgaaattttgttcgataagctggggctgcccgtcgtcaagaaaacgaaaaccggctattccaccgacgcagacgtgctggaggaactggcgccgtaccatccgatcgtcgaaaagattttgcattaccgccaactgacgaaattgcagtcgacctacatcgaggggcttttgaaagaaatccgtccgcaaaccggtaaaatccatacgtattatcagcagacgatcgcggcgacggggcggctgagcagtcagtttcccaatcttcagaacattccgatccgtctcgaagaggggcggaaaatccgcaaggcgttcgttccgtcagaaccgggatggctgatgctcgccgccgactattcgcagatcgaactgcgcgtgctcgcgcacgtttccggcgacgaacggctgaaggaagcgtttcggacaggcatggacatccacacgaagaccgcgatggacgtgttcggcgtttccgaagaccgcgtcgacgcgcgcatgcggcggcaggcgaaggcggtcaatttcggcatcatctacggcatcagcgatttcggactggcgcaaaacctgaacatttcccgcaaggaggcggcggagttcatccggcaatatttcgccgtcttttcgggcgtcaaggcgtaccgcgagcggatcgtcgagcaggcgcgccgcgacggttacgtgacgaccctgctcggtcgcaggcgctatttgccggacatcaacgcgggtaattacaacctccgctcgttcgcggagcggacggcgatgaatacgccgatccagggcacggccgccgacatcatcaagaccgcgatggtgcgtctgacgcggcggatgcgcgacgtcggactgaagagccgcatgctgctgcaggttcacgacgagctcgtgtttgaagtgccgccggacgagctcgacgcgatgcgggagcttgtgacggacgtcatggagtcggcggtcccgctcgacgtgccgctgaaggtcgacgtcagctggggcgccgactggtacgcggcgaagtgagggaagcgggatcc

SEQ ID NO: 1177 - DNA, 2792 bp, Artificial Sequence
  Description of Artificial Sequence: Synthetic Caldibacillus cellulovorans CompA.2 DNA Polymerase S828H
atgaaatacctgctgccgaccgctgctgctggtctgctgctcctcgctgcccagccggcgatggccatgggcaaactgattctggtcgacggaaacagcgtcgccaaccgggcgttttacgccgtccggctgctcagcacgcgcggcggcctgcacacaaacgcggtgtacggattcgccaacatgttgctcaagctgatcgaggaggaacggccgacgcattttctcgtcgcgttcgacgcgggcaaggcgacgttccgtcatcgcgaatacgaggcctacaaggcgggtcgcctgcagacgccgcccgagctgtccgagcagtttccgtacatccgggagctcgtccgggcgttcggcgtcgcgtccggcgagctggaggaatacgaggcggacgacatgatcggtacgctggcgaaacgggcggaggccgagggcgtcgacacgctggtcgtcaccggcgaccgcgatttgctccagctcgtatcggaccgcgtgaccgtcgcgctgacgcgcaagggcatcacggaaacggagcggtacgacccggcgcgcatccgcgaggaatacggcttcgatcccgaccgcatccgcgacctcaaagggctgatgggcgacgcgtctgacaatcttcccggcgttcccggcgtcggtgagaaaaccgcactgaaactgctcaggcagtacggttcgctggagagcgtcctggaacacgcgtcggaaatcgccggaaagctcggtgaaaatctgcgggcgcacgccgacgccgcccgattgagcaagcggctggcgacgatcgactgcgcggtaccgttgcagtcgggatgggactggctgcgcctcggcgaaccggaccgcgccgcgctcgcctcgctgttgcggcagctcgaattcaagtcgctgttgaaacggctcggactcgacggcacgtccgccgatgccgacgtcgacggcgtccgttcctccgcgcggccggcggacgagaaacggccgagggccgtcgccgtcgctgaggagggcgtcgacgtccgctgtccggatcgcccggaagaagtcgaagaagcgctgtcgcggctggaagccgcccagtcggtcgtcgtcgaggtgacgggcgacaacccgcacgacggcgaagtgcgcggcgtcgcatggtgggacggacatacggcgtatttcattccgtttgaacggctggtgcagtccgacatgcggccgctggccgactggctcgccgacgcgcgtcggccgaagcgtacgcacgactcccatcgcgctgaagtggcgctgttctggcacggccttgcgtttcgcggcacgtcgttctgcacgcatatcgccgcctatttgctcgaccccacggaatcgcgccatacgctggcggacctgtcgcgccgctacggtctgccgccggtaccggaagccgaggacgtttacggcaagggcgcgaagttcaaggttcccgatcgcgacacgctggcgcgttacgtcggccgcaaggccgccctagtcgcgcggctcgttccgctgctcgaggcggatttggcggcctgcggcatgcgttcgcttttttacgacctggagctgccgctttcatccgaactcgccgtcatggagacggtcggcgtccgcgtcgacgcggcggcgctcgccgcctacggcgaggaattgcgcgaggcggcggcgaaagtcgagcgggagatttacgagctggccgggacgacgttcaacatcggatcgacgaaacagctcggcgaaattttgttcgataagctggggctgcccgtcgtcaagaaaacgaaaaccggctattccaccgacgcagacgtgctggaggaactggcgccgtaccatccgatcgtcgaaaagattttgcattaccgccaactgacgaaattgcagtcgacctacatcgaggggcttttgaaagaaatccgtccgcaaaccggtaaaatccatacgtattatcagcagacgatcgcggcgacggggcggctgagcagtcagtttcccaatcttcagaacattccgatccgtctcgaagaggggcggaaaatccgcaaggcgttcgttccgtcagaaccgggatggctgatgctcgccgccgactattcgcagatcgaactgcgcgtgctcgcgcacgtttccggcgacgaacggctgaaggaagcgtttcggacaggcatggacatccacacgaagaccgcgatggacgtgttcggcgtttccgaagaccgcgtcgacgcgcgcatgcggcggcaggcgaaggcggtcaatttcggcatcatctacggcatcagcgatttcggactggcgcaaaacctgaacatttcccgcaaggaggcggcggagttcatccggcaatatttcgccgtcttttcgggcgtcaaggcgtaccgcgagcggatcgtcgagcaggcgcgccgcgacggttacgtgacgaccctgctcggtcgcaggcgctatttgccggacatcaacgcgcataattacaacctccgctcgttcgcggagcggacggcgatgaatacgccgatccagggcacggccgccgacatcatcaagaccgcgatggtgcgtctgacgcggcggatgcgcgacgtcggactgaagagccgcatgctgctgcaggttcacgacgagctcgtgtttgaagtgccgccggacgagctcgacgcgatgcgggagcttgtgacggacgtcatggagtcggcggtcccgctcgacgtgccgctgaaggtcgacgtcagctggggcgccgactggtacgcggcgaagtgagggaagcgggatcc

SEQ ID NO: 1178 - DNA, 2792 bp, Artificial Sequence
  Description of Artificial Sequence: Synthetic Caldibacillus cellulovorans CompA.2 DNA Polymerase S828I
atgaaatacctgctgccgaccgctgctgctggtctgctgctcctcgctgcccagccggcgatggccatgggcaaactgattctggtcgacggaaacagcgtcgccaaccgggcgttttacgccgtccggctgctcagcacgcgcggcggcctgcacacaaacgcggtgtacggattcgccaacatgttgctcaagctgatcgaggaggaacggccgacgcattttctcgtcgcgttcgacgcgggcaaggcgacgttccgtcatcgcgaatacgaggcctacaaggcgggtcgcctgcagacgccgcccgagctgtccgagcagtttccgtacatccgggagctcgtccgggcgttcggcgtcgcgtccggcgagctggaggaatacgaggcggacgacatgatcggtacgctggcgaaacgggcggaggccgagggcgtcgacacgctggtcgtcaccggcgaccgcgatttgctccagctcgtatcggaccgcgtgaccgtcgcgctgacgcgcaagggcatcacggaaacggagcggtacgacccggcgcgcatccgcgaggaatacggcttcgatcccgaccgcatccgcgacctcaaagggctgatgggcgacgcgtctgacaatcttcccggcgttcccggcgtcggtgagaaaaccgcactgaaactgctcaggcagtacggttcgctggagagcgtcctggaacacgcgtcggaaatcgccggaaagctcggtgaaaatctgcgggcgcacgccgacgccgcccgattgagcaagcggctggcgacgatcgactgcgcggtaccgttgcagtcgggatgggactggctgcgcctcggcgaaccggaccgcgccgcgctcgcctcgctgttgcggcagctcgaattcaagtcgctgttgaaacggctcggactcgacggcacgtccgccgatgccgacgtcgacggcgtccgttcctccgcgcggccggcggacgagaaacggccgagggccgtcgccgtcgctgaggagggcgtcgacgtccgctgtccggatcgcccggaagaagtcgaagaagcgctgtcgcggctggaagccgcccagtcggtcgtcgtcgaggtgacgggcgacaacccgcacgacggcgaagtgcgcggcgtcgcatggtgggacggacatacggcgtatttcattccgtttgaacggctggtgcagtccgacatgcggccgctggccgactggctcgccgacgcgcgtcggccgaagcgtacgcacgactcccatcgcgctgaagtggcgctgttctggcacggccttgcgtttcgcggcacgtcgttctgcacgcatatcgccgcctatttgctcgaccccacggaatcgcgccatacgctggcggacctgtcgcgccgctacggtctgccgccggtaccggaagccgaggacgtttacggcaagggcgcgaagttcaaggttcccgatcgcgacacgctggcgcgttacgtcggccgcaaggccgccctagtcgcgcggctcgttccgctgctcgaggcggatttggcggcctgcggcatgcgttcgcttttttacgacctggagctgccgctttcatccgaactcgccgtcatggagacggtcggcgtccgcgtcgacgcggcggcgctcgccgcctacggcgaggaattgcgcgaggcggcggcgaaagtcgagcgggagatttacgagctggccgggacgacgttcaacatcggatcgacgaaacagctcggcgaaattttgttcgataagctggggctgcccgtcgtcaagaaaacgaaaaccggctattccaccgacgcagacgtgctggaggaactggcgccgtaccatccgatcgtcgaaaagattttgcattaccgccaactgacgaaattgcagtcgacctacatcgaggggcttttgaaagaaatccgtccgcaaaccggtaaaatccatacgtattatcagcagacgatcgcggcgacggggcggctgagcagtcagtttcccaatcttcagaacattccgatccgtctcgaagaggggcggaaaatccgcaaggcgttcgttccgtcagaaccgggatggctgatgctcgccgccgactattcgcagatcgaactgcgcgtgctcgcgcacgtttccggcgacgaacggctgaaggaagcgtttcggacaggcatggacatccacacgaagaccgcgatggacgtgttcggcgtttccgaagaccgcgtcgacgcgcgcatgcggcggcaggcgaaggcggtcaatttcggcatcatctacggcatcagcgatttcggactggcgcaaaacctgaacatttcccgcaaggaggcggcggagttcatccggcaatatttcgccgtcttttcgggcgtcaaggcgtaccgcgagcggatcgtcgagcaggcgcgccgcgacggttacgtgacgaccctgctcggtcgcaggcgctatttgccggacatcaacgcgattaattacaacctccgctcgttcgcggagcggacggcgatgaatacgccgatccagggcacggccgccgacatcatcaagaccgcgatggtgcgtctgacgcggcggatgcgcgacgtcggactgaagagccgcatgctgctgcaggttcacgacgagctcgtgtttgaagtgccgccggacgagctcgacgcgatgcgggagcttgtgacggacgtcatggagtcggcggtcccgctcgacgtgccgctgaaggtcgacgtcagctggggcgccgactggtacgcggcgaagtgagggaagcgggatcc

SEQ ID NO: 1179 - DNA, 2792 bp, Artificial Sequence
  Description of Artificial Sequence: Synthetic Caldibacillus cellulovorans CompA.2 DNA Polymerase S828L
atgaaatacctgctgccgaccgctgctgctggtctgctgctcctcgctgcccagccggcgatggccatgggcaaactgattctggtcgacggaaacagcgtcgccaaccgggcgttttacgccgtccggctgctcagcacgcgcggcggcctgcacacaaacgcggtgtacggattcgccaacatgttgctcaagctgatcgaggaggaacggccgacgcattttctcgtcgcgttcgacgcgggcaaggcgacgttccgtcatcgcgaatacgaggcctacaaggcgggtcgcctgcagacgccgcccgagctgtccgagcagtttccgtacatccgggagctcgtccgggcgttcggcgtcgcgtccggcgagctggaggaatacgaggcggacgacatgatcggtacgctggcgaaacgggcggaggccgagggcgtcgacacgctggtcgtcaccggcgaccgcgatttgctccagctcgtatcggaccgcgtgaccgtcgcgctgacgcgcaagggcatcacggaaacggagcggtacgacccggcgcgcatccgcgaggaatacggcttcgatcccgaccgcatccgcgacctcaaagggctgatgggcgacgcgtctgacaatcttcccggcgttcccggcgtcggtgagaaaaccgcactgaaactgctcaggcagtacggttcgctggagagcgtcctggaacacgcgtcggaaatcgccggaaagctcggtgaaaatctgcgggcgcacgccgacgccgcccgattgagcaagcggctggcgacgatcgactgcgcggtaccgttgcagtcgggatgggactggctgcgcctcggcgaaccggaccgcgccgcgctcgcctcgctgttgcggcagctcgaattcaagtcgctgttgaaacggctcggactcgacggcacgtccgccgatgccgacgtcgacggcgtccgttcctccgcgcggccggcggacgagaaacggccgagggccgtcgccgtcgctgaggagggcgtcgacgtccgctgtccggatcgcccggaagaagtcgaagaagcgctgtcgcggctggaagccgcccagtcggtcgtcgtcgaggtgacgggcgacaacccgcacgacggcgaagtgcgcggcgtcgcatggtgggacggacatacggcgtatttcattccgtttgaacggctggtgcagtccgacatgcggccgctggccgactggctcgccgacgcgcgtcggccgaagcgtacgcacgactcccatcgcgctgaagtggcgctgttctggcacggccttgcgtttcgcggcacgtcgttctgcacgcatatcgccgcctatttgctcgaccccacggaatcgcgccatacgctggcggacctgtcgcgccgctacggtctgccgccggtaccggaagccgaggacgtttacggcaagggcgcgaagttcaaggttcccgatcgcgacacgctggcgcgttacgtcggccgcaaggccgccctagtcgcgcggctcgttccgctgctcgaggcggatttggcggcctgcggcatgcgttcgcttttttacgacctggagctgccgctttcatccgaactcgccgtcatggagacggtcggcgtccgcgtcgacgcggcggcgctcgccgcctacggcgaggaattgcgcgaggcggcggcgaaagtcgagcgggagatttacgagctggccgggacgacgttcaacatcggatcgacgaaacagctcggcgaaattttgttcgataagctggggctgcccgtcgtcaagaaaacgaaaaccggctattccaccgacgcagacgtgctggaggaactggcgccgtaccatccgatcgtcgaaaagattttgcattaccgccaactgacgaaattgcagtcgacctacatcgaggggcttttgaaagaaatccgtccgcaaaccggtaaaatccatacgtattatcagcagacgatcgcggcgacggggcggctgagcagtcagtttcccaatcttcagaacattccgatccgtctcgaagaggggcggaaaatccgcaaggcgttcgttccgtcagaaccgggatggctgatgctcgccgccgactattcgcagatcgaactgcgcgtgctcgcgcacgtttccggcgacgaacggctgaaggaagcgtttcggacaggcatggacatccacacgaagaccgcgatggacgtgttcggcgtttccgaagaccgcgtcgacgcgcgcatgcggcggcaggcgaaggcggtcaatttcggcatcatctacggcatcagcgatttcggactggcgcaaaacctgaacatttcccgcaaggaggcggcggagttcatccggcaatatttcgccgtcttttcgggcgtcaaggcgtaccgcgagcggatcgtcgagcaggcgcgccgcgacggttacgtgacgaccctgctcggtcgcaggcgctatttgccggacatcaacgcgcttaattacaacctccgctcgttcgcggagcggacggcgatgaatacgccgatccagggcacggccgccgacatcatcaagaccgcgatggtgcgtctgacgcggcggatgcgcgacgtcggactgaagagccgcatgctgctgcaggttcacgacgagctcgtgtttgaagtgccgccggacgagctcgacgcgatgcgggagcttgtgacggacgtcatggagtcggcggtcccgctcgacgtgccgctgaaggtcgacgtcagctggggcgccgactggtacgcggcgaagtgagggaagcgggatcc

SEQ ID NO: 1180 - DNA, 2792 bp, Artificial Sequence
  Description of Artificial Sequence: Synthetic Caldibacillus cellulovorans CompA.2 DNA Polymerase S828K
atgaaatacctgctgccgaccgctgctgctggtctgctgctcctcgctgcccagccggcgatggccatgggcaaactgattctggtcgacggaaacagcgtcgccaaccgggcgttttacgccgtccggctgctcagcacgcgcggcggcctgcacacaaacgcggtgtacggattcgccaacatgttgctcaagctgatcgaggaggaacggccgacgcattttctcgtcgcgttcgacgcgggcaaggcgacgttccgtcatcgcgaatacgaggcctacaaggcgggtcgcctgcagacgccgcccgagctgtccgagcagtttccgtacatccgggagctcgtccgggcgttcggcgtcgcgtccggcgagctggaggaatacgaggcggacgacatgatcggtacgctggcgaaacgggcggaggccgagggcgtcgacacgctggtcgtcaccggcgaccgcgatttgctccagctcgtatcggaccgcgtgaccgtcgcgctgacgcgcaagggcatcacggaaacggagcggtacgacccggcgcgcatccgcgaggaatacggcttcgatcccgaccgcatccgcgacctcaaagggctgatgggcgacgcgtctgacaatcttcccggcgttcccggcgtcggtgagaaaaccgcactgaaactgctcaggcagtacggttcgctggagagcgtcctggaacacgcgtcggaaatcgccggaaagctcggtgaaaatctgcgggcgcacgccgacgccgcccgattgagcaagcggctggcgacgatcgactgcgcggtaccgttgcagtcgggatgggactggctgcgcctcggcgaaccggaccgcgccgcgctcgcctcgctgttgcggcagctcgaattcaagtcgctgttgaaacggctcggactcgacggcacgtccgccgatgccgacgtcgacggcgtccgttcctccgcgcggccggcggacgagaaacggccgagggccgtcgccgtcgctgaggagggcgtcgacgtccgctgtccggatcgcccggaagaagtcgaagaagcgctgtcgcggctggaagccgcccagtcggtcgtcgtcgaggtgacgggcgacaacccgcacgacggcgaagtgcgcggcgtcgcatggtgggacggacatacggcgtatttcattccgtttgaacggctggtgcagtccgacatgcggccgctggccgactggctcgccgacgcgcgtcggccgaagcgtacgcacgactcccatcgcgctgaagtggcgctgttctggcacggccttgcgtttcgcggcacgtcgttctgcacgcatatcgccgcctatttgctcgaccccacggaatcgcgccatacgctggcggacctgtcgcgccgctacggtctgccgccggtaccggaagccgaggacgtttacggcaagggcgcgaagttcaaggttcccgatcgcgacacgctggcgcgttacgtcggccgcaaggccgccctagtcgcgcggctcgttccgctgctcgaggcggatttggcggcctgcggcatgcgttcgcttttttacgacctggagctgccgctttcatccgaactcgccgtcatggagacggtcggcgtccgcgtcgacgcggcggcgctcgccgcctacggcgaggaattgcgcgaggcggcggcgaaagtcgagcgggagatttacgagctggccgggacgacgttcaacatcggatcgacgaaacagctcggcgaaattttgttcgataagctggggctgcccgtcgtcaagaaaacgaaaaccggctattccaccgacgcagacgtgctggaggaactggcgccgtaccatccgatcgtcgaaaagattttgcattaccgccaactgacgaaattgcagtcgacctacatcgaggggcttttgaaagaaatccgtccgcaaaccggtaaaatccatacgtattatcagcagacgatcgcggcgacggggcggctgagcagtcagtttcccaatcttcagaacattccgatccgtctcgaagaggggcggaaaatccgcaaggcgttcgttccgtcagaaccgggatggctgatgctcgccgccgactattcgcagatcgaactgcgcgtgctcgcgcacgtttccggcgacgaacggctgaaggaagcgtttcggacaggcatggacatccacacgaagaccgcgatggacgtgttcggcgtttccgaagaccgcgtcgacgcgcgcatgcggcggcaggcgaaggcggtcaatttcggcatcatctacggcatcagcgatttcggactggcgcaaaacctgaacatttcccgcaaggaggcggcggagttcatccggcaatatttcgccgtcttttcgggcgtcaaggcgtaccgcgagcggatcgtcgagcaggcgcgccgcgacggttacgtgacgaccctgctcggtcgcaggcgctatttgccggacatcaacgcgaaaaattacaacctccgctcgttcgcggagcggacggcgatgaatacgccgatccagggcacggccgccgacatcatcaagaccgcgatggtgcgtctgacgcggcggatgcgcgacgtcggactgaagagccgcatgctgctgcaggttcacgacgagctcgtgtttgaagtgccgccggacgagctcgacgcgatgcgggagcttgtgacggacgtcatggagtcggcggtcccgctcgacgtgccgctgaaggtcgacgtcagctggggcgccgactggtacgcggcgaagtgagggaagcgggatcc

SEQ ID NO: 1181 - DNA, 2792 bp, Artificial Sequence
  Description of Artificial Sequence: Synthetic Caldibacillus cellulovorans CompA.2 DNA Polymerase S828M
atgaaatacctgctgccgaccgctgctgctggtctgctgctcctcgctgcccagccggcgatggccatgggcaaactgattctggtcgacggaaacagcgtcgccaaccgggcgttttacgccgtccggctgctcagcacgcgcggcggcctgcacacaaacgcggtgtacggattcgccaacatgttgctcaagctgatcgaggaggaacggccgacgcattttctcgtcgcgttcgacgcgggcaaggcgacgttccgtcatcgcgaatacgaggcctacaaggcgggtcgcctgcagacgccgcccgagctgtccgagcagtttccgtacatccgggagctcgtccgggcgttcggcgtcgcgtccggcgagctggaggaatacgaggcggacgacatgatcggtacgctggcgaaacgggcggaggccgagggcgtcgacacgctggtcgtcaccggcgaccgcgatttgctccagctcgtatcggaccgcgtgaccgtcgcgctgacgcgcaagggcatcacggaaacggagcggtacgacccggcgcgcatccgcgaggaatacggcttcgatcccgaccgcatccgcgacctcaaagggctgatgggcgacgcgtctgacaatcttcccggcgttcccggcgtcggtgagaaaaccgcactgaaactgctcaggcagtacggttcgctggagagcgtcctggaacacgcgtcggaaatcgccggaaagctcggtgaaaatctgcgggcgcacgccgacgccgcccgattgagcaagcggctggcgacgatcgactgcgcggtaccgttgcagtcgggatgggactggctgcgcctcggcgaaccggaccgcgccgcgctcgcctcgctgttgcggcagctcgaattcaagtcgctgttgaaacggctcggactcgacggcacgtccgccgatgccgacgtcgacggcgtccgttcctccgcgcggccggcggacgagaaacggccgagggccgtcgccgtcgctgaggagggcgtcgacgtccgctgtccggatcgcccggaagaagtcgaagaagcgctgtcgcggctggaagccgcccagtcggtcgtcgtcgaggtgacgggcgacaacccgcacgacggcgaagtgcgcggcgtcgcatggtgggacggacatacggcgtatttcattccgtttgaacggctggtgcagtccgacatgcggccgctggccgactggctcgccgacgcgcgtcggccgaagcgtacgcacgactcccatcgcgctgaagtggcgctgttctggcacggccttgcgtttcgcggcacgtcgttctgcacgcatatcgccgcctatttgctcgaccccacggaatcgcgccatacgctggcggacctgtcgcgccgctacggtctgccgccggtaccggaagccgaggacgtttacggcaagggcgcgaagttcaaggttcccgatcgcgacacgctggcgcgttacgtcggccgcaaggccgccctagtcgcgcggctcgttccgctgctcgaggcggatttggcggcctgcggcatgcgttcgcttttttacgacctggagctgccgctttcatccgaactcgccgtcatggagacggtcggcgtccgcgtcgacgcggcggcgctcgccgcctacggcgaggaattgcgcgaggcggcggcgaaagtcgagcgggagatttacgagctggccgggacgacgttcaacatcggatcgacgaaacagctcggcgaaattttgttcgataagctggggctgcccgtcgtcaagaaaacgaaaaccggctattccaccgacgcagacgtgctggaggaactggcgccgtaccatccgatcgtcgaaaagattttgcattaccgccaactgacgaaattgcagtcgacctacatcgaggggcttttgaaagaaatccgtccgcaaaccggtaaaatccatacgtattatcagcagacgatcgcggcgacggggcggctgagcagtcagtttcccaatcttcagaacattccgatccgtctcgaagaggggcggaaaatccgcaaggcgttcgttccgtcagaaccgggatggctgatgctcgccgccgactattcgcagatcgaactgcgcgtgctcgcgcacgtttccggcgacgaacggctgaaggaagcgtttcggacaggcatggacatccacacgaagaccgcgatggacgtgttcggcgtttccgaagaccgcgtcgacgcgcgcatgcggcggcaggcgaaggcggtcaatttcggcatcatctacggcatcagcgatttcggactggcgcaaaacctgaacatttcccgcaaggaggcggcggagttcatccggcaatatttcgccgtcttttcgggcgtcaaggcgtaccgcgagcggatcgtcgagcaggcgcgccgcgacggttacgtgacgaccctgctcggtcgcaggcgctatttgccggacatcaacgcgatgaattacaacctccgctcgttcgcggagcggacggcgatgaatacgccgatccagggcacggccgccgacatcatcaagaccgcgatggtgcgtctgacgcggcggatgcgcgacgtcggactgaagagccgcatgctgctgcaggttcacgacgagctcgtgtttgaagtgccgccggacgagctcgacgcgatgcgggagcttgtgacggacgtcatggagtcggcggtcccgctcgacgtgccgctgaaggtcgacgtcagctggggcgccgactggtacgcggcgaagtgagggaagcgggatcc

SEQ ID NO: 1182 - DNA, 2792 bp, Artificial Sequence
  Description of Artificial Sequence: Synthetic Caldibacillus cellulovorans CompA.2 DNA Polymerase S828F
atgaaatacctgctgccgaccgctgctgctggtctgctgctcctcgctgcccagccggcgatggccatgggcaaactgattctggtcgacggaaacagcgtcgccaaccgggcgttttacgccgtccggctgctcagcacgcgcggcggcctgcacacaaacgcggtgtacggattcgccaacatgttgctcaagctgatcgaggaggaacggccgacgcattttctcgtcgcgttcgacgcgggcaaggcgacgttccgtcatcgcgaatacgaggcctacaaggcgggtcgcctgcagacgccgcccgagctgtccgagcagtttccgtacatccgggagctcgtccgggcgttcggcgtcgcgtccggcgagctggaggaatacgaggcggacgacatgatcggtacgctggcgaaacgggcggaggccgagggcgtcgacacgctggtcgtcaccggcgaccgcgatttgctccagctcgtatcggaccgcgtgaccgtcgcgctgacgcgcaagggcatcacggaaacggagcggtacgacccggcgcgcatccgcgaggaatacggcttcgatcccgaccgcatccgcgacctcaaagggctgatgggcgacgcgtctgacaatcttcccggcgttcccggcgtcggtgagaaaaccgcactgaaactgctcaggcagtacggttcgctggagagcgtcctggaacacgcgtcggaaatcgccggaaagctcggtgaaaatctgcgggcgcacgccgacgccgcccgattgagcaagcggctggcgacgatcgactgcgcggtaccgttgcagtcgggatgggactggctgcgcctcggcgaaccggaccgcgccgcgctcgcctcgctgttgcggcagctcgaattcaagtcgctgttgaaacggctcggactcgacggcacgtccgccgatgccgacgtcgacggcgtccgttcctccgcgcggccggcggacgagaaacggccgagggccgtcgccgtcgctgaggagggcgtcgacgtccgctgtccggatcgcccggaagaagtcgaagaagcgctgtcgcggctggaagccgcccagtcggtcgtcgtcgaggtgacgggcgacaacccgcacgacggcgaagtgcgcggcgtcgcatggtgggacggacatacggcgtatttcattccgtttgaacggctggtgcagtccgacatgcggccgctggccgactggctcgccgacgcgcgtcggccgaagcgtacgcacgactcccatcgcgctgaagtggcgctgttctggcacggccttgcgtttcgcggcacgtcgttctgcacgcatatcgccgcctatttgctcgaccccacggaatcgcgccatacgctggcggacctgtcgcgccgctacggtctgccgccggtaccggaagccgaggacgtttacggcaagggcgcgaagttcaaggttcccgatcgcgacacgctggcgcgttacgtcggccgcaaggccgccctagtcgcgcggctcgttccgctgctcgaggcggatttggcggcctgcggcatgcgttcgcttttttacgacctggagctgccgctttcatccgaactcgccgtcatggagacggtcggcgtccgcgtcgacgcggcggcgctcgccgcctacggcgaggaattgcgcgaggcggcggcgaaagtcgagcgggagatttacgagctggccgggacgacgttcaacatcggatcgacgaaacagctcggcgaaattttgttcgataagctggggctgcccgtcgtcaagaaaacgaaaaccggctattccaccgacgcagacgtgctggaggaactggcgccgtaccatccgatcgtcgaaaagattttgcattaccgccaactgacgaaattgcagtcgacctacatcgaggggcttttgaaagaaatccgtccgcaaaccggtaaaatccatacgtattatcagcagacgatcgcggcgacggggcggctgagcagtcagtttcccaatcttcagaacattccgatccgtctcgaagaggggcggaaaatccgcaaggcgttcgttccgtcagaaccgggatggctgatgctcgccgccgactattcgcagatcgaactgcgcgtgctcgcgcacgtttccggcgacgaacggctgaaggaagcgtttcggacaggcatggacatccacacgaagaccgcgatggacgtgttcggcgtttccgaagaccgcgtcgacgcgcgcatgcggcggcaggcgaaggcggtcaatttcggcatcatctacggcatcagcgatttcggactggcgcaaaacctgaacatttcccgcaaggaggcggcggagttcatccggcaatatttcgccgtcttttcgggcgtcaaggcgtaccgcgagcggatcgtcgagcaggcgcgccgcgacggttacgtgacgaccctgctcggtcgcaggcgctatttgccggacatcaacgcgtttaattacaacctccgctcgttcgcggagcggacggcgatgaatacgccgatccagggcacggccgccgacatcatcaagaccgcgatggtgcgtctgacgcggcggatgcgcgacgtcggactgaagagccgcatgctgctgcaggttcacgacgagctcgtgtttgaagtgccgccggacgagctcgacgcgatgcgggagcttgtgacggacgtcatggagtcggcggtcccgctcgacgtgccgctgaaggtcgacgtcagctggggcgccgactggtacgcggcgaagtgagggaagcgggatcc

SEQ ID NO: 1183 - DNA, 2792 bp, Artificial Sequence
  Description of Artificial Sequence: Synthetic Caldibacillus cellulovorans CompA.2 DNA Polymerase S828P
atgaaatacctgctgccgaccgctgctgctggtctgctgctcctcgctgcccagccggcgatggccatgggcaaactgattctggtcgacggaaacagcgtcgccaaccgggcgttttacgccgtccggctgctcagcacgcgcggcggcctgcacacaaacgcggtgtacggattcgccaacatgttgctcaagctgatcgaggaggaacggccgacgcattttctcgtcgcgttcgacgcgggcaaggcgacgttccgtcatcgcgaatacgaggcctacaaggcgggtcgcctgcagacgccgcccgagctgtccgagcagtttccgtacatccgggagctcgtccgggcgttcggcgtcgcgtccggcgagctggaggaatacgaggcggacgacatgatcggtacgctggcgaaacgggcggaggccgagggcgtcgacacgctggtcgtcaccggcgaccgcgatttgctccagctcgtatcggaccgcgtgaccgtcgcgctgacgcgcaagggcatcacggaaacggagcggtacgacccggcgcgcatccgcgaggaatacggcttcgatcccgaccgcatccgcgacctcaaagggctgatgggcgacgcgtctgacaatcttcccggcgttcccggcgtcggtgagaaaaccgcactgaaactgctcaggcagtacggttcgctggagagcgtcctggaacacgcgtcggaaatcgccggaaagctcggtgaaaatctgcgggcgcacgccgacgccgcccgattgagcaagcggctggcgacgatcgactgcgcggtaccgttgcagtcgggatgggactggctgcgcctcggcgaaccggaccgcgccgcgctcgcctcgctgttgcggcagctcgaattcaagtcgctgttgaaacggctcggactcgacggcacgtccgccgatgccgacgtcgacggcgtccgttcctccgcgcggccggcggacgagaaacggccgagggccgtcgccgtcgctgaggagggcgtcgacgtccgctgtccggatcgcccggaagaagtcgaagaagcgctgtcgcggctggaagccgcccagtcggtcgtcgtcgaggtgacgggcgacaacccgcacgacggcgaagtgcgcggcgtcgcatggtgggacggacatacggcgtatttcattccgtttgaacggctggtgcagtccgacatgcggccgctggccgactggctcgccgacgcgcgtcggccgaagcgtacgcacgactcccatcgcgctgaagtggcgctgttctggcacggccttgcgtttcgcggcacgtcgttctgcacgcatatcgccgcctatttgctcgaccccacggaatcgcgccatacgctggcggacctgtcgcgccgctacggtctgccgccggtaccggaagccgaggacgtttacggcaagggcgcgaagttcaaggttcccgatcgcgacacgctggcgcgttacgtcggccgcaaggccgccctagtcgcgcggctcgttccgctgctcgaggcggatttggcggcctgcggcatgcgttcgcttttttacgacctggagctgccgctttcatccgaactcgccgtcatggagacggtcggcgtccgcgtcgacgcggcggcgctcgccgcctacggcgaggaattgcgcgaggcggcggcgaaagtcgagcgggagatttacgagctggccgggacgacgttcaacatcggatcgacgaaacagctcggcgaaattttgttcgataagctggggctgcccgtcgtcaagaaaacgaaaaccggctattccaccgacgcagacgtgctggaggaactggcgccgtaccatccgatcgtcgaaaagattttgcattaccgccaactgacgaaattgcagtcgacctacatcgaggggcttttgaaagaaatccgtccgcaaaccggtaaaatccatacgtattatcagcagacgatcgcggcgacggggcggctgagcagtcagtttcccaatcttcagaacattccgatccgtctcgaagaggggcggaaaatccgcaaggcgttcgttccgtcagaaccgggatggctgatgctcgccgccgactattcgcagatcgaactgcgcgtgctcgcgcacgtttccggcgacgaacggctgaaggaagcgtttcggacaggcatggacatccacacgaagaccgcgatggacgtgttcggcgtttccgaagaccgcgtcgacgcgcgcatgcggcggcaggcgaaggcggtcaatttcggcatcatctacggcatcagcgatttcggactggcgcaaaacctgaacatttcccgcaaggaggcggcggagttcatccggcaatatttcgccgtcttttcgggcgtcaaggcgtaccgcgagcggatcgtcgagcaggcgcgccgcgacggttacgtgacgaccctgctcggtcgcaggcgctatttgccggacatcaacgcgcctaattacaacctccgctcgttcgcggagcggacggcgatgaatacgccgatccagggcacggccgccgacatcatcaagaccgcgatggtgcgtctgacgcggcggatgcgcgacgtcggactgaagagccgcatgctgctgcaggttcacgacgagctcgtgtttgaagtgccgccggacgagctcgacgcgatgcgggagcttgtgacggacgtcatggagtcggcggtcccgctcgacgtgccgctgaaggtcgacgtcagctggggcgccgactggtacgcggcgaagtgagggaagcgggatcc

SEQ ID NO: 1184 - DNA, 2792 bp, Artificial Sequence
  Description of Artificial Sequence: Synthetic Caldibacillus cellulovorans CompA.2 DNA Polymerase S828T
atgaaatacctgctgccgaccgctgctgctggtctgctgctcctcgctgcccagccggcgatggccatgggcaaactgattctggtcgacggaaacagcgtcgccaaccgggcgttttacgccgtccggctgctcagcacgcgcggcggcctgcacacaaacgcggtgtacggattcgccaacatgttgctcaagctgatcgaggaggaacggccgacgcattttctcgtcgcgttcgacgcgggcaaggcgacgttccgtcatcgcgaatacgaggcctacaaggcgggtcgcctgcagacgccgcccgagctgtccgagcagtttccgtacatccgggagctcgtccgggcgttcggcgtcgcgtccggcgagctggaggaatacgaggcggacgacatgatcggtacgctggcgaaacgggcggaggccgagggcgtcgacacgctggtcgtcaccggcgaccgcgatttgctccagctcgtatcggaccgcgtgaccgtcgcgctgacgcgcaagggcatcacggaaacggagcggtacgacccggcgcgcatccgcgaggaatacggcttcgatcccgaccgcatccgcgacctcaaagggctgatgggcgacgcgtctgacaatcttcccggcgttcccggcgtcggtgagaaaaccgcactgaaactgctcaggcagtacggttcgctggagagcgtcctggaacacgcgtcggaaatcgccggaaagctcggtgaaaatctgcgggcgcacgccgacgccgcccgattgagcaagcggctggcgacgatcgactgcgcggtaccgttgcagtcgggatgggactggctgcgcctcggcgaaccggaccgcgccgcgctcgcctcgctgttgcggcagctcgaattcaagtcgctgttgaaacggctcggactcgacggcacgtccgccgatgccgacgtcgacggcgtccgttcctccgcgcggccggcggacgagaaacggccgagggccgtcgccgtcgctgaggagggcgtcgacgtccgctgtccggatcgcccggaagaagtcgaagaagcgctgtcgcggctggaagccgcccagtcggtcgtcgtcgaggtgacgggcgacaacccgcacgacggcgaagtgcgcggcgtcgcatggtgggacggacatacggcgtatttcattccgtttgaacggctggtgcagtccgacatgcggccgctggccgactggctcgccgacgcgcgtcggccgaagcgtacgcacgactcccatcgcgctgaagtggcgctgttctggcacggccttgcgtttcgcggcacgtcgttctgcacgcatatcgccgcctatttgctcgaccccacggaatcgcgccatacgctggcggacctgtcgcgccgctacggtctgccgccggtaccggaagccgaggacgtttacggcaagggcgcgaagttcaaggttcccgatcgcgacacgctggcgcgttacgtcggccgcaaggccgccctagtcgcgcggctcgttccgctgctcgaggcggatttggcggcctgcggcatgcgttcgcttttttacgacctggagctgccgctttcatccgaactcgccgtcatggagacggtcggcgtccgcgtcgacgcggcggcgctcgccgcctacggcgaggaattgcgcgaggcggcggcgaaagtcgagcgggagatttacgagctggccgggacgacgttcaacatcggatcgacgaaacagctcggcgaaattttgttcgataagctggggctgcccgtcgtcaagaaaacgaaaaccggctattccaccgacgcagacgtgctggaggaactggcgccgtaccatccgatcgtcgaaaagattttgcattaccgccaactgacgaaattgcagtcgacctacatcgaggggcttttgaaagaaatccgtccgcaaaccggtaaaatccatacgtattatcagcagacgatcgcggcgacggggcggctgagcagtcagtttcccaatcttcagaacattccgatccgtctcgaagaggggcggaaaatccgcaaggcgttcgttccgtcagaaccgggatggctgatgctcgccgccgactattcgcagatcgaactgcgcgtgctcgcgcacgtttccggcgacgaacggctgaaggaagcgtttcggacaggcatggacatccacacgaagaccgcgatggacgtgttcggcgtttccgaagaccgcgtcgacgcgcgcatgcggcggcaggcgaaggcggtcaatttcggcatcatctacggcatcagcgatttcggactggcgcaaaacctgaacatttcccgcaaggaggcggcggagttcatccggcaatatttcgccgtcttttcgggcgtcaaggcgtaccgcgagcggatcgtcgagcaggcgcgccgcgacggttacgtgacgaccctgctcggtcgcaggcgctatttgccggacatcaacgcgactaattacaacctccgctcgttcgcggagcggacggcgatgaatacgccgatccagggcacggccgccgacatcatcaagaccgcgatggtgcgtctgacgcggcggatgcgcgacgtcggactgaagagccgcatgctgctgcaggttcacgacgagctcgtgtttgaagtgccgccggacgagctcgacgcgatgcgggagcttgtgacggacgtcatggagtcggcggtcccgctcgacgtgccgctgaaggtcgacgtcagctggggcgccgactggtacgcggcgaagtgagggaagcgggatcc

SEQ ID NO: 1185 - DNA, 2792 bp, Artificial Sequence
  Description of Artificial Sequence: Synthetic Caldibacillus cellulovorans CompA.2 DNA Polymerase S828W
atgaaatacctgctgccgaccgctgctgctggtctgctgctcctcgctgcccagccggcgatggccatgggcaaactgattctggtcgacggaaacagcgtcgccaaccgggcgttttacgccgtccggctgctcagcacgcgcggcggcctgcacacaaacgcggtgtacggattcgccaacatgttgctcaagctgatcgaggaggaacggccgacgcattttctcgtcgcgttcgacgcgggcaaggcgacgttccgtcatcgcgaatacgaggcctacaaggcgggtcgcctgcagacgccgcccgagctgtccgagcagtttccgtacatccgggagctcgtccgggcgttcggcgtcgcgtccggcgagctggaggaatacgaggcggacgacatgatcggtacgctggcgaaacgggcggaggccgagggcgtcgacacgctggtcgtcaccggcgaccgcgatttgctccagctcgtatcggaccgcgtgaccgtcgcgctgacgcgcaagggcatcacggaaacggagcggtacgacccggcgcgcatccgcgaggaatacggcttcgatcccgaccgcatccgcgacctcaaagggctgatgggcgacgcgtctgacaatcttcccggcgttcccggcgtcggtgagaaaaccgcactgaaactgctcaggcagtacggttcgctggagagcgtcctggaacacgcgtcggaaatcgccggaaagctcggtgaaaatctgcgggcgcacgccgacgccgcccgattgagcaagcggctggcgacgatcgactgcgcggtaccgttgcagtcgggatgggactggctgcgcctcggcgaaccggaccgcgccgcgctcgcctcgctgttgcggcagctcgaattcaagtcgctgttgaaacggctcggactcgacggcacgtccgccgatgccgacgtcgacggcgtccgttcctccgcgcggccggcggacgagaaacggccgagggccgtcgccgtcgctgaggagggcgtcgacgtccgctgtccggatcgcccggaagaagtcgaagaagcgctgtcgcggctggaagccgcccagtcggtcgtcgtcgaggtgacgggcgacaacccgcacgacggcgaagtgcgcggcgtcgcatggtgggacggacatacggcgtatttcattccgtttgaacggctggtgcagtccgacatgcggccgctggccgactggctcgccgacgcgcgtcggccgaagcgtacgcacgactcccatcgcgctgaagtggcgctgttctggcacggccttgcgtttcgcggcacgtcgttctgcacgcatatcgccgcctatttgctcgaccccacggaatcgcgccatacgctggcggacctgtcgcgccgctacggtctgccgccggtaccggaagccgaggacgtttacggcaagggcgcgaagttcaaggttcccgatcgcgacacgctggcgcgttacgtcggccgcaaggccgccctagtcgcgcggctcgttccgctgctcgaggcggatttggcggcctgcggcatgcgttcgcttttttacgacctggagctgccgctttcatccgaactcgccgtcatggagacggtcggcgtccgcgtcgacgcggcggcgctcgccgcctacggcgaggaattgcgcgaggcggcggcgaaagtcgagcgggagatttacgagctggccgggacgacgttcaacatcggatcgacgaaacagctcggcgaaattttgttcgataagctggggctgcccgtcgtcaagaaaacgaaaaccggctattccaccgacgcagacgtgctggaggaactggcgccgtaccatccgatcgtcgaaaagattttgcattaccgccaactgacgaaattgcagtcgacctacatcgaggggcttttgaaagaaatccgtccgcaaaccggtaaaatccatacgtattatcagcagacgatcgcggcgacggggcggctgagcagtcagtttcccaatcttcagaacattccgatccgtctcgaagaggggcggaaaatccgcaaggcgttcgttccgtcagaaccgggatggctgatgctcgccgccgactattcgcagatcgaactgcgcgtgctcgcgcacgtttccggcgacgaacggctgaaggaagcgtttcggacaggcatggacatccacacgaagaccgcgatggacgtgttcggcgtttccgaagaccgcgtcgacgcgcgcatgcggcggcaggcgaaggcggtcaatttcggcatcatctacggcatcagcgatttcggactggcgcaaaacctgaacatttcccgcaaggaggcggcggagttcatccggcaatatttcgccgtcttttcgggcgtcaaggcgtaccgcgagcggatcgtcgagcaggcgcgccgcgacggttacgtgacgaccctgctcggtcgcaggcgctatttgccggacatcaacgcgtggaattacaacctccgctcgttcgcggagcggacggcgatgaatacgccgatccagggcacggccgccgacatcatcaagaccgcgatggtgcgtctgacgcggcggatgcgcgacgtcggactgaagagccgcatgctgctgcaggttcacgacgagctcgtgtttgaagtgccgccggacgagctcgacgcgatgcgggagcttgtgacggacgtcatggagtcggcggtcccgctcgacgtgccgctgaaggtcgacgtcagctggggcgccgactggtacgcggcgaagtgagggaagcgggatcc

SEQ ID NO: 1186 - DNA, 2792 bp, Artificial Sequence
  Description of Artificial Sequence: Synthetic Caldibacillus cellulovorans CompA.2 DNA Polymerase S828Y
atgaaatacctgctgccgaccgctgctgctggtctgctgctcctcgctgcccagccggcgatggccatgggcaaactgattctggtcgacggaaacagcgtcgccaaccgggcgttttacgccgtccggctgctcagcacgcgcggcggcctgcacacaaacgcggtgtacggattcgccaacatgttgctcaagctgatcgaggaggaacggccgacgcattttctcgtcgcgttcgacgcgggcaaggcgacgttccgtcatcgcgaatacgaggcctacaaggcgggtcgcctgcagacgccgcccgagctgtccgagcagtttccgtacatccgggagctcgtccgggcgttcggcgtcgcgtccggcgagctggaggaatacgaggcggacgacatgatcggtacgctggcgaaacgggcggaggccgagggcgtcgacacgctggtcgtcaccggcgaccgcgatttgctccagctcgtatcggaccgcgtgaccgtcgcgctgacgcgcaagggcatcacggaaacggagcggtacgacccggcgcgcatccgcgaggaatacggcttcgatcccgaccgcatccgcgacctcaaagggctgatgggcgacgcgtctgacaatcttcccggcgttcccggcgtcggtgagaaaaccgcactgaaactgctcaggcagtacggttcgctggagagcgtcctggaacacgcgtcggaaatcgccggaaagctcggtgaaaatctgcgggcgcacgccgacgccgcccgattgagcaagcggctggcgacgatcgactgcgcggtaccgttgcagtcgggatgggactggctgcgcctcggcgaaccggaccgcgccgcgctcgcctcgctgttgcggcagctcgaattcaagtcgctgttgaaacggctcggactcgacggcacgtccgccgatgccgacgtcgacggcgtccgttcctccgcgcggccggcggacgagaaacggccgagggccgtcgccgtcgctgaggagggcgtcgacgtccgctgtccggatcgcccggaagaagtcgaagaagcgctgtcgcggctggaagccgcccagtcggtcgtcgtcgaggtgacgggcgacaacccgcacgacggcgaagtgcgcggcgtcgcatggtgggacggacatacggcgtatttcattccgtttgaacggctggtgcagtccgacatgcggccgctggccgactggctcgccgacgcgcgtcggccgaagcgtacgcacgactcccatcgcgctgaagtggcgctgttctggcacggccttgcgtttcgcggcacgtcgttctgcacgcatatcgccgcctatttgctcgaccccacggaatcgcgccatacgctggcggacctgtcgcgccgctacggtctgccgccggtaccggaagccgaggacgtttacggcaagggcgcgaagttcaaggttcccgatcgcgacacgctggcgcgttacgtcggccgcaaggccgccctagtcgcgcggctcgttccgctgctcgaggcggatttggcggcctgcggcatgcgttcgcttttttacgacctggagctgccgctttcatccgaactcgccgtcatggagacggtcggcgtccgcgtcgacgcggcggcgctcgccgcctacggcgaggaattgcgcgaggcggcggcgaaagtcgagcgggagatttacgagctggccgggacgacgttcaacatcggatcgacgaaacagctcggcgaaattttgttcgataagctggggctgcccgtcgtcaagaaaacgaaaaccggctattccaccgacgcagacgtgctggaggaactggcgccgtaccatccgatcgtcgaaaagattttgcattaccgccaactgacgaaattgcagtcgacctacatcgaggggcttttgaaagaaatccgtccgcaaaccggtaaaatccatacgtattatcagcagacgatcgcggcgacggggcggctgagcagtcagtttcccaatcttcagaacattccgatccgtctcgaagaggggcggaaaatccgcaaggcgttcgttccgtcagaaccgggatggctgatgctcgccgccgactattcgcagatcgaactgcgcgtgctcgcgcacgtttccggcgacgaacggctgaaggaagcgtttcggacaggcatggacatccacacgaagaccgcgatggacgtgttcggcgtttccgaagaccgcgtcgacgcgcgcatgcggcggcaggcgaaggcggtcaatttcggcatcatctacggcatcagcgatttcggactggcgcaaaacctgaacatttcccgcaaggaggcggcggagttcatccggcaatatttcgccgtcttttcgggcgtcaaggcgtaccgcgagcggatcgtcgagcaggcgcgccgcgacggttacgtgacgaccctgctcggtcgcaggcgctatttgccggacatcaacgcgtataattacaacctccgctcgttcgcggagcggacggcgatgaatacgccgatccagggcacggccgccgacatcatcaagaccgcgatggtgcgtctgacgcggcggatgcgcgacgtcggactgaagagccgcatgctgctgcaggttcacgacgagctcgtgtttgaagtgccgccggacgagctcgacgcgatgcgggagcttgtgacggacgtcatggagtcggcggtcccgctcgacgtgccgctgaaggtcgacgtcagctggggcgccgactggtacgcggcgaagtgagggaagcgggatcc

SEQ ID NO: 1187 - DNA, 2792 bp, Artificial Sequence
  Description of Artificial Sequence: Synthetic Caldibacillus cellulovorans CompA.2 DNA Polymerase S828V
atgaaatacctgctgccgaccgctgctgctggtctgctgctcctcgctgcccagccggcgatggccatgggcaaactgattctggtcgacggaaacagcgtcgccaaccgggcgttttacgccgtccggctgctcagcacgcgcggcggcctgcacacaaacgcggtgtacggattcgccaacatgttgctcaagctgatcgaggaggaacggccgacgcattttctcgtcgcgttcgacgcgggcaaggcgacgttccgtcatcgcgaatacgaggcctacaaggcgggtcgcctgcagacgccgcccgagctgtccgagcagtttccgtacatccgggagctcgtccgggcgttcggcgtcgcgtccggcgagctggaggaatacgaggcggacgacatgatcggtacgctggcgaaacgggcggaggccgagggcgtcgacacgctggtcgtcaccggcgaccgcgatttgctccagctcgtatcggaccgcgtgaccgtcgcgctgacgcgcaagggcatcacggaaacggagcggtacgacccggcgcgcatccgcgaggaatacggcttcgatcccgaccgcatccgcgacctcaaagggctgatgggcgacgcgtctgacaatcttcccggcgttcccggcgtcggtgagaaaaccgcactgaaactgctcaggcagtacggttcgctggagagcgtcctggaacacgcgtcggaaatcgccggaaagctcggtgaaaatctgcgggcgcacgccgacgccgcccgattgagcaagcggctggcgacgatcgactgcgcggtaccgttgcagtcgggatgggactggctgcgcctcggcgaaccggaccgcgccgcgctcgcctcgctgttgcggcagctcgaattcaagtcgctgttgaaacggctcggactcgacggcacgtccgccgatgccgacgtcgacggcgtccgttcctccgcgcggccggcggacgagaaacggccgagggccgtcgccgtcgctgaggagggcgtcgacgtccgctgtccggatcgcccggaagaagtcgaagaagcgctgtcgcggctggaagccgcccagtcggtcgtcgtcgaggtgacgggcgacaacccgcacgacggcgaagtgcgcggcgtcgcatggtgggacggacatacggcgtatttcattccgtttgaacggctggtgcagtccgacatgcggccgctggccgactggctcgccgacgcgcgtcggccgaagcgtacgcacgactcccatcgcgctgaagtggcgctgttctggcacggccttgcgtttcgcggcacgtcgttctgcacgcatatcgccgcctatttgctcgaccccacggaatcgcgccatacgctggcggacctgtcgcgccgctacggtctgccgccggtaccggaagccgaggacgtttacggcaagggcgcgaagttcaaggttcccgatcgcgacacgctggcgcgttacgtcggccgcaaggccgccctagtcgcgcggctcgttccgctgctcgaggcggatttggcggcctgcggcatgcgttcgcttttttacgacctggagctgccgctttcatccgaactcgccgtcatggagacggtcggcgtccgcgtcgacgcggcggcgctcgccgcctacggcgaggaattgcgcgaggcggcggcgaaagtcgagcgggagatttacgagctggccgggacgacgttcaacatcggatcgacgaaacagctcggcgaaattttgttcgataagctggggctgcccgtcgtcaagaaaacgaaaaccggctattccaccgacgcagacgtgctggaggaactggcgccgtaccatccgatcgtcgaaaagattttgcattaccgccaactgacgaaattgcagtcgacctacatcgaggggcttttgaaagaaatccgtccgcaaaccggtaaaatccatacgtattatcagcagacgatcgcggcgacggggcggctgagcagtcagtttcccaatcttcagaacattccgatccgtctcgaagaggggcggaaaatccgcaaggcgttcgttccgtcagaaccgggatggctgatgctcgccgccgactattcgcagatcgaactgcgcgtgctcgcgcacgtttccggcgacgaacggctgaaggaagcgtttcggacaggcatggacatccacacgaagaccgcgatggacgtgttcggcgtttccgaagaccgcgtcgacgcgcgcatgcggcggcaggcgaaggcggtcaatttcggcatcatctacggcatcagcgatttcggactggcgcaaaacctgaacatttcccgcaaggaggcggcggagttcatccggcaatatttcgccgtcttttcgggcgtcaaggcgtaccgcgagcggatcgtcgagcaggcgcgccgcgacggttacgtgacgaccctgctcggtcgcaggcgctatttgccggacatcaacgcggttaattacaacctccgctcgttcgcggagcggacggcgatgaatacgccgatccagggcacggccgccgacatcatcaagaccgcgatggtgcgtctgacgcggcggatgcgcgacgtcggactgaagagccgcatgctgctgcaggttcacgacgagctcgtgtttgaagtgccgccggacgagctcgacgcgatgcgggagcttgtgacggacgtcatggagtcggcggtcccgctcgacgtgccgctgaaggtcgacgtcagctggggcgccgactggtacgcggcgaagtgagggaagcgggatcc

SEQ ID NO: 1188 - DNA, 2792 bp, Artificial Sequence
  Description of Artificial Sequence: Synthetic Caldibacillus cellulovorans CompA.2 DNA Polymerase N829A
atgaaatacctgctgccgaccgctgctgctggtctgctgctcctcgctgcccagccggcgatggccatgggcaaactgattctggtcgacggaaacagcgtcgccaaccgggcgttttacgccgtccggctgctcagcacgcgcggcggcctgcacacaaacgcggtgtacggattcgccaacatgttgctcaagctgatcgaggaggaacggccgacgcattttctcgtcgcgttcgacgcgggcaaggcgacgttccgtcatcgcgaatacgaggcctacaaggcgggtcgcctgcagacgccgcccgagctgtccgagcagtttccgtacatccgggagctcgtccgggcgttcggcgtcgcgtccggcgagctggaggaatacgaggcggacgacatgatcggtacgctggcgaaacgggcggaggccgagggcgtcgacacgctggtcgtcaccggcgaccgcgatttgctccagctcgtatcggaccgcgtgaccgtcgcgctgacgcgcaagggcatcacggaaacggagcggtacgacccggcgcgcatccgcgaggaatacggcttcgatcccgaccgcatccgcgacctcaaagggctgatgggcgacgcgtctgacaatcttcccggcgttcccggcgtcggtgagaaaaccgcactgaaactgctcaggcagtacggttcgctggagagcgtcctggaacacgcgtcggaaatcgccggaaagctcggtgaaaatctgcgggcgcacgccgacgccgcccgattgagcaagcggctggcgacgatcgactgcgcggtaccgttgcagtcgggatgggactggctgcgcctcggcgaaccggaccgcgccgcgctcgcctcgctgttgcggcagctcgaattcaagtcgctgttgaaacggctcggactcgacggcacgtccgccgatgccgacgtcgacggcgtccgttcctccgcgcggccggcggacgagaaacggccgagggccgtcgccgtcgctgaggagggcgtcgacgtccgctgtccggatcgcccggaagaagtcgaagaagcgctgtcgcggctggaagccgcccagtcggtcgtcgtcgaggtgacgggcgacaacccgcacgacggcgaagtgcgcggcgtcgcatggtgggacggacatacggcgtatttcattccgtttgaacggctggtgcagtccgacatgcggccgctggccgactggctcgccgacgcgcgtcggccgaagcgtacgcacgactcccatcgcgctgaagtggcgctgttctggcacggccttgcgtttcgcggcacgtcgttctgcacgcatatcgccgcctatttgctcgaccccacggaatcgcgccatacgctggcggacctgtcgcgccgctacggtctgccgccggtaccggaagccgaggacgtttacggcaagggcgcgaagttcaaggttcccgatcgcgacacgctggcgcgttacgtcggccgcaaggccgccctagtcgcgcggctcgttccgctgctcgaggcggatttggcggcctgcggcatgcgttcgcttttttacgacctggagctgccgctttcatccgaactcgccgtcatggagacggtcggcgtccgcgtcgacgcggcggcgctcgccgcctacggcgaggaattgcgcgaggcggcggcgaaagtcgagcgggagatttacgagctggccgggacgacgttcaacatcggatcgacgaaacagctcggcgaaattttgttcgataagctggggctgcccgtcgtcaagaaaacgaaaaccggctattccaccgacgcagacgtgctggaggaactggcgccgtaccatccgatcgtcgaaaagattttgcattaccgccaactgacgaaattgcagtcgacctacatcgaggggcttttgaaagaaatccgtccgcaaaccggtaaaatccatacgtattatcagcagacgatcgcggcgacggggcggctgagcagtcagtttcccaatcttcagaacattccgatccgtctcgaagaggggcggaaaatccgcaaggcgttcgttccgtcagaaccgggatggctgatgctcgccgccgactattcgcagatcgaactgcgcgtgctcgcgcacgtttccggcgacgaacggctgaaggaagcgtttcggacaggcatggacatccacacgaagaccgcgatggacgtgttcggcgtttccgaagaccgcgtcgacgcgcgcatgcggcggcaggcgaaggcggtcaatttcggcatcatctacggcatcagcgatttcggactggcgcaaaacctgaacatttcccgcaaggaggcggcggagttcatccggcaatatttcgccgtcttttcgggcgtcaaggcgtaccgcgagcggatcgtcgagcaggcgcgccgcgacggttacgtgacgaccctgctcggtcgcaggcgctatttgccggacatcaacgcgtcggcttacaacctccgctcgttcgcggagcggacggcgatgaatacgccgatccagggcacggccgccgacatcatcaagaccgcgatggtgcgtctgacgcggcggatgcgcgacgtcggactgaagagccgcatgctgctgcaggttcacgacgagctcgtgtttgaagtgccgccggacgagctcgacgcgatgcgggagcttgtgacggacgtcatggagtcggcggtcccgctcgacgtgccgctgaaggtcgacgtcagctggggcgccgactggtacgcggcgaagtgagggaagcgggatcc

SEQ ID NO: 1189 - DNA, 2792 bp, Artificial Sequence
  Description of Artificial Sequence: Synthetic Caldibacillus cellulovorans CompA.2 DNA Polymerase N829R
atgaaatacctgctgccgaccgctgctgctggtctgctgctcctcgctgcccagccggcgatggccatgggcaaactgattctggtcgacggaaacagcgtcgccaaccgggcgttttacgccgtccggctgctcagcacgcgcggcggcctgcacacaaacgcggtgtacggattcgccaacatgttgctcaagctgatcgaggaggaacggccgacgcattttctcgtcgcgttcgacgcgggcaaggcgacgttccgtcatcgcgaatacgaggcctacaaggcgggtcgcctgcagacgccgcccgagctgtccgagcagtttccgtacatccgggagctcgtccgggcgttcggcgtcgcgtccggcgagctggaggaatacgaggcggacgacatgatcggtacgctggcgaaacgggcggaggccgagggcgtcgacacgctggtcgtcaccggcgaccgcgatttgctccagctcgtatcggaccgcgtgaccgtcgcgctgacgcgcaagggcatcacggaaacggagcggtacgacccggcgcgcatccgcgaggaatacggcttcgatcccgaccgcatccgcgacctcaaagggctgatgggcgacgcgtctgacaatcttcccggcgttcccggcgtcggtgagaaaaccgcactgaaactgctcaggcagtacggttcgctggagagcgtcctggaacacgcgtcggaaatcgccggaaagctcggtgaaaatctgcgggcgcacgccgacgccgcccgattgagcaagcggctggcgacgatcgactgcgcggtaccgttgcagtcgggatgggactggctgcgcctcggcgaaccggaccgcgccgcgctcgcctcgctgttgcggcagctcgaattcaagtcgctgttgaaacggctcggactcgacggcacgtccgccgatgccgacgtcgacggcgtccgttcctccgcgcggccggcggacgagaaacggccgagggccgtcgccgtcgctgaggagggcgtcgacgtccgctgtccggatcgcccggaagaagtcgaagaagcgctgtcgcggctggaagccgcccagtcggtcgtcgtcgaggtgacgggcgacaacccgcacgacggcgaagtgcgcggcgtcgcatggtgggacggacatacggcgtatttcattccgtttgaacggctggtgcagtccgacatgcggccgctggccgactggctcgccgacgcgcgtcggccgaagcgtacgcacgactcccatcgcgctgaagtggcgctgttctggcacggccttgcgtttcgcggcacgtcgttctgcacgcatatcgccgcctatttgctcgaccccacggaatcgcgccatacgctggcggacctgtcgcgccgctacggtctgccgccggtaccggaagccgaggacgtttacggcaagggcgcgaagttcaaggttcccgatcgcgacacgctggcgcgttacgtcggccgcaaggccgccctagtcgcgcggctcgttccgctgctcgaggcggatttggcggcctgcggcatgcgttcgcttttttacgacctggagctgccgctttcatccgaactcgccgtcatggagacggtcggcgtccgcgtcgacgcggcggcgctcgccgcctacggcgaggaattgcgcgaggcggcggcgaaagtcgagcgggagatttacgagctggccgggacgacgttcaacatcggatcgacgaaacagctcggcgaaattttgttcgataagctggggctgcccgtcgtcaagaaaacgaaaaccggctattccaccgacgcagacgtgctggaggaactggcgccgtaccatccgatcgtcgaaaagattttgcattaccgccaactgacgaaattgcagtcgacctacatcgaggggcttttgaaagaaatccgtccgcaaaccggtaaaatccatacgtattatcagcagacgatcgcggcgacggggcggctgagcagtcagtttcccaatcttcagaacattccgatccgtctcgaagaggggcggaaaatccgcaaggcgttcgttccgtcagaaccgggatggctgatgctcgccgccgactattcgcagatcgaactgcgcgtgctcgcgcacgtttccggcgacgaacggctgaaggaagcgtttcggacaggcatggacatccacacgaagaccgcgatggacgtgttcggcgtttccgaagaccgcgtcgacgcgcgcatgcggcggcaggcgaaggcggtcaatttcggcatcatctacggcatcagcgatttcggactggcgcaaaacctgaacatttcccgcaaggaggcggcggagttcatccggcaatatttcgccgtcttttcgggcgtcaaggcgtaccgcgagcggatcgtcgagcaggcgcgccgcgacggttacgtgacgaccctgctcggtcgcaggcgctatttgccggacatcaacgcgtcgcgttacaacctccgctcgttcgcggagcggacggcgatgaatacgccgatccagggcacggccgccgacatcatcaagaccgcgatggtgcgtctgacgcggcggatgcgcgacgtcggactgaagagccgcatgctgctgcaggttcacgacgagctcgtgtttgaagtgccgccggacgagctcgacgcgatgcgggagcttgtgacggacgtcatggagtcggcggtcccgctcgacgtgccgctgaaggtcgacgtcagctggggcgccgactggtacgcggcgaagtgagggaagcgggatcc

SEQ ID NO: 1190 - DNA, 2792 bp, Artificial Sequence
  Description of Artificial Sequence: Synthetic Caldibacillus cellulovorans CompA.2 DNA Polymerase N829D
atgaaatacctgctgccgaccgctgctgctggtctgctgctcctcgctgcccagccggcgatggccatgggcaaactgattctggtcgacggaaacagcgtcgccaaccgggcgttttacgccgtccggctgctcagcacgcgcggcggcctgcacacaaacgcggtgtacggattcgccaacatgttgctcaagctgatcgaggaggaacggccgacgcattttctcgtcgcgttcgacgcgggcaaggcgacgttccgtcatcgcgaatacgaggcctacaaggcgggtcgcctgcagacgccgcccgagctgtccgagcagtttccgtacatccgggagctcgtccgggcgttcggcgtcgcgtccggcgagctggaggaatacgaggcggacgacatgatcggtacgctggcgaaacgggcggaggccgagggcgtcgacacgctggtcgtcaccggcgaccgcgatttgctccagctcgtatcggaccgcgtgaccgtcgcgctgacgcgcaagggcatcacggaaacggagcggtacgacccggcgcgcatccgcgaggaatacggcttcgatcccgaccgcatccgcgacctcaaagggctgatgggcgacgcgtctgacaatcttcccggcgttcccggcgtcggtgagaaaaccgcactgaaactgctcaggcagtacggttcgctggagagcgtcctggaacacgcgtcggaaatcgccggaaagctcggtgaaaatctgcgggcgcacgccgacgccgcccgattgagcaagcggctggcgacgatcgactgcgcggtaccgttgcagtcgggatgggactggctgcgcctcggcgaaccggaccgcgccgcgctcgcctcgctgttgcggcagctcgaattcaagtcgctgttgaaacggctcggactcgacggcacgtccgccgatgccgacgtcgacggcgtccgttcctccgcgcggccggcggacgagaaacggccgagggccgtcgccgtcgctgaggagggcgtcgacgtccgctgtccggatcgcccggaagaagtcgaagaagcgctgtcgcggctggaagccgcccagtcggtcgtcgtcgaggtgacgggcgacaacccgcacgacggcgaagtgcgcggcgtcgcatggtgggacggacatacggcgtatttcattccgtttgaacggctggtgcagtccgacatgcggccgctggccgactggctcgccgacgcgcgtcggccgaagcgtacgcacgactcccatcgcgctgaagtggcgctgttctggcacggccttgcgtttcgcggcacgtcgttctgcacgcatatcgccgcctatttgctcgaccccacggaatcgcgccatacgctggcggacctgtcgcgccgctacggtctgccgccggtaccggaagccgaggacgtttacggcaagggcgcgaagttcaaggttcccgatcgcgacacgctggcgcgttacgtcggccgcaaggccgccctagtcgcgcggctcgttccgctgctcgaggcggatttggcggcctgcggcatgcgttcgcttttttacgacctggagctgccgctttcatccgaactcgccgtcatggagacggtcggcgtccgcgtcgacgcggcggcgctcgccgcctacggcgaggaattgcgcgaggcggcggcgaaagtcgagcgggagatttacgagctggccgggacgacgttcaacatcggatcgacgaaacagctcggcgaaattttgttcgataagctggggctgcccgtcgtcaagaaaacgaaaaccggctattccaccgacgcagacgtgctggaggaactggcgccgtaccatccgatcgtcgaaaagattttgcattaccgccaactgacgaaattgcagtcgacctacatcgaggggcttttgaaagaaatccgtccgcaaaccggtaaaatccatacgtattatcagcagacgatcgcggcgacggggcggctgagcagtcagtttcccaatcttcagaacattccgatccgtctcgaagaggggcggaaaatccgcaaggcgttcgttccgtcagaaccgggatggctgatgctcgccgccgactattcgcagatcgaactgcgcgtgctcgcgcacgtttccggcgacgaacggctgaaggaagcgtttcggacaggcatggacatccacacgaagaccgcgatggacgtgttcggcgtttccgaagaccgcgtcgacgcgcgcatgcggcggcaggcgaaggcggtcaatttcggcatcatctacggcatcagcgatttcggactggcgcaaaacctgaacatttcccgcaaggaggcggcggagttcatccggcaatatttcgccgtcttttcgggcgtcaaggcgtaccgcgagcggatcgtcgagcaggcgcgccgcgacggttacgtgacgaccctgctcggtcgcaggcgctatttgccggacatcaacgcgtcggattacaacctccgctcgttcgcggagcggacggcgatgaatacgccgatccagggcacggccgccgacatcatcaagaccgcgatggtgcgtctgacgcggcggatgcgcgacgtcggactgaagagccgcatgctgctgcaggttcacgacgagctcgtgtttgaagtgccgccggacgagctcgacgcgatgcgggagcttgtgacggacgtcatggagtcggcggtcccgctcgacgtgccgctgaaggtcgacgtcagctggggcgccgactggtacgcggcgaagtgagggaagcgggatcc

SEQ ID NO: 1191 - DNA, 2792 bp, Artificial Sequence
  Description of Artificial Sequence: Synthetic Caldibacillus cellulovorans CompA.2 DNA Polymerase N829C
atgaaatacctgctgccgaccgctgctgctggtctgctgctcctcgctgcccagccggcgatggccatgggcaaactgattctggtcgacggaaacagcgtcgccaaccgggcgttttacgccgtccggctgctcagcacgcgcggcggcctgcacacaaacgcggtgtacggattcgccaacatgttgctcaagctgatcgaggaggaacggccgacgcattttctcgtcgcgttcgacgcgggcaaggcgacgttccgtcatcgcgaatacgaggcctacaaggcgggtcgcctgcagacgccgcccgagctgtccgagcagtttccgtacatccgggagctcgtccgggcgttcggcgtcgcgtccggcgagctggaggaatacgaggcggacgacatgatcggtacgctggcgaaacgggcggaggccgagggcgtcgacacgctggtcgtcaccggcgaccgcgatttgctccagctcgtatcggaccgcgtgaccgtcgcgctgacgcgcaagggcatcacggaaacggagcggtacgacccggcgcgcatccgcgaggaatacggcttcgatcccgaccgcatccgcgacctcaaagggctgatgggcgacgcgtctgacaatcttcccggcgttcccggcgtcggtgagaaaaccgcactgaaactgctcaggcagtacggttcgctggagagcgtcctggaacacgcgtcggaaatcgccggaaagctcggtgaaaatctgcgggcgcacgccgacgccgcccgattgagcaagcggctggcgacgatcgactgcgcggtaccgttgcagtcgggatgggactggctgcgcctcggcgaaccggaccgcgccgcgctcgcctcgctgttgcggcagctcgaattcaagtcgctgttgaaacggctcggactcgacggcacgtccgccgatgccgacgtcgacggcgtccgttcctccgcgcggccggcggacgagaaacggccgagggccgtcgccgtcgctgaggagggcgtcgacgtccgctgtccggatcgcccggaagaagtcgaagaagcgctgtcgcggctggaagccgcccagtcggtcgtcgtcgaggtgacgggcgacaacccgcacgacggcgaagtgcgcggcgtcgcatggtgggacggacatacggcgtatttcattccgtttgaacggctggtgcagtccgacatgcggccgctggccgactggctcgccgacgcgcgtcggccgaagcgtacgcacgactcccatcgcgctgaagtggcgctgttctggcacggccttgcgtttcgcggcacgtcgttctgcacgcatatcgccgcctatttgctcgaccccacggaatcgcgccatacgctggcggacctgtcgcgccgctacggtctgccgccggtaccggaagccgaggacgtttacggcaagggcgcgaagttcaaggttcccgatcgcgacacgctggcgcgttacgtcggccgcaaggccgccctagtcgcgcggctcgttccgctgctcgaggcggatttggcggcctgcggcatgcgttcgcttttttacgacctggagctgccgctttcatccgaactcgccgtcatggagacggtcggcgtccgcgtcgacgcggcggcgctcgccgcctacggcgaggaattgcgcgaggcggcggcgaaagtcgagcgggagatttacgagctggccgggacgacgttcaacatcggatcgacgaaacagctcggcgaaattttgttcgataagctggggctgcccgtcgtcaagaaaacgaaaaccggctattccaccgacgcagacgtgctggaggaactggcgccgtaccatccgatcgtcgaaaagattttgcattaccgccaactgacgaaattgcagtcgacctacatcgaggggcttttgaaagaaatccgtccgcaaaccggtaaaatccatacgtattatcagcagacgatcgcggcgacggggcggctgagcagtcagtttcccaatcttcagaacattccgatccgtctcgaagaggggcggaaaatccgcaaggcgttcgttccgtcagaaccgggatggctgatgctcgccgccgactattcgcagatcgaactgcgcgtgctcgcgcacgtttccggcgacgaacggctgaaggaagcgtttcggacaggcatggacatccacacgaagaccgcgatggacgtgttcggcgtttccgaagaccgcgtcgacgcgcgcatgcggcggcaggcgaaggcggtcaatttcggcatcatctacggcatcagcgatttcggactggcgcaaaacctgaacatttcccgcaaggaggcggcggagttcatccggcaatatttcgccgtcttttcgggcgtcaaggcgtaccgcgagcggatcgtcgagcaggcgcgccgcgacggttacgtgacgaccctgctcggtcgcaggcgctatttgccggacatcaacgcgtcgtgttacaacctccgctcgttcgcggagcggacggcgatgaatacgccgatccagggcacggccgccgacatcatcaagaccgcgatggtgcgtctgacgcggcggatgcgcgacgtcggactgaagagccgcatgctgctgcaggttcacgacgagctcgtgtttgaagtgccgccggacgagctcgacgcgatgcgggagcttgtgacggacgtcatggagtcggcggtcccgctcgacgtgccgctgaaggtcgacgtcagctggggcgccgactggtacgcggcgaagtgagggaagcgggatcc

SEQ ID NO: 1192 - DNA, 2792 bp, Artificial Sequence
  Description of Artificial Sequence: Synthetic Caldibacillus cellulovorans CompA.2 DNA Polymerase N829E
atgaaatacctgctgccgaccgctgctgctggtctgctgctcctcgctgcccagccggcgatggccatgggcaaactgattctggtcgacggaaacagcgtcgccaaccgggcgttttacgccgtccggctgctcagcacgcgcggcggcctgcacacaaacgcggtgtacggattcgccaacatgttgctcaagctgatcgaggaggaacggccgacgcattttctcgtcgcgttcgacgcgggcaaggcgacgttccgtcatcgcgaatacgaggcctacaaggcgggtcgcctgcagacgccgcccgagctgtccgagcagtttccgtacatccgggagctcgtccgggcgttcggcgtcgcgtccggcgagctggaggaatacgaggcggacgacatgatcggtacgctggcgaaacgggcggaggccgagggcgtcgacacgctggtcgtcaccggcgaccgcgatttgctccagctcgtatcggaccgcgtgaccgtcgcgctgacgcgcaagggcatcacggaaacggagcggtacgacccggcgcgcatccgcgaggaatacggcttcgatcccgaccgcatccgcgacctcaaagggctgatgggcgacgcgtctgacaatcttcccggcgttcccggcgtcggtgagaaaaccgcactgaaactgctcaggcagtacggttcgctggagagcgtcctggaacacgcgtcggaaatcgccggaaagctcggtgaaaatctgcgggcgcacgccgacgccgcccgattgagcaagcggctggcgacgatcgactgcgcggtaccgttgcagtcgggatgggactggctgcgcctcggcgaaccggaccgcgccgcgctcgcctcgctgttgcggcagctcgaattcaagtcgctgttgaaacggctcggactcgacggcacgtccgccgatgccgacgtcgacggcgtccgttcctccgcgcggccggcggacgagaaacggccgagggccgtcgccgtcgctgaggagggcgtcgacgtccgctgtccggatcgcccggaagaagtcgaagaagcgctgtcgcggctggaagccgcccagtcggtcgtcgtcgaggtgacgggcgacaacccgcacgacggcgaagtgcgcggcgtcgcatggtgggacggacatacggcgtatttcattccgtttgaacggctggtgcagtccgacatgcggccgctggccgactggctcgccgacgcgcgtcggccgaagcgtacgcacgactcccatcgcgctgaagtggcgctgttctggcacggccttgcgtttcgcggcacgtcgttctgcacgcatatcgccgcctatttgctcgaccccacggaatcgcgccatacgctggcggacctgtcgcgccgctacggtctgccgccggtaccggaagccgaggacgtttacggcaagggcgcgaagttcaaggttcccgatcgcgacacgctggcgcgttacgtcggccgcaaggccgccctagtcgcgcggctcgttccgctgctcgaggcggatttggcggcctgcggcatgcgttcgcttttttacgacctggagctgccgctttcatccgaactcgccgtcatggagacggtcggcgtccgcgtcgacgcggcggcgctcgccgcctacggcgaggaattgcgcgaggcggcggcgaaagtcgagcgggagatttacgagctggccgggacgacgttcaacatcggatcgacgaaacagctcggcgaaattttgttcgataagctggggctgcccgtcgtcaagaaaacgaaaaccggctattccaccgacgcagacgtgctggaggaactggcgccgtaccatccgatcgtcgaaaagattttgcattaccgccaactgacgaaattgcagtcgacctacatcgaggggcttttgaaagaaatccgtccgcaaaccggtaaaatccatacgtattatcagcagacgatcgcggcgacggggcggctgagcagtcagtttcccaatcttcagaacattccgatccgtctcgaagaggggcggaaaatccgcaaggcgttcgttccgtcagaaccgggatggctgatgctcgccgccgactattcgcagatcgaactgcgcgtgctcgcgcacgtttccggcgacgaacggctgaaggaagcgtttcggacaggcatggacatccacacgaagaccgcgatggacgtgttcggcgtttccgaagaccgcgtcgacgcgcgcatgcggcggcaggcgaaggcggtcaatttcggcatcatctacggcatcagcgatttcggactggcgcaaaacctgaacatttcccgcaaggaggcggcggagttcatccggcaatatttcgccgtcttttcgggcgtcaaggcgtaccgcgagcggatcgtcgagcaggcgcgccgcgacggttacgtgacgaccctgctcggtcgcaggcgctatttgccggacatcaacgcgtcggaatacaacctccgctcgttcgcggagcggacggcgatgaatacgccgatccagggcacggccgccgacatcatcaagaccgcgatggtgcgtctgacgcggcggatgcgcgacgtcggactgaagagccgcatgctgctgcaggttcacgacgagctcgtgtttgaagtgccgccggacgagctcgacgcgatgcgggagcttgtgacggacgtcatggagtcggcggtcccgctcgacgtgccgctgaaggtcgacgtcagctggggcgccgactggtacgcggcgaagtgagggaagcgggatcc

SEQ ID NO: 1193 - DNA, 2792 bp, Artificial Sequence
  Description of Artificial Sequence: Synthetic Caldibacillus cellulovorans CompA.2 DNA Polymerase N829Q
atgaaatacctgctgccgaccgctgctgctggtctgctgctcctcgctgcccagccggcgatggccatgggcaaactgattctggtcgacggaaacagcgtcgccaaccgggcgttttacgccgtccggctgctcagcacgcgcggcggcctgcacacaaacgcggtgtacggattcgccaacatgttgctcaagctgatcgaggaggaacggccgacgcattttctcgtcgcgttcgacgcgggcaaggcgacgttccgtcatcgcgaatacgaggcctacaaggcgggtcgcctgcagacgccgcccgagctgtccgagcagtttccgtacatccgggagctcgtccgggcgttcggcgtcgcgtccggcgagctggaggaatacgaggcggacgacatgatcggtacgctggcgaaacgggcggaggccgagggcgtcgacacgctggtcgtcaccggcgaccgcgatttgctccagctcgtatcggaccgcgtgaccgtcgcgctgacgcgcaagggcatcacggaaacggagcggtacgacccggcgcgcatccgcgaggaatacggcttcgatcccgaccgcatccgcgacctcaaagggctgatgggcgacgcgtctgacaatcttcccggcgttcccggcgtcggtgagaaaaccgcactgaaactgctcaggcagtacggttcgctggagagcgtcctggaacacgcgtcggaaatcgccggaaagctcggtgaaaatctgcgggcgcacgccgacgccgcccgattgagcaagcggctggcgacgatcgactgcgcggtaccgttgcagtcgggatgggactggctgcgcctcggcgaaccggaccgcgccgcgctcgcctcgctgttgcggcagctcgaattcaagtcgctgttgaaacggctcggactcgacggcacgtccgccgatgccgacgtcgacggcgtccgttcctccgcgcggccggcggacgagaaacggccgagggccgtcgccgtcgctgaggagggcgtcgacgtccgctgtccggatcgcccggaagaagtcgaagaagcgctgtcgcggctggaagccgcccagtcggtcgtcgtcgaggtgacgggcgacaacccgcacgacggcgaagtgcgcggcgtcgcatggtgggacggacatacggcgtatttcattccgtttgaacggctggtgcagtccgacatgcggccgctggccgactggctcgccgacgcgcgtcggccgaagcgtacgcacgactcccatcgcgctgaagtggcgctgttctggcacggccttgcgtttcgcggcacgtcgttctgcacgcatatcgccgcctatttgctcgaccccacggaatcgcgccatacgctggcggacctgtcgcgccgctacggtctgccgccggtaccggaagccgaggacgtttacggcaagggcgcgaagttcaaggttcccgatcgcgacacgctggcgcgttacgtcggccgcaaggccgccctagtcgcgcggctcgttccgctgctcgaggcggatttggcggcctgcggcatgcgttcgcttttttacgacctggagctgccgctttcatccgaactcgccgtcatggagacggtcggcgtccgcgtcgacgcggcggcgctcgccgcctacggcgaggaattgcgcgaggcggcggcgaaagtcgagcgggagatttacgagctggccgggacgacgttcaacatcggatcgacgaaacagctcggcgaaattttgttcgataagctggggctgcccgtcgtcaagaaaacgaaaaccggctattccaccgacgcagacgtgctggaggaactggcgccgtaccatccgatcgtcgaaaagattttgcattaccgccaactgacgaaattgcagtcgacctacatcgaggggcttttgaaagaaatccgtccgcaaaccggtaaaatccatacgtattatcagcagacgatcgcggcgacggggcggctgagcagtcagtttcccaatcttcagaacattccgatccgtctcgaagaggggcggaaaatccgcaaggcgttcgttccgtcagaaccgggatggctgatgctcgccgccgactattcgcagatcgaactgcgcgtgctcgcgcacgtttccggcgacgaacggctgaaggaagcgtttcggacaggcatggacatccacacgaagaccgcgatggacgtgttcggcgtttccgaagaccgcgtcgacgcgcgcatgcggcggcaggcgaaggcggtcaatttcggcatcatctacggcatcagcgatttcggactggcgcaaaacctgaacatttcccgcaaggaggcggcggagttcatccggcaatatttcgccgtcttttcgggcgtcaaggcgtaccgcgagcggatcgtcgagcaggcgcgccgcgacggttacgtgacgaccctgctcggtcgcaggcgctatttgccggacatcaacgcgtcgcaatacaacctccgctcgttcgcggagcggacggcgatgaatacgccgatccagggcacggccgccgacatcatcaagaccgcgatggtgcgtctgacgcggcggatgcgcgacgtcggactgaagagccgcatgctgctgcaggttcacgacgagctcgtgtttgaagtgccgccggacgagctcgacgcgatgcgggagcttgtgacggacgtcatggagtcggcggtcccgctcgacgtgccgctgaaggtcgacgtcagctggggcgccgactggtacgcggcgaagtgagggaagcgggatcc

SEQ ID NO: 1194 - DNA, 2792 bp, Artificial Sequence
  Description of Artificial Sequence: Synthetic Caldibacillus cellulovorans CompA.2 DNA Polymerase N829G
atgaaatacctgctgccgaccgctgctgctggtctgctgctcctcgctgcccagccggcgatggccatgggcaaactgattctggtcgacggaaacagcgtcgccaaccgggcgttttacgccgtccggctgctcagcacgcgcggcggcctgcacacaaacgcggtgtacggattcgccaacatgttgctcaagctgatcgaggaggaacggccgacgcattttctcgtcgcgttcgacgcgggcaaggcgacgttccgtcatcgcgaatacgaggcctacaaggcgggtcgcctgcagacgccgcccgagctgtccgagcagtttccgtacatccgggagctcgtccgggcgttcggcgtcgcgtccggcgagctggaggaatacgaggcggacgacatgatcggtacgctggcgaaacgggcggaggccgagggcgtcgacacgctggtcgtcaccggcgaccgcgatttgctccagctcgtatcggaccgcgtgaccgtcgcgctgacgcgcaagggcatcacggaaacggagcggtacgacccggcgcgcatccgcgaggaatacggcttcgatcccgaccgcatccgcgacctcaaagggctgatgggcgacgcgtctgacaatcttcccggcgttcccggcgtcggtgagaaaaccgcactgaaactgctcaggcagtacggttcgctggagagcgtcctggaacacgcgtcggaaatcgccggaaagctcggtgaaaatctgcgggcgcacgccgacgccgcccgattgagcaagcggctggcgacgatcgactgcgcggtaccgttgcagtcgggatgggactggctgcgcctcggcgaaccggaccgcgccgcgctcgcctcgctgttgcggcagctcgaattcaagtcgctgttgaaacggctcggactcgacggcacgtccgccgatgccgacgtcgacggcgtccgttcctccgcgcggccggcggacgagaaacggccgagggccgtcgccgtcgctgaggagggcgtcgacgtccgctgtccggatcgcccggaagaagtcgaagaagcgctgtcgcggctggaagccgcccagtcggtcgtcgtcgaggtgacgggcgacaacccgcacgacggcgaagtgcgcggcgtcgcatggtgggacggacatacggcgtatttcattccgtttgaacggctggtgcagtccgacatgcggccgctggccgactggctcgccgacgcgcgtcggccgaagcgtacgcacgactcccatcgcgctgaagtggcgctgttctggcacggccttgcgtttcgcggcacgtcgttctgcacgcatatcgccgcctatttgctcgaccccacggaatcgcgccatacgctggcggacctgtcgcgccgctacggtctgccgccggtaccggaagccgaggacgtttacggcaagggcgcgaagttcaaggttcccgatcgcgacacgctggcgcgttacgtcggccgcaaggccgccctagtcgcgcggctcgttccgctgctcgaggcggatttggcggcctgcggcatgcgttcgcttttttacgacctggagctgccgctttcatccgaactcgccgtcatggagacggtcggcgtccgcgtcgacgcggcggcgctcgccgcctacggcgaggaattgcgcgaggcggcggcgaaagtcgagcgggagatttacgagctggccgggacgacgttcaacatcggatcgacgaaacagctcggcgaaattttgttcgataagctggggctgcccgtcgtcaagaaaacgaaaaccggctattccaccgacgcagacgtgctggaggaactggcgccgtaccatccgatcgtcgaaaagattttgcattaccgccaactgacgaaattgcagtcgacctacatcgaggggcttttgaaagaaatccgtccgcaaaccggtaaaatccatacgtattatcagcagacgatcgcggcgacggggcggctgagcagtcagtttcccaatcttcagaacattccgatccgtctcgaagaggggcggaaaatccgcaaggcgttcgttccgtcagaaccgggatggctgatgctcgccgccgactattcgcagatcgaactgcgcgtgctcgcgcacgtttccggcgacgaacggctgaaggaagcgtttcggacaggcatggacatccacacgaagaccgcgatggacgtgttcggcgtttccgaagaccgcgtcgacgcgcgcatgcggcggcaggcgaaggcggtcaatttcggcatcatctacggcatcagcgatttcggactggcgcaaaacctgaacatttcccgcaaggaggcggcggagttcatccggcaatatttcgccgtcttttcgggcgtcaaggcgtaccgcgagcggatcgtcgagcaggcgcgccgcgacggttacgtgacgaccctgctcggtcgcaggcgctatttgccggacatcaacgcgtcgggttacaacctccgctcgttcgcggagcggacggcgatgaatacgccgatccagggcacggccgccgacatcatcaagaccgcgatggtgcgtctgacgcggcggatgcgcgacgtcggactgaagagccgcatgctgctgcaggttcacgacgagctcgtgtttgaagtgccgccggacgagctcgacgcgatgcgggagcttgtgacggacgtcatggagtcggcggtcccgctcgacgtgccgctgaaggtcgacgtcagctggggcgccgactggtacgcggcgaagtgagggaagcgggatcc

SEQ ID NO: 1195 - DNA, 2792 bp, Artificial Sequence
  Description of Artificial Sequence: Synthetic Caldibacillus cellulovorans CompA.2 DNA Polymerase N829H
atgaaatacctgctgccgaccgctgctgctggtctgctgctcctcgctgcccagccggcgatggccatgggcaaactgattctggtcgacggaaacagcgtcgccaaccgggcgttttacgccgtccggctgctcagcacgcgcggcggcctgcacacaaacgcggtgtacggattcgccaacatgttgctcaagctgatcgaggaggaacggccgacgcattttctcgtcgcgttcgacgcgggcaaggcgacgttccgtcatcgcgaatacgaggcctacaaggcgggtcgcctgcagacgccgcccgagctgtccgagcagtttccgtacatccgggagctcgtccgggcgttcggcgtcgcgtccggcgagctggaggaatacgaggcggacgacatgatcggtacgctggcgaaacgggcggaggccgagggcgtcgacacgctggtcgtcaccggcgaccgcgatttgctccagctcgtatcggaccgcgtgaccgtcgcgctgacgcgcaagggcatcacggaaacggagcggtacgacccggcgcgcatccgcgaggaatacggcttcgatcccgaccgcatccgcgacctcaaagggctgatgggcgacgcgtctgacaatcttcccggcgttcccggcgtcggtgagaaaaccgcactgaaactgctcaggcagtacggttcgctggagagcgtcctggaacacgcgtcggaaatcgccggaaagctcggtgaaaatctgcgggcgcacgccgacgccgcccgattgagcaagcggctggcgacgatcgactgcgcggtaccgttgcagtcgggatgggactggctgcgcctcggcgaaccggaccgcgccgcgctcgcctcgctgttgcggcagctcgaattcaagtcgctgttgaaacggctcggactcgacggcacgtccgccgatgccgacgtcgacggcgtccgttcctccgcgcggccggcggacgagaaacggccgagggccgtcgccgtcgctgaggagggcgtcgacgtccgctgtccggatcgcccggaagaagtcgaagaagcgctgtcgcggctggaagccgcccagtcggtcgtcgtcgaggtgacgggcgacaacccgcacgacggcgaagtgcgcggcgtcgcatggtgggacggacatacggcgtatttcattccgtttgaacggctggtgcagtccgacatgcggccgctggccgactggctcgccgacgcgcgtcggccgaagcgtacgcacgactcccatcgcgctgaagtggcgctgttctggcacggccttgcgtttcgcggcacgtcgttctgcacgcatatcgccgcctatttgctcgaccccacggaatcgcgccatacgctggcggacctgtcgcgccgctacggtctgccgccggtaccggaagccgaggacgtttacggcaagggcgcgaagttcaaggttcccgatcgcgacacgctggcgcgttacgtcggccgcaaggccgccctagtcgcgcggctcgttccgctgctcgaggcggatttggcggcctgcggcatgcgttcgcttttttacgacctggagctgccgctttcatccgaactcgccgtcatggagacggtcggcgtccgcgtcgacgcggcggcgctcgccgcctacggcgaggaattgcgcgaggcggcggcgaaagtcgagcgggagatttacgagctggccgggacgacgttcaacatcggatcgacgaaacagctcggcgaaattttgttcgataagctggggctgcccgtcgtcaagaaaacgaaaaccggctattccaccgacgcagacgtgctggaggaactggcgccgtaccatccgatcgtcgaaaagattttgcattaccgccaactgacgaaattgcagtcgacctacatcgaggggcttttgaaagaaatccgtccgcaaaccggtaaaatccatacgtattatcagcagacgatcgcggcgacggggcggctgagcagtcagtttcccaatcttcagaacattccgatccgtctcgaagaggggcggaaaatccgcaaggcgttcgttccgtcagaaccgggatggctgatgctcgccgccgactattcgcagatcgaactgcgcgtgctcgcgcacgtttccggcgacgaacggctgaaggaagcgtttcggacaggcatggacatccacacgaagaccgcgatggacgtgttcggcgtttccgaagaccgcgtcgacgcgcgcatgcggcggcaggcgaaggcggtcaatttcggcatcatctacggcatcagcgatttcggactggcgcaaaacctgaacatttcccgcaaggaggcggcggagttcatccggcaatatttcgccgtcttttcgggcgtcaaggcgtaccgcgagcggatcgtcgagcaggcgcgccgcgacggttacgtgacgaccctgctcggtcgcaggcgctatttgccggacatcaacgcgtcgcattacaacctccgctcgttcgcggagcggacggcgatgaatacgccgatccagggcacggccgccgacatcatcaagaccgcgatggtgcgtctgacgcggcggatgcgcgacgtcggactgaagagccgcatgctgctgcaggttcacgacgagctcgtgtttgaagtgccgccggacgagctcgacgcgatgcgggagcttgtgacggacgtcatggagtcggcggtcccgctcgacgtgccgctgaaggtcgacgtcagctggggcgccgactggtacgcggcgaagtgagggaagcgggatcc

SEQ ID NO: 1196 - DNA, 2792 bp, Artificial Sequence
  Description of Artificial Sequence: Synthetic Caldibacillus cellulovorans CompA.2 DNA Polymerase N829I
atgaaatacctgctgccgaccgctgctgctggtctgctgctcctcgctgcccagccggcgatggccatgggcaaactgattctggtcgacggaaacagcgtcgccaaccgggcgttttacgccgtccggctgctcagcacgcgcggcggcctgcacacaaacgcggtgtacggattcgccaacatgttgctcaagctgatcgaggaggaacggccgacgcattttctcgtcgcgttcgacgcgggcaaggcgacgttccgtcatcgcgaatacgaggcctacaaggcgggtcgcctgcagacgccgcccgagctgtccgagcagtttccgtacatccgggagctcgtccgggcgttcggcgtcgcgtccggcgagctggaggaatacgaggcggacgacatgatcggtacgctggcgaaacgggcggaggccgagggcgtcgacacgctggtcgtcaccggcgaccgcgatttgctccagctcgtatcggaccgcgtgaccgtcgcgctgacgcgcaagggcatcacggaaacggagcggtacgacccggcgcgcatccgcgaggaatacggcttcgatcccgaccgcatccgcgacctcaaagggctgatgggcgacgcgtctgacaatcttcccggcgttcccggcgtcggtgagaaaaccgcactgaaactgctcaggcagtacggttcgctggagagcgtcctggaacacgcgtcggaaatcgccggaaagctcggtgaaaatctgcgggcgcacgccgacgccgcccgattgagcaagcggctggcgacgatcgactgcgcggtaccgttgcagtcgggatgggactggctgcgcctcggcgaaccggaccgcgccgcgctcgcctcgctgttgcggcagctcgaattcaagtcgctgttgaaacggctcggactcgacggcacgtccgccgatgccgacgtcgacggcgtccgttcctccgcgcggccggcggacgagaaacggccgagggccgtcgccgtcgctgaggagggcgtcgacgtccgctgtccggatcgcccggaagaagtcgaagaagcgctgtcgcggctggaagccgcccagtcggtcgtcgtcgaggtgacgggcgacaacccgcacgacggcgaagtgcgcggcgtcgcatggtgggacggacatacggcgtatttcattccgtttgaacggctggtgcagtccgacatgcggccgctggccgactggctcgccgacgcgcgtcggccgaagcgtacgcacgactcccatcgcgctgaagtggcgctgttctggcacggccttgcgtttcgcggcacgtcgttctgcacgcatatcgccgcctatttgctcgaccccacggaatcgcgccatacgctggcggacctgtcgcgccgctacggtctgccgccggtaccggaagccgaggacgtttacggcaagggcgcgaagttcaaggttcccgatcgcgacacgctggcgcgttacgtcggccgcaaggccgccctagtcgcgcggctcgttccgctgctcgaggcggatttggcggcctgcggcatgcgttcgcttttttacgacctggagctgccgctttcatccgaactcgccgtcatggagacggtcggcgtccgcgtcgacgcggcggcgctcgccgcctacggcgaggaattgcgcgaggcggcggcgaaagtcgagcgggagatttacgagctggccgggacgacgttcaacatcggatcgacgaaacagctcggcgaaattttgttcgataagctggggctgcccgtcgtcaagaaaacgaaaaccggctattccaccgacgcagacgtgctggaggaactggcgccgtaccatccgatcgtcgaaaagattttgcattaccgccaactgacgaaattgcagtcgacctacatcgaggggcttttgaaagaaatccgtccgcaaaccggtaaaatccatacgtattatcagcagacgatcgcggcgacggggcggctgagcagtcagtttcccaatcttcagaacattccgatccgtctcgaagaggggcggaaaatccgcaaggcgttcgttccgtcagaaccgggatggctgatgctcgccgccgactattcgcagatcgaactgcgcgtgctcgcgcacgtttccggcgacgaacggctgaaggaagcgtttcggacaggcatggacatccacacgaagaccgcgatggacgtgttcggcgtttccgaagaccgcgtcgacgcgcgcatgcggcggcaggcgaaggcggtcaatttcggcatcatctacggcatcagcgatttcggactggcgcaaaacctgaacatttcccgcaaggaggcggcggagttcatccggcaatatttcgccgtcttttcgggcgtcaaggcgtaccgcgagcggatcgtcgagcaggcgcgccgcgacggttacgtgacgaccctgctcggtcgcaggcgctatttgccggacatcaacgcgtcgatttacaacctccgctcgttcgcggagcggacggcgatgaatacgccgatccagggcacggccgccgacatcatcaagaccgcgatggtgcgtctgacgcggcggatgcgcgacgtcggactgaagagccgcatgctgctgcaggttcacgacgagctcgtgtttgaagtgccgccggacgagctcgacgcgatgcgggagcttgtgacggacgtcatggagtcggcggtcccgctcgacgtgccgctgaaggtcgacgtcagctggggcgccgactggtacgcggcgaagtgagggaagcgggatcc

SEQ ID NO: 1197 - DNA, 2792 bp, Artificial Sequence
  Description of Artificial Sequence: Synthetic Caldibacillus cellulovorans CompA.2 DNA Polymerase N829L
atgaaatacctgctgccgaccgctgctgctggtctgctgctcctcgctgcccagccggcgatggccatgggcaaactgattctggtcgacggaaacagcgtcgccaaccgggcgttttacgccgtccggctgctcagcacgcgcggcggcctgcacacaaacgcggtgtacggattcgccaacatgttgctcaagctgatcgaggaggaacggccgacgcattttctcgtcgcgttcgacgcgggcaaggcgacgttccgtcatcgcgaatacgaggcctacaaggcgggtcgcctgcagacgccgcccgagctgtccgagcagtttccgtacatccgggagctcgtccgggcgttcggcgtcgcgtccggcgagctggaggaatacgaggcggacgacatgatcggtacgctggcgaaacgggcggaggccgagggcgtcgacacgctggtcgtcaccggcgaccgcgatttgctccagctcgtatcggaccgcgtgaccgtcgcgctgacgcgcaagggcatcacggaaacggagcggtacgacccggcgcgcatccgcgaggaatacggcttcgatcccgaccgcatccgcgacctcaaagggctgatgggcgacgcgtctgacaatcttcccggcgttcccggcgtcggtgagaaaaccgcactgaaactgctcaggcagtacggttcgctggagagcgtcctggaacacgcgtcggaaatcgccggaaagctcggtgaaaatctgcgggcgcacgccgacgccgcccgattgagcaagcggctggcgacgatcgactgcgcggtaccgttgcagtcgggatgggactggctgcgcctcggcgaaccggaccgcgccgcgctcgcctcgctgttgcggcagctcgaattcaagtcgctgttgaaacggctcggactcgacggcacgtccgccgatgccgacgtcgacggcgtccgttcctccgcgcggccggcggacgagaaacggccgagggccgtcgccgtcgctgaggagggcgtcgacgtccgctgtccggatcgcccggaagaagtcgaagaagcgctgtcgcggctggaagccgcccagtcggtcgtcgtcgaggtgacgggcgacaacccgcacgacggcgaagtgcgcggcgtcgcatggtgggacggacatacggcgtatttcattccgtttgaacggctggtgcagtccgacatgcggccgctggccgactggctcgccgacgcgcgtcggccgaagcgtacgcacgactcccatcgcgctgaagtggcgctgttctggcacggccttgcgtttcgcggcacgtcgttctgcacgcatatcgccgcctatttgctcgaccccacggaatcgcgccatacgctggcggacctgtcgcgccgctacggtctgccgccggtaccggaagccgaggacgtttacggcaagggcgcgaagttcaaggttcccgatcgcgacacgctggcgcgttacgtcggccgcaaggccgccctagtcgcgcggctcgttccgctgctcgaggcggatttggcggcctgcggcatgcgttcgcttttttacgacctggagctgccgctttcatccgaactcgccgtcatggagacggtcggcgtccgcgtcgacgcggcggcgctcgccgcctacggcgaggaattgcgcgaggcggcggcgaaagtcgagcgggagatttacgagctggccgggacgacgttcaacatcggatcgacgaaacagctcggcgaaattttgttcgataagctggggctgcccgtcgtcaagaaaacgaaaaccggctattccaccgacgcagacgtgctggaggaactggcgccgtaccatccgatcgtcgaaaagattttgcattaccgccaactgacgaaattgcagtcgacctacatcgaggggcttttgaaagaaatccgtccgcaaaccggtaaaatccatacgtattatcagcagacgatcgcggcgacggggcggctgagcagtcagtttcccaatcttcagaacattccgatccgtctcgaagaggggcggaaaatccgcaaggcgttcgttccgtcagaaccgggatggctgatgctcgccgccgactattcgcagatcgaactgcgcgtgctcgcgcacgtttccggcgacgaacggctgaaggaagcgtttcggacaggcatggacatccacacgaagaccgcgatggacgtgttcggcgtttccgaagaccgcgtcgacgcgcgcatgcggcggcaggcgaaggcggtcaatttcggcatcatctacggcatcagcgatttcggactggcgcaaaacctgaacatttcccgcaaggaggcggcggagttcatccggcaatatttcgccgtcttttcgggcgtcaaggcgtaccgcgagcggatcgtcgagcaggcgcgccgcgacggttacgtgacgaccctgctcggtcgcaggcgctatttgccggacatcaacgcgtcgctttacaacctccgctcgttcgcggagcggacggcgatgaatacgccgatccagggcacggccgccgacatcatcaagaccgcgatggtgcgtctgacgcggcggatgcgcgacgtcggactgaagagccgcatgctgctgcaggttcacgacgagctcgtgtttgaagtgccgccggacgagctcgacgcgatgcgggagcttgtgacggacgtcatggagtcggcggtcccgctcgacgtgccgctgaaggtcgacgtcagctggggcgccgactggtacgcggcgaagtgagggaagcgggatcc

SEQ ID NO: 1198 - DNA, 2792 bp, Artificial Sequence
  Description of Artificial Sequence: Synthetic Caldibacillus cellulovorans CompA.2 DNA Polymerase N829K
atgaaatacctgctgccgaccgctgctgctggtctgctgctcctcgctgcccagccggcgatggccatgggcaaactgattctggtcgacggaaacagcgtcgccaaccgggcgttttacgccgtccggctgctcagcacgcgcggcggcctgcacacaaacgcggtgtacggattcgccaacatgttgctcaagctgatcgaggaggaacggccgacgcattttctcgtcgcgttcgacgcgggcaaggcgacgttccgtcatcgcgaatacgaggcctacaaggcgggtcgcctgcagacgccgcccgagctgtccgagcagtttccgtacatccgggagctcgtccgggcgttcggcgtcgcgtccggcgagctggaggaatacgaggcggacgacatgatcggtacgctggcgaaacgggcggaggccgagggcgtcgacacgctggtcgtcaccggcgaccgcgatttgctccagctcgtatcggaccgcgtgaccgtcgcgctgacgcgcaagggcatcacggaaacggagcggtacgacccggcgcgcatccgcgaggaatacggcttcgatcccgaccgcatccgcgacctcaaagggctgatgggcgacgcgtctgacaatcttcccggcgttcccggcgtcggtgagaaaaccgcactgaaactgctcaggcagtacggttcgctggagagcgtcctggaacacgcgtcggaaatcgccggaaagctcggtgaaaatctgcgggcgcacgccgacgccgcccgattgagcaagcggctggcgacgatcgactgcgcggtaccgttgcagtcgggatgggactggctgcgcctcggcgaaccggaccgcgccgcgctcgcctcgctgttgcggcagctcgaattcaagtcgctgttgaaacggctcggactcgacggcacgtccgccgatgccgacgtcgacggcgtccgttcctccgcgcggccggcggacgagaaacggccgagggccgtcgccgtcgctgaggagggcgtcgacgtccgctgtccggatcgcccggaagaagtcgaagaagcgctgtcgcggctggaagccgcccagtcggtcgtcgtcgaggtgacgggcgacaacccgcacgacggcgaagtgcgcggcgtcgcatggtgggacggacatacggcgtatttcattccgtttgaacggctggtgcagtccgacatgcggccgctggccgactggctcgccgacgcgcgtcggccgaagcgtacgcacgactcccatcgcgctgaagtggcgctgttctggcacggccttgcgtttcgcggcacgtcgttctgcacgcatatcgccgcctatttgctcgaccccacggaatcgcgccatacgctggcggacctgtcgcgccgctacggtctgccgccggtaccggaagccgaggacgtttacggcaagggcgcgaagttcaaggttcccgatcgcgacacgctggcgcgttacgtcggccgcaaggccgccctagtcgcgcggctcgttccgctgctcgaggcggatttggcggcctgcggcatgcgttcgcttttttacgacctggagctgccgctttcatccgaactcgccgtcatggagacggtcggcgtccgcgtcgacgcggcggcgctcgccgcctacggcgaggaattgcgcgaggcggcggcgaaagtcgagcgggagatttacgagctggccgggacgacgttcaacatcggatcgacgaaacagctcggcgaaattttgttcgataagctggggctgcccgtcgtcaagaaaacgaaaaccggctattccaccgacgcagacgtgctggaggaactggcgccgtaccatccgatcgtcgaaaagattttgcattaccgccaactgacgaaattgcagtcgacctacatcgaggggcttttgaaagaaatccgtccgcaaaccggtaaaatccatacgtattatcagcagacgatcgcggcgacggggcggctgagcagtcagtttcccaatcttcagaacattccgatccgtctcgaagaggggcggaaaatccgcaaggcgttcgttccgtcagaaccgggatggctgatgctcgccgccgactattcgcagatcgaactgcgcgtgctcgcgcacgtttccggcgacgaacggctgaaggaagcgtttcggacaggcatggacatccacacgaagaccgcgatggacgtgttcggcgtttccgaagaccgcgtcgacgcgcgcatgcggcggcaggcgaaggcggtcaatttcggcatcatctacggcatcagcgatttcggactggcgcaaaacctgaacatttcccgcaaggaggcggcggagttcatccggcaatatttcgccgtcttttcgggcgtcaaggcgtaccgcgagcggatcgtcgagcaggcgcgccgcgacggttacgtgacgaccctgctcggtcgcaggcgctatttgccggacatcaacgcgtcgaaatacaacctccgctcgttcgcggagcggacggcgatgaatacgccgatccagggcacggccgccgacatcatcaagaccgcgatggtgcgtctgacgcggcggatgcgcgacgtcggactgaagagccgcatgctgctgcaggttcacgacgagctcgtgtttgaagtgccgccggacgagctcgacgcgatgcgggagcttgtgacggacgtcatggagtcggcggtcccgctcgacgtgccgctgaaggtcgacgtcagctggggcgccgactggtacgcggcgaagtgagggaagcgggatcc

SEQ ID NO: 1199 - DNA, 2792 bp, Artificial Sequence
  Description of Artificial Sequence: Synthetic Caldibacillus cellulovorans CompA.2 DNA Polymerase N829M
atgaaatacctgctgccgaccgctgctgctggtctgctgctcctcgctgcccagccggcgatggccatgggcaaactgattctggtcgacggaaacagcgtcgccaaccgggcgttttacgccgtccggctgctcagcacgcgcggcggcctgcacacaaacgcggtgtacggattcgccaacatgttgctcaagctgatcgaggaggaacggccgacgcattttctcgtcgcgttcgacgcgggcaaggcgacgttccgtcatcgcgaatacgaggcctacaaggcgggtcgcctgcagacgccgcccgagctgtccgagcagtttccgtacatccgggagctcgtccgggcgttcggcgtcgcgtccggcgagctggaggaatacgaggcggacgacatgatcggtacgctggcgaaacgggcggaggccgagggcgtcgacacgctggtcgtcaccggcgaccgcgatttgctccagctcgtatcggaccgcgtgaccgtcgcgctgacgcgcaagggcatcacggaaacggagcggtacgacccggcgcgcatccgcgaggaatacggcttcgatcccgaccgcatccgcgacctcaaagggctgatgggcgacgcgtctgacaatcttcccggcgttcccggcgtcggtgagaaaaccgcactgaaactgctcaggcagtacggttcgctggagagcgtcctggaacacgcgtcggaaatcgccggaaagctcggtgaaaatctgcgggcgcacgccgacgccgcccgattgagcaagcggctggcgacgatcgactgcgcggtaccgttgcagtcgggatgggactggctgcgcctcggcgaaccggaccgcgccgcgctcgcctcgctgttgcggcagctcgaattcaagtcgctgttgaaacggctcggactcgacggcacgtccgccgatgccgacgtcgacggcgtccgttcctccgcgcggccggcggacgagaaacggccgagggccgtcgccgtcgctgaggagggcgtcgacgtccgctgtccggatcgcccggaagaagtcgaagaagcgctgtcgcggctggaagccgcccagtcggtcgtcgtcgaggtgacgggcgacaacccgcacgacggcgaagtgcgcggcgtcgcatggtgggacggacatacggcgtatttcattccgtttgaacggctggtgcagtccgacatgcggccgctggccgactggctcgccgacgcgcgtcggccgaagcgtacgcacgactcccatcgcgctgaagtggcgctgttctggcacggccttgcgtttcgcggcacgtcgttctgcacgcatatcgccgcctatttgctcgaccccacggaatcgcgccatacgctggcggacctgtcgcgccgctacggtctgccgccggtaccggaagccgaggacgtttacggcaagggcgcgaagttcaaggttcccgatcgcgacacgctggcgcgttacgtcggccgcaaggccgccctagtcgcgcggctcgttccgctgctcgaggcggatttggcggcctgcggcatgcgttcgcttttttacgacctggagctgccgctttcatccgaactcgccgtcatggagacggtcggcgtccgcgtcgacgcggcggcgctcgccgcctacggcgaggaattgcgcgaggcggcggcgaaagtcgagcgggagatttacgagctggccgggacgacgttcaacatcggatcgacgaaacagctcggcgaaattttgttcgataagctggggctgcccgtcgtcaagaaaacgaaaaccggctattccaccgacgcagacgtgctggaggaactggcgccgtaccatccgatcgtcgaaaagattttgcattaccgccaactgacgaaattgcagtcgacctacatcgaggggcttttgaaagaaatccgtccgcaaaccggtaaaatccatacgtattatcagcagacgatcgcggcgacggggcggctgagcagtcagtttcccaatcttcagaacattccgatccgtctcgaagaggggcggaaaatccgcaaggcgttcgttccgtcagaaccgggatggctgatgctcgccgccgactattcgcagatcgaactgcgcgtgctcgcgcacgtttccggcgacgaacggctgaaggaagcgtttcggacaggcatggacatccacacgaagaccgcgatggacgtgttcggcgtttccgaagaccgcgtcgacgcgcgcatgcggcggcaggcgaaggcggtcaatttcggcatcatctacggcatcagcgatttcggactggcgcaaaacctgaacatttcccgcaaggaggcggcggagttcatccggcaatatttcgccgtcttttcgggcgtcaaggcgtaccgcgagcggatcgtcgagcaggcgcgccgcgacggttacgtgacgaccctgctcggtcgcaggcgctatttgccggacatcaacgcgtcgatgtacaacctccgctcgttcgcggagcggacggcgatgaatacgccgatccagggcacggccgccgacatcatcaagaccgcgatggtgcgtctgacgcggcggatgcgcgacgtcggactgaagagccgcatgctgctgcaggttcacgacgagctcgtgtttgaagtgccgccggacgagctcgacgcgatgcgggagcttgtgacggacgtcatggagtcggcggtcccgctcgacgtgccgctgaaggtcgacgtcagctggggcgccgactggtacgcggcgaagtgagggaagcgggatcc

SEQ ID NO: 1200 - DNA, 2792 bp, Artificial Sequence
  Description of Artificial Sequence: Synthetic Caldibacillus cellulovorans CompA.2 DNA Polymerase N829F
atgaaatacctgctgccgaccgctgctgctggtctgctgctcctcgctgcccagccggcgatggccatgggcaaactgattctggtcgacggaaacagcgtcgccaaccgggcgttttacgccgtccggctgctcagcacgcgcggcggcctgcacacaaacgcggtgtacggattcgccaacatgttgctcaagctgatcgaggaggaacggccgacgcattttctcgtcgcgttcgacgcgggcaaggcgacgttccgtcatcgcgaatacgaggcctacaaggcgggtcgcctgcagacgccgcccgagctgtccgagcagtttccgtacatccgggagctcgtccgggcgttcggcgtcgcgtccggcgagctggaggaatacgaggcggacgacatgatcggtacgctggcgaaacgggcggaggccgagggcgtcgacacgctggtcgtcaccggcgaccgcgatttgctccagctcgtatcggaccgcgtgaccgtcgcgctgacgcgcaagggcatcacggaaacggagcggtacgacccggcgcgcatccgcgaggaatacggcttcgatcccgaccgcatccgcgacctcaaagggctgatgggcgacgcgtctgacaatcttcccggcgttcccggcgtcggtgagaaaaccgcactgaaactgctcaggcagtacggttcgctggagagcgtcctggaacacgcgtcggaaatcgccggaaagctcggtgaaaatctgcgggcgcacgccgacgccgcccgattgagcaagcggctggcgacgatcgactgcgcggtaccgttgcagtcgggatgggactggctgcgcctcggcgaaccggaccgcgccgcgctcgcctcgctgttgcggcagctcgaattcaagtcgctgttgaaacggctcggactcgacggcacgtccgccgatgccgacgtcgacggcgtccgttcctccgcgcggccggcggacgagaaacggccgagggccgtcgccgtcgctgaggagggcgtcgacgtccgctgtccggatcgcccggaagaagtcgaagaagcgctgtcgcggctggaagccgcccagtcggtcgtcgtcgaggtgacgggcgacaacccgcacgacggcgaagtgcgcggcgtcgcatggtgggacggacatacggcgtatttcattccgtttgaacggctggtgcagtccgacatgcggccgctggccgactggctcgccgacgcgcgtcggccgaagcgtacgcacgactcccatcgcgctgaagtggcgctgttctggcacggccttgcgtttcgcggcacgtcgttctgcacgcatatcgccgcctatttgctcgaccccacggaatcgcgccatacgctggcggacctgtcgcgccgctacggtctgccgccggtaccggaagccgaggacgtttacggcaagggcgcgaagttcaaggttcccgatcgcgacacgctggcgcgttacgtcggccgcaaggccgccctagtcgcgcggctcgttccgctgctcgaggcggatttggcggcctgcggcatgcgttcgcttttttacgacctggagctgccgctttcatccgaactcgccgtcatggagacggtcggcgtccgcgtcgacgcggcggcgctcgccgcctacggcgaggaattgcgcgaggcggcggcgaaagtcgagcgggagatttacgagctggccgggacgacgttcaacatcggatcgacgaaacagctcggcgaaattttgttcgataagctggggctgcccgtcgtcaagaaaacgaaaaccggctattccaccgacgcagacgtgctggaggaactggcgccgtaccatccgatcgtcgaaaagattttgcattaccgccaactgacgaaattgcagtcgacctacatcgaggggcttttgaaagaaatccgtccgcaaaccggtaaaatccatacgtattatcagcagacgatcgcggcgacggggcggctgagcagtcagtttcccaatcttcagaacattccgatccgtctcgaagaggggcggaaaatccgcaaggcgttcgttccgtcagaaccgggatggctgatgctcgccgccgactattcgcagatcgaactgcgcgtgctcgcgcacgtttccggcgacgaacggctgaaggaagcgtttcggacaggcatggacatccacacgaagaccgcgatggacgtgttcggcgtttccgaagaccgcgtcgacgcgcgcatgcggcggcaggcgaaggcggtcaatttcggcatcatctacggcatcagcgatttcggactggcgcaaaacctgaacatttcccgcaaggaggcggcggagttcatccggcaatatttcgccgtcttttcgggcgtcaaggcgtaccgcgagcggatcgtcgagcaggcgcgccgcgacggttacgtgacgaccctgctcggtcgcaggcgctatttgccggacatcaacgcgtcgttttacaacctccgctcgttcgcggagcggacggcgatgaatacgccgatccagggcacggccgccgacatcatcaagaccgcgatggtgcgtctgacgcggcggatgcgcgacgtcggactgaagagccgcatgctgctgcaggttcacgacgagctcgtgtttgaagtgccgccggacgagctcgacgcgatgcgggagcttgtgacggacgtcatggagtcggcggtcccgctcgacgtgccgctgaaggtcgacgtcagctggggcgccgactggtacgcggcgaagtgagggaagcgggatcc

SEQ ID NO: 1201 - DNA, 2792 bp, Artificial Sequence
  Description of Artificial Sequence: Synthetic Caldibacillus cellulovorans CompA.2 DNA Polymerase N829P
atgaaatacctgctgccgaccgctgctgctggtctgctgctcctcgctgcccagccggcgatggccatgggcaaactgattctggtcgacggaaacagcgtcgccaaccgggcgttttacgccgtccggctgctcagcacgcgcggcggcctgcacacaaacgcggtgtacggattcgccaacatgttgctcaagctgatcgaggaggaacggccgacgcattttctcgtcgcgttcgacgcgggcaaggcgacgttccgtcatcgcgaatacgaggcctacaaggcgggtcgcctgcagacgccgcccgagctgtccgagcagtttccgtacatccgggagctcgtccgggcgttcggcgtcgcgtccggcgagctggaggaatacgaggcggacgacatgatcggtacgctggcgaaacgggcggaggccgagggcgtcgacacgctggtcgtcaccggcgaccgcgatttgctccagctcgtatcggaccgcgtgaccgtcgcgctgacgcgcaagggcatcacggaaacggagcggtacgacccggcgcgcatccgcgaggaatacggcttcgatcccgaccgcatccgcgacctcaaagggctgatgggcgacgcgtctgacaatcttcccggcgttcccggcgtcggtgagaaaaccgcactgaaactgctcaggcagtacggttcgctggagagcgtcctggaacacgcgtcggaaatcgccggaaagctcggtgaaaatctgcgggcgcacgccgacgccgcccgattgagcaagcggctggcgacgatcgactgcgcggtaccgttgcagtcgggatgggactggctgcgcctcggcgaaccggaccgcgccgcgctcgcctcgctgttgcggcagctcgaattcaagtcgctgttgaaacggctcggactcgacggcacgtccgccgatgccgacgtcgacggcgtccgttcctccgcgcggccggcggacgagaaacggccgagggccgtcgccgtcgctgaggagggcgtcgacgtccgctgtccggatcgcccggaagaagtcgaagaagcgctgtcgcggctggaagccgcccagtcggtcgtcgtcgaggtgacgggcgacaacccgcacgacggcgaagtgcgcggcgtcgcatggtgggacggacatacggcgtatttcattccgtttgaacggctggtgcagtccgacatgcggccgctggccgactggctcgccgacgcgcgtcggccgaagcgtacgcacgactcccatcgcgctgaagtggcgctgttctggcacggccttgcgtttcgcggcacgtcgttctgcacgcatatcgccgcctatttgctcgaccccacggaatcgcgccatacgctggcggacctgtcgcgccgctacggtctgccgccggtaccggaagccgaggacgtttacggcaagggcgcgaagttcaaggttcccgatcgcgacacgctggcgcgttacgtcggccgcaaggccgccctagtcgcgcggctcgttccgctgctcgaggcggatttggcggcctgcggcatgcgttcgcttttttacgacctggagctgccgctttcatccgaactcgccgtcatggagacggtcggcgtccgcgtcgacgcggcggcgctcgccgcctacggcgaggaattgcgcgaggcggcggcgaaagtcgagcgggagatttacgagctggccgggacgacgttcaacatcggatcgacgaaacagctcggcgaaattttgttcgataagctggggctgcccgtcgtcaagaaaacgaaaaccggctattccaccgacgcagacgtgctggaggaactggcgccgtaccatccgatcgtcgaaaagattttgcattaccgccaactgacgaaattgcagtcgacctacatcgaggggcttttgaaagaaatccgtccgcaaaccggtaaaatccatacgtattatcagcagacgatcgcggcgacggggcggctgagcagtcagtttcccaatcttcagaacattccgatccgtctcgaagaggggcggaaaatccgcaaggcgttcgttccgtcagaaccgggatggctgatgctcgccgccgactattcgcagatcgaactgcgcgtgctcgcgcacgtttccggcgacgaacggctgaaggaagcgtttcggacaggcatggacatccacacgaagaccgcgatggacgtgttcggcgtttccgaagaccgcgtcgacgcgcgcatgcggcggcaggcgaaggcggtcaatttcggcatcatctacggcatcagcgatttcggactggcgcaaaacctgaacatttcccgcaaggaggcggcggagttcatccggcaatatttcgccgtcttttcgggcgtcaaggcgtaccgcgagcggatcgtcgagcaggcgcgccgcgacggttacgtgacgaccctgctcggtcgcaggcgctatttgccggacatcaacgcgtcgccttacaacctccgctcgttcgcggagcggacggcgatgaatacgccgatccagggcacggccgccgacatcatcaagaccgcgatggtgcgtctgacgcggcggatgcgcgacgtcggactgaagagccgcatgctgctgcaggttcacgacgagctcgtgtttgaagtgccgccggacgagctcgacgcgatgcgggagcttgtgacggacgtcatggagtcggcggtcccgctcgacgtgccgctgaaggtcgacgtcagctggggcgccgactggtacgcggcgaagtgagggaagcgggatcc

SEQ ID NO: 1202 - DNA, 2792 bp, Artificial Sequence
  Description of Artificial Sequence: Synthetic Caldibacillus cellulovorans CompA.2 DNA Polymerase N829S
atgaaatacctgctgccgaccgctgctgctggtctgctgctcctcgctgcccagccggcgatggccatgggcaaactgattctggtcgacggaaacagcgtcgccaaccgggcgttttacgccgtccggctgctcagcacgcgcggcggcctgcacacaaacgcggtgtacggattcgccaacatgttgctcaagctgatcgaggaggaacggccgacgcattttctcgtcgcgttcgacgcgggcaaggcgacgttccgtcatcgcgaatacgaggcctacaaggcgggtcgcctgcagacgccgcccgagctgtccgagcagtttccgtacatccgggagctcgtccgggcgttcggcgtcgcgtccggcgagctggaggaatacgaggcggacgacatgatcggtacgctggcgaaacgggcggaggccgagggcgtcgacacgctggtcgtcaccggcgaccgcgatttgctccagctcgtatcggaccgcgtgaccgtcgcgctgacgcgcaagggcatcacggaaacggagcggtacgacccggcgcgcatccgcgaggaatacggcttcgatcccgaccgcatccgcgacctcaaagggctgatgggcgacgcgtctgacaatcttcccggcgttcccggcgtcggtgagaaaaccgcactgaaactgctcaggcagtacggttcgctggagagcgtcctggaacacgcgtcggaaatcgccggaaagctcggtgaaaatctgcgggcgcacgccgacgccgcccgattgagcaagcggctggcgacgatcgactgcgcggtaccgttgcagtcgggatgggactggctgcgcctcggcgaaccggaccgcgccgcgctcgcctcgctgttgcggcagctcgaattcaagtcgctgttgaaacggctcggactcgacggcacgtccgccgatgccgacgtcgacggcgtccgttcctccgcgcggccggcggacgagaaacggccgagggccgtcgccgtcgctgaggagggcgtcgacgtccgctgtccggatcgcccggaagaagtcgaagaagcgctgtcgcggctggaagccgcccagtcggtcgtcgtcgaggtgacgggcgacaacccgcacgacggcgaagtgcgcggcgtcgcatggtgggacggacatacggcgtatttcattccgtttgaacggctggtgcagtccgacatgcggccgctggccgactggctcgccgacgcgcgtcggccgaagcgtacgcacgactcccatcgcgctgaagtggcgctgttctggcacggccttgcgtttcgcggcacgtcgttctgcacgcatatcgccgcctatttgctcgaccccacggaatcgcgccatacgctggcggacctgtcgcgccgctacggtctgccgccggtaccggaagccgaggacgtttacggcaagggcgcgaagttcaaggttcccgatcgcgacacgctggcgcgttacgtcggccgcaaggccgccctagtcgcgcggctcgttccgctgctcgaggcggatttggcggcctgcggcatgcgttcgcttttttacgacctggagctgccgctttcatccgaactcgccgtcatggagacggtcggcgtccgcgtcgacgcggcggcgctcgccgcctacggcgaggaattgcgcgaggcggcggcgaaagtcgagcgggagatttacgagctggccgggacgacgttcaacatcggatcgacgaaacagctcggcgaaattttgttcgataagctggggctgcccgtcgtcaagaaaacgaaaaccggctattccaccgacgcagacgtgctggaggaactggcgccgtaccatccgatcgtcgaaaagattttgcattaccgccaactgacgaaattgcagtcgacctacatcgaggggcttttgaaagaaatccgtccgcaaaccggtaaaatccatacgtattatcagcagacgatcgcggcgacggggcggctgagcagtcagtttcccaatcttcagaacattccgatccgtctcgaagaggggcggaaaatccgcaaggcgttcgttccgtcagaaccgggatggctgatgctcgccgccgactattcgcagatcgaactgcgcgtgctcgcgcacgtttccggcgacgaacggctgaaggaagcgtttcggacaggcatggacatccacacgaagaccgcgatggacgtgttcggcgtttccgaagaccgcgtcgacgcgcgcatgcggcggcaggcgaaggcggtcaatttcggcatcatctacggcatcagcgatttcggactggcgcaaaacctgaacatttcccgcaaggaggcggcggagttcatccggcaatatttcgccgtcttttcgggcgtcaaggcgtaccgcgagcggatcgtcgagcaggcgcgccgcgacggttacgtgacgaccctgctcggtcgcaggcgctatttgccggacatcaacgcgtcgtcttacaacctccgctcgttcgcggagcggacggcgatgaatacgccgatccagggcacggccgccgacatcatcaagaccgcgatggtgcgtctgacgcggcggatgcgcgacgtcggactgaagagccgcatgctgctgcaggttcacgacgagctcgtgtttgaagtgccgccggacgagctcgacgcgatgcgggagcttgtgacggacgtcatggagtcggcggtcccgctcgacgtgccgctgaaggtcgacgtcagctggggcgccgactggtacgcggcgaagtgagggaagcgggatcc

SEQ ID NO: 1203 - DNA, 2792 bp, Artificial Sequence
  Description of Artificial Sequence: Synthetic Caldibacillus cellulovorans CompA.2 DNA Polymerase N829T
atgaaatacctgctgccgaccgctgctgctggtctgctgctcctcgctgcccagccggcgatggccatgggcaaactgattctggtcgacggaaacagcgtcgccaaccgggcgttttacgccgtccggctgctcagcacgcgcggcggcctgcacacaaacgcggtgtacggattcgccaacatgttgctcaagctgatcgaggaggaacggccgacgcattttctcgtcgcgttcgacgcgggcaaggcgacgttccgtcatcgcgaatacgaggcctacaaggcgggtcgcctgcagacgccgcccgagctgtccgagcagtttccgtacatccgggagctcgtccgggcgttcggcgtcgcgtccggcgagctggaggaatacgaggcggacgacatgatcggtacgctggcgaaacgggcggaggccgagggcgtcgacacgctggtcgtcaccggcgaccgcgatttgctccagctcgtatcggaccgcgtgaccgtcgcgctgacgcgcaagggcatcacggaaacggagcggtacgacccggcgcgcatccgcgaggaatacggcttcgatcccgaccgcatccgcgacctcaaagggctgatgggcgacgcgtctgacaatcttcccggcgttcccggcgtcggtgagaaaaccgcactgaaactgctcaggcagtacggttcgctggagagcgtcctggaacacgcgtcggaaatcgccggaaagctcggtgaaaatctgcgggcgcacgccgacgccgcccgattgagcaagcggctggcgacgatcgactgcgcggtaccgttgcagtcgggatgggactggctgcgcctcggcgaaccggaccgcgccgcgctcgcctcgctgttgcggcagctcgaattcaagtcgctgttgaaacggctcggactcgacggcacgtccgccgatgccgacgtcgacggcgtccgttcctccgcgcggccggcggacgagaaacggccgagggccgtcgccgtcgctgaggagggcgtcgacgtccgctgtccggatcgcccggaagaagtcgaagaagcgctgtcgcggctggaagccgcccagtcggtcgtcgtcgaggtgacgggcgacaacccgcacgacggcgaagtgcgcggcgtcgcatggtgggacggacatacggcgtatttcattccgtttgaacggctggtgcagtccgacatgcggccgctggccgactggctcgccgacgcgcgtcggccgaagcgtacgcacgactcccatcgcgctgaagtggcgctgttctggcacggccttgcgtttcgcggcacgtcgttctgcacgcatatcgccgcctatttgctcgaccccacggaatcgcgccatacgctggcggacctgtcgcgccgctacggtctgccgccggtaccggaagccgaggacgtttacggcaagggcgcgaagttcaaggttcccgatcgcgacacgctggcgcgttacgtcggccgcaaggccgccctagtcgcgcggctcgttccgctgctcgaggcggatttggcggcctgcggcatgcgttcgcttttttacgacctggagctgccgctttcatccgaactcgccgtcatggagacggtcggcgtccgcgtcgacgcggcggcgctcgccgcctacggcgaggaattgcgcgaggcggcggcgaaagtcgagcgggagatttacgagctggccgggacgacgttcaacatcggatcgacgaaacagctcggcgaaattttgttcgataagctggggctgcccgtcgtcaagaaaacgaaaaccggctattccaccgacgcagacgtgctggaggaactggcgccgtaccatccgatcgtcgaaaagattttgcattaccgccaactgacgaaattgcagtcgacctacatcgaggggcttttgaaagaaatccgtccgcaaaccggtaaaatccatacgtattatcagcagacgatcgcggcgacggggcggctgagcagtcagtttcccaatcttcagaacattccgatccgtctcgaagaggggcggaaaatccgcaaggcgttcgttccgtcagaaccgggatggctgatgctcgccgccgactattcgcagatcgaactgcgcgtgctcgcgcacgtttccggcgacgaacggctgaaggaagcgtttcggacaggcatggacatccacacgaagaccgcgatggacgtgttcggcgtttccgaagaccgcgtcgacgcgcgcatgcggcggcaggcgaaggcggtcaatttcggcatcatctacggcatcagcgatttcggactggcgcaaaacctgaacatttcccgcaaggaggcggcggagttcatccggcaatatttcgccgtcttttcgggcgtcaaggcgtaccgcgagcggatcgtcgagcaggcgcgccgcgacggttacgtgacgaccctgctcggtcgcaggcgctatttgccggacatcaacgcgtcgacttacaacctccgctcgttcgcggagcggacggcgatgaatacgccgatccagggcacggccgccgacatcatcaagaccgcgatggtgcgtctgacgcggcggatgcgcgacgtcggactgaagagccgcatgctgctgcaggttcacgacgagctcgtgtttgaagtgccgccggacgagctcgacgcgatgcgggagcttgtgacggacgtcatggagtcggcggtcccgctcgacgtgccgctgaaggtcgacgtcagctggggcgccgactggtacgcggcgaagtgagggaagcgggatcc

SEQ ID NO: 1204 - DNA, 2792 bp, Artificial Sequence
  Description of Artificial Sequence: Synthetic Caldibacillus cellulovorans CompA.2 DNA Polymerase N829W
atgaaatacctgctgccgaccgctgctgctggtctgctgctcctcgctgcccagccggcgatggccatgggcaaactgattctggtcgacggaaacagcgtcgccaaccgggcgttttacgccgtccggctgctcagcacgcgcggcggcctgcacacaaacgcggtgtacggattcgccaacatgttgctcaagctgatcgaggaggaacggccgacgcattttctcgtcgcgttcgacgcgggcaaggcgacgttccgtcatcgcgaatacgaggcctacaaggcgggtcgcctgcagacgccgcccgagctgtccgagcagtttccgtacatccgggagctcgtccgggcgttcggcgtcgcgtccggcgagctggaggaatacgaggcggacgacatgatcggtacgctggcgaaacgggcggaggccgagggcgtcgacacgctggtcgtcaccggcgaccgcgatttgctccagctcgtatcggaccgcgtgaccgtcgcgctgacgcgcaagggcatcacggaaacggagcggtacgacccggcgcgcatccgcgaggaatacggcttcgatcccgaccgcatccgcgacctcaaagggctgatgggcgacgcgtctgacaatcttcccggcgttcccggcgtcggtgagaaaaccgcactgaaactgctcaggcagtacggttcgctggagagcgtcctggaacacgcgtcggaaatcgccggaaagctcggtgaaaatctgcgggcgcacgccgacgccgcccgattgagcaagcggctggcgacgatcgactgcgcggtaccgttgcagtcgggatgggactggctgcgcctcggcgaaccggaccgcgccgcgctcgcctcgctgttgcggcagctcgaattcaagtcgctgttgaaacggctcggactcgacggcacgtccgccgatgccgacgtcgacggcgtccgttcctccgcgcggccggcggacgagaaacggccgagggccgtcgccgtcgctgaggagggcgtcgacgtccgctgtccggatcgcccggaagaagtcgaagaagcgctgtcgcggctggaagccgcccagtcggtcgtcgtcgaggtgacgggcgacaacccgcacgacggcgaagtgcgcggcgtcgcatggtgggacggacatacggcgtatttcattccgtttgaacggctggtgcagtccgacatgcggccgctggccgactggctcgccgacgcgcgtcggccgaagcgtacgcacgactcccatcgcgctgaagtggcgctgttctggcacggccttgcgtttcgcggcacgtcgttctgcacgcatatcgccgcctatttgctcgaccccacggaatcgcgccatacgctggcggacctgtcgcgccgctacggtctgccgccggtaccggaagccgaggacgtttacggcaagggcgcgaagttcaaggttcccgatcgcgacacgctggcgcgttacgtcggccgcaaggccgccctagtcgcgcggctcgttccgctgctcgaggcggatttggcggcctgcggcatgcgttcgcttttttacgacctggagctgccgctttcatccgaactcgccgtcatggagacggtcggcgtccgcgtcgacgcggcggcgctcgccgcctacggcgaggaattgcgcgaggcggcggcgaaagtcgagcgggagatttacgagctggccgggacgacgttcaacatcggatcgacgaaacagctcggcgaaattttgttcgataagctggggctgcccgtcgtcaagaaaacgaaaaccggctattccaccgacgcagacgtgctggaggaactggcgccgtaccatccgatcgtcgaaaagattttgcattaccgccaactgacgaaattgcagtcgacctacatcgaggggcttttgaaagaaatccgtccgcaaaccggtaaaatccatacgtattatcagcagacgatcgcggcgacggggcggctgagcagtcagtttcccaatcttcagaacattccgatccgtctcgaagaggggcggaaaatccgcaaggcgttcgttccgtcagaaccgggatggctgatgctcgccgccgactattcgcagatcgaactgcgcgtgctcgcgcacgtttccggcgacgaacggctgaaggaagcgtttcggacaggcatggacatccacacgaagaccgcgatggacgtgttcggcgtttccgaagaccgcgtcgacgcgcgcatgcggcggcaggcgaaggcggtcaatttcggcatcatctacggcatcagcgatttcggactggcgcaaaacctgaacatttcccgcaaggaggcggcggagttcatccggcaatatttcgccgtcttttcgggcgtcaaggcgtaccgcgagcggatcgtcgagcaggcgcgccgcgacggttacgtgacgaccctgctcggtcgcaggcgctatttgccggacatcaacgcgtcgtggtacaacctccgctcgttcgcggagcggacggcgatgaatacgccgatccagggcacggccgccgacatcatcaagaccgcgatggtgcgtctgacgcggcggatgcgcgacgtcggactgaagagccgcatgctgctgcaggttcacgacgagctcgtgtttgaagtgccgccggacgagctcgacgcgatgcgggagcttgtgacggacgtcatggagtcggcggtcccgctcgacgtgccgctgaaggtcgacgtcagctggggcgccgactggtacgcggcgaagtgagggaagcgggatcc

SEQ ID NO: 1205 - DNA, 2792 bp, Artificial Sequence
  Description of Artificial Sequence: Synthetic Caldibacillus cellulovorans CompA.2 DNA Polymerase N829Y
atgaaatacctgctgccgaccgctgctgctggtctgctgctcctcgctgcccagccggcgatggccatgggcaaactgattctggtcgacggaaacagcgtcgccaaccgggcgttttacgccgtccggctgctcagcacgcgcggcggcctgcacacaaacgcggtgtacggattcgccaacatgttgctcaagctgatcgaggaggaacggccgacgcattttctcgtcgcgttcgacgcgggcaaggcgacgttccgtcatcgcgaatacgaggcctacaaggcgggtcgcctgcagacgccgcccgagctgtccgagcagtttccgtacatccgggagctcgtccgggcgttcggcgtcgcgtccggcgagctggaggaatacgaggcggacgacatgatcggtacgctggcgaaacgggcggaggccgagggcgtcgacacgctggtcgtcaccggcgaccgcgatttgctccagctcgtatcggaccgcgtgaccgtcgcgctgacgcgcaagggcatcacggaaacggagcggtacgacccggcgcgcatccgcgaggaatacggcttcgatcccgaccgcatccgcgacctcaaagggctgatgggcgacgcgtctgacaatcttcccggcgttcccggcgtcggtgagaaaaccgcactgaaactgctcaggcagtacggttcgctggagagcgtcctggaacacgcgtcggaaatcgccggaaagctcggtgaaaatctgcgggcgcacgccgacgccgcccgattgagcaagcggctggcgacgatcgactgcgcggtaccgttgcagtcgggatgggactggctgcgcctcggcgaaccggaccgcgccgcgctcgcctcgctgttgcggcagctcgaattcaagtcgctgttgaaacggctcggactcgacggcacgtccgccgatgccgacgtcgacggcgtccgttcctccgcgcggccggcggacgagaaacggccgagggccgtcgccgtcgctgaggagggcgtcgacgtccgctgtccggatcgcccggaagaagtcgaagaagcgctgtcgcggctggaagccgcccagtcggtcgtcgtcgaggtgacgggcgacaacccgcacgacggcgaagtgcgcggcgtcgcatggtgggacggacatacggcgtatttcattccgtttgaacggctggtgcagtccgacatgcggccgctggccgactggctcgccgacgcgcgtcggccgaagcgtacgcacgactcccatcgcgctgaagtggcgctgttctggcacggccttgcgtttcgcggcacgtcgttctgcacgcatatcgccgcctatttgctcgaccccacggaatcgcgccatacgctggcggacctgtcgcgccgctacggtctgccgccggtaccggaagccgaggacgtttacggcaagggcgcgaagttcaaggttcccgatcgcgacacgctggcgcgttacgtcggccgcaaggccgccctagtcgcgcggctcgttccgctgctcgaggcggatttggcggcctgcggcatgcgttcgcttttttacgacctggagctgccgctttcatccgaactcgccgtcatggagacggtcggcgtccgcgtcgacgcggcggcgctcgccgcctacggcgaggaattgcgcgaggcggcggcgaaagtcgagcgggagatttacgagctggccgggacgacgttcaacatcggatcgacgaaacagctcggcgaaattttgttcgataagctggggctgcccgtcgtcaagaaaacgaaaaccggctattccaccgacgcagacgtgctggaggaactggcgccgtaccatccgatcgtcgaaaagattttgcattaccgccaactgacgaaattgcagtcgacctacatcgaggggcttttgaaagaaatccgtccgcaaaccggtaaaatccatacgtattatcagcagacgatcgcggcgacggggcggctgagcagtcagtttcccaatcttcagaacattccgatccgtctcgaagaggggcggaaaatccgcaaggcgttcgttccgtcagaaccgggatggctgatgctcgccgccgactattcgcagatcgaactgcgcgtgctcgcgcacgtttccggcgacgaacggctgaaggaagcgtttcggacaggcatggacatccacacgaagaccgcgatggacgtgttcggcgtttccgaagaccgcgtcgacgcgcgcatgcggcggcaggcgaaggcggtcaatttcggcatcatctacggcatcagcgatttcggactggcgcaaaacctgaacatttcccgcaaggaggcggcggagttcatccggcaatatttcgccgtcttttcgggcgtcaaggcgtaccgcgagcggatcgtcgagcaggcgcgccgcgacggttacgtgacgaccctgctcggtcgcaggcgctatttgccggacatcaacgcgtcgtattacaacctccgctcgttcgcggagcggacggcgatgaatacgccgatccagggcacggccgccgacatcatcaagaccgcgatggtgcgtctgacgcggcggatgcgcgacgtcggactgaagagccgcatgctgctgcaggttcacgacgagctcgtgtttgaagtgccgccggacgagctcgacgcgatgcgggagcttgtgacggacgtcatggagtcggcggtcccgctcgacgtgccgctgaaggtcgacgtcagctggggcgccgactggtacgcggcgaagtgagggaagcgggatcc

SEQ ID NO: 1206 - DNA, 2792 bp, Artificial Sequence
  Description of Artificial Sequence: Synthetic Caldibacillus cellulovorans CompA.2 DNA Polymerase N829V
atgaaatacctgctgccgaccgctgctgctggtctgctgctcctcgctgcccagccggcgatggccatgggcaaactgattctggtcgacggaaacagcgtcgccaaccgggcgttttacgccgtccggctgctcagcacgcgcggcggcctgcacacaaacgcggtgtacggattcgccaacatgttgctcaagctgatcgaggaggaacggccgacgcattttctcgtcgcgttcgacgcgggcaaggcgacgttccgtcatcgcgaatacgaggcctacaaggcgggtcgcctgcagacgccgcccgagctgtccgagcagtttccgtacatccgggagctcgtccgggcgttcggcgtcgcgtccggcgagctggaggaatacgaggcggacgacatgatcggtacgctggcgaaacgggcggaggccgagggcgtcgacacgctggtcgtcaccggcgaccgcgatttgctccagctcgtatcggaccgcgtgaccgtcgcgctgacgcgcaagggcatcacggaaacggagcggtacgacccggcgcgcatccgcgaggaatacggcttcgatcccgaccgcatccgcgacctcaaagggctgatgggcgacgcgtctgacaatcttcccggcgttcccggcgtcggtgagaaaaccgcactgaaactgctcaggcagtacggttcgctggagagcgtcctggaacacgcgtcggaaatcgccggaaagctcggtgaaaatctgcgggcgcacgccgacgccgcccgattgagcaagcggctggcgacgatcgactgcgcggtaccgttgcagtcgggatgggactggctgcgcctcggcgaaccggaccgcgccgcgctcgcctcgctgttgcggcagctcgaattcaagtcgctgttgaaacggctcggactcgacggcacgtccgccgatgccgacgtcgacggcgtccgttcctccgcgcggccggcggacgagaaacggccgagggccgtcgccgtcgctgaggagggcgtcgacgtccgctgtccggatcgcccggaagaagtcgaagaagcgctgtcgcggctggaagccgcccagtcggtcgtcgtcgaggtgacgggcgacaacccgcacgacggcgaagtgcgcggcgtcgcatggtgggacggacatacggcgtatttcattccgtttgaacggctggtgcagtccgacatgcggccgctggccgactggctcgccgacgcgcgtcggccgaagcgtacgcacgactcccatcgcgctgaagtggcgctgttctggcacggccttgcgtttcgcggcacgtcgttctgcacgcatatcgccgcctatttgctcgaccccacggaatcgcgccatacgctggcggacctgtcgcgccgctacggtctgccgccggtaccggaagccgaggacgtttacggcaagggcgcgaagttcaaggttcccgatcgcgacacgctggcgcgttacgtcggccgcaaggccgccctagtcgcgcggctcgttccgctgctcgaggcggatttggcggcctgcggcatgcgttcgcttttttacgacctggagctgccgctttcatccgaactcgccgtcatggagacggtcggcgtccgcgtcgacgcggcggcgctcgccgcctacggcgaggaattgcgcgaggcggcggcgaaagtcgagcgggagatttacgagctggccgggacgacgttcaacatcggatcgacgaaacagctcggcgaaattttgttcgataagctggggctgcccgtcgtcaagaaaacgaaaaccggctattccaccgacgcagacgtgctggaggaactggcgccgtaccatccgatcgtcgaaaagattttgcattaccgccaactgacgaaattgcagtcgacctacatcgaggggcttttgaaagaaatccgtccgcaaaccggtaaaatccatacgtattatcagcagacgatcgcggcgacggggcggctgagcagtcagtttcccaatcttcagaacattccgatccgtctcgaagaggggcggaaaatccgcaaggcgttcgttccgtcagaaccgggatggctgatgctcgccgccgactattcgcagatcgaactgcgcgtgctcgcgcacgtttccggcgacgaacggctgaaggaagcgtttcggacaggcatggacatccacacgaagaccgcgatggacgtgttcggcgtttccgaagaccgcgtcgacgcgcgcatgcggcggcaggcgaaggcggtcaatttcggcatcatctacggcatcagcgatttcggactggcgcaaaacctgaacatttcccgcaaggaggcggcggagttcatccggcaatatttcgccgtcttttcgggcgtcaaggcgtaccgcgagcggatcgtcgagcaggcgcgccgcgacggttacgtgacgaccctgctcggtcgcaggcgctatttgccggacatcaacgcgtcggtttacaacctccgctcgttcgcggagcggacggcgatgaatacgccgatccagggcacggccgccgacatcatcaagaccgcgatggtgcgtctgacgcggcggatgcgcgacgtcggactgaagagccgcatgctgctgcaggttcacgacgagctcgtgtttgaagtgccgccggacgagctcgacgcgatgcgggagcttgtgacggacgtcatggagtcggcggtcccgctcgacgtgccgctgaaggtcgacgtcagctggggcgccgactggtacgcggcgaagtgagggaagcgggatcc

SEQ ID NO: 1207 - DNA, 2792 bp, Artificial Sequence
  Description of Artificial Sequence: Synthetic Caldibacillus cellulovorans CompA.2 DNA Polymerase Y830A
atgaaatacctgctgccgaccgctgctgctggtctgctgctcctcgctgcccagccggcgatggccatgggcaaactgattctggtcgacggaaacagcgtcgccaaccgggcgttttacgccgtccggctgctcagcacgcgcggcggcctgcacacaaacgcggtgtacggattcgccaacatgttgctcaagctgatcgaggaggaacggccgacgcattttctcgtcgcgttcgacgcgggcaaggcgacgttccgtcatcgcgaatacgaggcctacaaggcgggtcgcctgcagacgccgcccgagctgtccgagcagtttccgtacatccgggagctcgtccgggcgttcggcgtcgcgtccggcgagctggaggaatacgaggcggacgacatgatcggtacgctggcgaaacgggcggaggccgagggcgtcgacacgctggtcgtcaccggcgaccgcgatttgctccagctcgtatcggaccgcgtgaccgtcgcgctgacgcgcaagggcatcacggaaacggagcggtacgacccggcgcgcatccgcgaggaatacggcttcgatcccgaccgcatccgcgacctcaaagggctgatgggcgacgcgtctgacaatcttcccggcgttcccggcgtcggtgagaaaaccgcactgaaactgctcaggcagtacggttcgctggagagcgtcctggaacacgcgtcggaaatcgccggaaagctcggtgaaaatctgcgggcgcacgccgacgccgcccgattgagcaagcggctggcgacgatcgactgcgcggtaccgttgcagtcgggatgggactggctgcgcctcggcgaaccggaccgcgccgcgctcgcctcgctgttgcggcagctcgaattcaagtcgctgttgaaacggctcggactcgacggcacgtccgccgatgccgacgtcgacggcgtccgttcctccgcgcggccggcggacgagaaacggccgagggccgtcgccgtcgctgaggagggcgtcgacgtccgctgtccggatcgcccggaagaagtcgaagaagcgctgtcgcggctggaagccgcccagtcggtcgtcgtcgaggtgacgggcgacaacccgcacgacggcgaagtgcgcggcgtcgcatggtgggacggacatacggcgtatttcattccgtttgaacggctggtgcagtccgacatgcggccgctggccgactggctcgccgacgcgcgtcggccgaagcgtacgcacgactcccatcgcgctgaagtggcgctgttctggcacggccttgcgtttcgcggcacgtcgttctgcacgcatatcgccgcctatttgctcgaccccacggaatcgcgccatacgctggcggacctgtcgcgccgctacggtctgccgccggtaccggaagccgaggacgtttacggcaagggcgcgaagttcaaggttcccgatcgcgacacgctggcgcgttacgtcggccgcaaggccgccctagtcgcgcggctcgttccgctgctcgaggcggatttggcggcctgcggcatgcgttcgcttttttacgacctggagctgccgctttcatccgaactcgccgtcatggagacggtcggcgtccgcgtcgacgcggcggcgctcgccgcctacggcgaggaattgcgcgaggcggcggcgaaagtcgagcgggagatttacgagctggccgggacgacgttcaacatcggatcgacgaaacagctcggcgaaattttgttcgataagctggggctgcccgtcgtcaagaaaacgaaaaccggctattccaccgacgcagacgtgctggaggaactggcgccgtaccatccgatcgtcgaaaagattttgcattaccgccaactgacgaaattgcagtcgacctacatcgaggggcttttgaaagaaatccgtccgcaaaccggtaaaatccatacgtattatcagcagacgatcgcggcgacggggcggctgagcagtcagtttcccaatcttcagaacattccgatccgtctcgaagaggggcggaaaatccgcaaggcgttcgttccgtcagaaccgggatggctgatgctcgccgccgactattcgcagatcgaactgcgcgtgctcgcgcacgtttccggcgacgaacggctgaaggaagcgtttcggacaggcatggacatccacacgaagaccgcgatggacgtgttcggcgtttccgaagaccgcgtcgacgcgcgcatgcggcggcaggcgaaggcggtcaatttcggcatcatctacggcatcagcgatttcggactggcgcaaaacctgaacatttcccgcaaggaggcggcggagttcatccggcaatatttcgccgtcttttcgggcgtcaaggcgtaccgcgagcggatcgtcgagcaggcgcgccgcgacggttacgtgacgaccctgctcggtcgcaggcgctatttgccggacatcaacgcgtcgaatgctaacctccgctcgttcgcggagcggacggcgatgaatacgccgatccagggcacggccgccgacatcatcaagaccgcgatggtgcgtctgacgcggcggatgcgcgacgtcggactgaagagccgcatgctgctgcaggttcacgacgagctcgtgtttgaagtgccgccggacgagctcgacgcgatgcgggagcttgtgacggacgtcatggagtcggcggtcccgctcgacgtgccgctgaaggtcgacgtcagctggggcgccgactggtacgcggcgaagtgagggaagcgggatcc

SEQ ID NO: 1208 - DNA, 2792 bp, Artificial Sequence
  Description of Artificial Sequence: Synthetic Caldibacillus cellulovorans CompA.2 DNA Polymerase Y830R
atgaaatacctgctgccgaccgctgctgctggtctgctgctcctcgctgcccagccggcgatggccatgggcaaactgattctggtcgacggaaacagcgtcgccaaccgggcgttttacgccgtccggctgctcagcacgcgcggcggcctgcacacaaacgcggtgtacggattcgccaacatgttgctcaagctgatcgaggaggaacggccgacgcattttctcgtcgcgttcgacgcgggcaaggcgacgttccgtcatcgcgaatacgaggcctacaaggcgggtcgcctgcagacgccgcccgagctgtccgagcagtttccgtacatccgggagctcgtccgggcgttcggcgtcgcgtccggcgagctggaggaatacgaggcggacgacatgatcggtacgctggcgaaacgggcggaggccgagggcgtcgacacgctggtcgtcaccggcgaccgcgatttgctccagctcgtatcggaccgcgtgaccgtcgcgctgacgcgcaagggcatcacggaaacggagcggtacgacccggcgcgcatccgcgaggaatacggcttcgatcccgaccgcatccgcgacctcaaagggctgatgggcgacgcgtctgacaatcttcccggcgttcccggcgtcggtgagaaaaccgcactgaaactgctcaggcagtacggttcgctggagagcgtcctggaacacgcgtcggaaatcgccggaaagctcggtgaaaatctgcgggcgcacgccgacgccgcccgattgagcaagcggctggcgacgatcgactgcgcggtaccgttgcagtcgggatgggactggctgcgcctcggcgaaccggaccgcgccgcgctcgcctcgctgttgcggcagctcgaattcaagtcgctgttgaaacggctcggactcgacggcacgtccgccgatgccgacgtcgacggcgtccgttcctccgcgcggccggcggacgagaaacggccgagggccgtcgccgtcgctgaggagggcgtcgacgtccgctgtccggatcgcccggaagaagtcgaagaagcgctgtcgcggctggaagccgcccagtcggtcgtcgtcgaggtgacgggcgacaacccgcacgacggcgaagtgcgcggcgtcgcatggtgggacggacatacggcgtatttcattccgtttgaacggctggtgcagtccgacatgcggccgctggccgactggctcgccgacgcgcgtcggccgaagcgtacgcacgactcccatcgcgctgaagtggcgctgttctggcacggccttgcgtttcgcggcacgtcgttctgcacgcatatcgccgcctatttgctcgaccccacggaatcgcgccatacgctggcggacctgtcgcgccgctacggtctgccgccggtaccggaagccgaggacgtttacggcaagggcgcgaagttcaaggttcccgatcgcgacacgctggcgcgttacgtcggccgcaaggccgccctagtcgcgcggctcgttccgctgctcgaggcggatttggcggcctgcggcatgcgttcgcttttttacgacctggagctgccgctttcatccgaactcgccgtcatggagacggtcggcgtccgcgtcgacgcggcggcgctcgccgcctacggcgaggaattgcgcgaggcggcggcgaaagtcgagcgggagatttacgagctggccgggacgacgttcaacatcggatcgacgaaacagctcggcgaaattttgttcgataagctggggctgcccgtcgtcaagaaaacgaaaaccggctattccaccgacgcagacgtgctggaggaactggcgccgtaccatccgatcgtcgaaaagattttgcattaccgccaactgacgaaattgcagtcgacctacatcgaggggcttttgaaagaaatccgtccgcaaaccggtaaaatccatacgtattatcagcagacgatcgcggcgacggggcggctgagcagtcagtttcccaatcttcagaacattccgatccgtctcgaagaggggcggaaaatccgcaaggcgttcgttccgtcagaaccgggatggctgatgctcgccgccgactattcgcagatcgaactgcgcgtgctcgcgcacgtttccggcgacgaacggctgaaggaagcgtttcggacaggcatggacatccacacgaagaccgcgatggacgtgttcggcgtttccgaagaccgcgtcgacgcgcgcatgcggcggcaggcgaaggcggtcaatttcggcatcatctacggcatcagcgatttcggactggcgcaaaacctgaacatttcccgcaaggaggcggcggagttcatccggcaatatttcgccgtcttttcgggcgtcaaggcgtaccgcgagcggatcgtcgagcaggcgcgccgcgacggttacgtgacgaccctgctcggtcgcaggcgctatttgccggacatcaacgcgtcgaatcgtaacctccgctcgttcgcggagcggacggcgatgaatacgccgatccagggcacggccgccgacatcatcaagaccgcgatggtgcgtctgacgcggcggatgcgcgacgtcggactgaagagccgcatgctgctgcaggttcacgacgagctcgtgtttgaagtgccgccggacgagctcgacgcgatgcgggagcttgtgacggacgtcatggagtcggcggtcccgctcgacgtgccgctgaaggtcgacgtcagctggggcgccgactggtacgcggcgaagtgagggaagcgggatcc

SEQ ID NO: 1209 - DNA, 2792 bp, Artificial Sequence
  Description of Artificial Sequence: Synthetic Caldibacillus cellulovorans CompA.2 DNA Polymerase Y830N
atgaaatacctgctgccgaccgctgctgctggtctgctgctcctcgctgcccagccggcgatggccatgggcaaactgattctggtcgacggaaacagcgtcgccaaccgggcgttttacgccgtccggctgctcagcacgcgcggcggcctgcacacaaacgcggtgtacggattcgccaacatgttgctcaagctgatcgaggaggaacggccgacgcattttctcgtcgcgttcgacgcgggcaaggcgacgttccgtcatcgcgaatacgaggcctacaaggcgggtcgcctgcagacgccgcccgagctgtccgagcagtttccgtacatccgggagctcgtccgggcgttcggcgtcgcgtccggcgagctggaggaatacgaggcggacgacatgatcggtacgctggcgaaacgggcggaggccgagggcgtcgacacgctggtcgtcaccggcgaccgcgatttgctccagctcgtatcggaccgcgtgaccgtcgcgctgacgcgcaagggcatcacggaaacggagcggtacgacccggcgcgcatccgcgaggaatacggcttcgatcccgaccgcatccgcgacctcaaagggctgatgggcgacgcgtctgacaatcttcccggcgttcccggcgtcggtgagaaaaccgcactgaaactgctcaggcagtacggttcgctggagagcgtcctggaacacgcgtcggaaatcgccggaaagctcggtgaaaatctgcgggcgcacgccgacgccgcccgattgagcaagcggctggcgacgatcgactgcgcggtaccgttgcagtcgggatgggactggctgcgcctcggcgaaccggaccgcgccgcgctcgcctcgctgttgcggcagctcgaattcaagtcgctgttgaaacggctcggactcgacggcacgtccgccgatgccgacgtcgacggcgtccgttcctccgcgcggccggcggacgagaaacggccgagggccgtcgccgtcgctgaggagggcgtcgacgtccgctgtccggatcgcccggaagaagtcgaagaagcgctgtcgcggctggaagccgcccagtcggtcgtcgtcgaggtgacgggcgacaacccgcacgacggcgaagtgcgcggcgtcgcatggtgggacggacatacggcgtatttcattccgtttgaacggctggtgcagtccgacatgcggccgctggccgactggctcgccgacgcgcgtcggccgaagcgtacgcacgactcccatcgcgctgaagtggcgctgttctggcacggccttgcgtttcgcggcacgtcgttctgcacgcatatcgccgcctatttgctcgaccccacggaatcgcgccatacgctggcggacctgtcgcgccgctacggtctgccgccggtaccggaagccgaggacgtttacggcaagggcgcgaagttcaaggttcccgatcgcgacacgctggcgcgttacgtcggccgcaaggccgccctagtcgcgcggctcgttccgctgctcgaggcggatttggcggcctgcggcatgcgttcgcttttttacgacctggagctgccgctttcatccgaactcgccgtcatggagacggtcggcgtccgcgtcgacgcggcggcgctcgccgcctacggcgaggaattgcgcgaggcggcggcgaaagtcgagcgggagatttacgagctggccgggacgacgttcaacatcggatcgacgaaacagctcggcgaaattttgttcgataagctggggctgcccgtcgtcaagaaaacgaaaaccggctattccaccgacgcagacgtgctggaggaactggcgccgtaccatccgatcgtcgaaaagattttgcattaccgccaactgacgaaattgcagtcgacctacatcgaggggcttttgaaagaaatccgtccgcaaaccggtaaaatccatacgtattatcagcagacgatcgcggcgacggggcggctgagcagtcagtttcccaatcttcagaacattccgatccgtctcgaagaggggcggaaaatccgcaaggcgttcgttccgtcagaaccgggatggctgatgctcgccgccgactattcgcagatcgaactgcgcgtgctcgcgcacgtttccggcgacgaacggctgaaggaagcgtttcggacaggcatggacatccacacgaagaccgcgatggacgtgttcggcgtttccgaagaccgcgtcgacgcgcgcatgcggcggcaggcgaaggcggtcaatttcggcatcatctacggcatcagcgatttcggactggcgcaaaacctgaacatttcccgcaaggaggcggcggagttcatccggcaatatttcgccgtcttttcgggcgtcaaggcgtaccgcgagcggatcgtcgagcaggcgcgccgcgacggttacgtgacgaccctgctcggtcgcaggcgctatttgccggacatcaacgcgtcgaataataacctccgctcgttcgcggagcggacggcgatgaatacgccgatccagggcacggccgccgacatcatcaagaccgcgatggtgcgtctgacgcggcggatgcgcgacgtcggactgaagagccgcatgctgctgcaggttcacgacgagctcgtgtttgaagtgccgccggacgagctcgacgcgatgcgggagcttgtgacggacgtcatggagtcggcggtcccgctcgacgtgccgctgaaggtcgacgtcagctggggcgccgactggtacgcggcgaagtgagggaagcgggatcc

SEQ ID NO: 1210 - DNA, 2792 bp, Artificial Sequence
  Description of Artificial Sequence: Synthetic Caldibacillus cellulovorans CompA.2 DNA Polymerase Y830D
atgaaatacctgctgccgaccgctgctgctggtctgctgctcctcgctgcccagccggcgatggccatgggcaaactgattctggtcgacggaaacagcgtcgccaaccgggcgttttacgccgtccggctgctcagcacgcgcggcggcctgcacacaaacgcggtgtacggattcgccaacatgttgctcaagctgatcgaggaggaacggccgacgcattttctcgtcgcgttcgacgcgggcaaggcgacgttccgtcatcgcgaatacgaggcctacaaggcgggtcgcctgcagacgccgcccgagctgtccgagcagtttccgtacatccgggagctcgtccgggcgttcggcgtcgcgtccggcgagctggaggaatacgaggcggacgacatgatcggtacgctggcgaaacgggcggaggccgagggcgtcgacacgctggtcgtcaccggcgaccgcgatttgctccagctcgtatcggaccgcgtgaccgtcgcgctgacgcgcaagggcatcacggaaacggagcggtacgacccggcgcgcatccgcgaggaatacggcttcgatcccgaccgcatccgcgacctcaaagggctgatgggcgacgcgtctgacaatcttcccggcgttcccggcgtcggtgagaaaaccgcactgaaactgctcaggcagtacggttcgctggagagcgtcctggaacacgcgtcggaaatcgccggaaagctcggtgaaaatctgcgggcgcacgccgacgccgcccgattgagcaagcggctggcgacgatcgactgcgcggtaccgttgcagtcgggatgggactggctgcgcctcggcgaaccggaccgcgccgcgctcgcctcgctgttgcggcagctcgaattcaagtcgctgttgaaacggctcggactcgacggcacgtccgccgatgccgacgtcgacggcgtccgttcctccgcgcggccggcggacgagaaacggccgagggccgtcgccgtcgctgaggagggcgtcgacgtccgctgtccggatcgcccggaagaagtcgaagaagcgctgtcgcggctggaagccgcccagtcggtcgtcgtcgaggtgacgggcgacaacccgcacgacggcgaagtgcgcggcgtcgcatggtgggacggacatacggcgtatttcattccgtttgaacggctggtgcagtccgacatgcggccgctggccgactggctcgccgacgcgcgtcggccgaagcgtacgcacgactcccatcgcgctgaagtggcgctgttctggcacggccttgcgtttcgcggcacgtcgttctgcacgcatatcgccgcctatttgctcgaccccacggaatcgcgccatacgctggcggacctgtcgcgccgctacggtctgccgccggtaccggaagccgaggacgtttacggcaagggcgcgaagttcaaggttcccgatcgcgacacgctggcgcgttacgtcggccgcaaggccgccctagtcgcgcggctcgttccgctgctcgaggcggatttggcggcctgcggcatgcgttcgcttttttacgacctggagctgccgctttcatccgaactcgccgtcatggagacggtcggcgtccgcgtcgacgcggcggcgctcgccgcctacggcgaggaattgcgcgaggcggcggcgaaagtcgagcgggagatttacgagctggccgggacgacgttcaacatcggatcgacgaaacagctcggcgaaattttgttcgataagctggggctgcccgtcgtcaagaaaacgaaaaccggctattccaccgacgcagacgtgctggaggaactggcgccgtaccatccgatcgtcgaaaagattttgcattaccgccaactgacgaaattgcagtcgacctacatcgaggggcttttgaaagaaatccgtccgcaaaccggtaaaatccatacgtattatcagcagacgatcgcggcgacggggcggctgagcagtcagtttcccaatcttcagaacattccgatccgtctcgaagaggggcggaaaatccgcaaggcgttcgttccgtcagaaccgggatggctgatgctcgccgccgactattcgcagatcgaactgcgcgtgctcgcgcacgtttccggcgacgaacggctgaaggaagcgtttcggacaggcatggacatccacacgaagaccgcgatggacgtgttcggcgtttccgaagaccgcgtcgacgcgcgcatgcggcggcaggcgaaggcggtcaatttcggcatcatctacggcatcagcgatttcggactggcgcaaaacctgaacatttcccgcaaggaggcggcggagttcatccggcaatatttcgccgtcttttcgggcgtcaaggcgtaccgcgagcggatcgtcgagcaggcgcgccgcgacggttacgtgacgaccctgctcggtcgcaggcgctatttgccggacatcaacgcgtcgaatgataacctccgctcgttcgcggagcggacggcgatgaatacgccgatccagggcacggccgccgacatcatcaagaccgcgatggtgcgtctgacgcggcggatgcgcgacgtcggactgaagagccgcatgctgctgcaggttcacgacgagctcgtgtttgaagtgccgccggacgagctcgacgcgatgcgggagcttgtgacggacgtcatggagtcggcggtcccgctcgacgtgccgctgaaggtcgacgtcagctggggcgccgactggtacgcggcgaagtgagggaagcgggatcc

SEQ ID NO: 1211 - DNA, 2792 bp, Artificial Sequence
  Description of Artificial Sequence: Synthetic Caldibacillus cellulovorans CompA.2 DNA Polymerase Y830C
atgaaatacctgctgccgaccgctgctgctggtctgctgctcctcgctgcccagccggcgatggccatgggcaaactgattctggtcgacggaaacagcgtcgccaaccgggcgttttacgccgtccggctgctcagcacgcgcggcggcctgcacacaaacgcggtgtacggattcgccaacatgttgctcaagctgatcgaggaggaacggccgacgcattttctcgtcgcgttcgacgcgggcaaggcgacgttccgtcatcgcgaatacgaggcctacaaggcgggtcgcctgcagacgccgcccgagctgtccgagcagtttccgtacatccgggagctcgtccgggcgttcggcgtcgcgtccggcgagctggaggaatacgaggcggacgacatgatcggtacgctggcgaaacgggcggaggccgagggcgtcgacacgctggtcgtcaccggcgaccgcgatttgctccagctcgtatcggaccgcgtgaccgtcgcgctgacgcgcaagggcatcacggaaacggagcggtacgacccggcgcgcatccgcgaggaatacggcttcgatcccgaccgcatccgcgacctcaaagggctgatgggcgacgcgtctgacaatcttcccggcgttcccggcgtcggtgagaaaaccgcactgaaactgctcaggcagtacggttcgctggagagcgtcctggaacacgcgtcggaaatcgccggaaagctcggtgaaaatctgcgggcgcacgccgacgccgcccgattgagcaagcggctggcgacgatcgactgcgcggtaccgttgcagtcgggatgggactggctgcgcctcggcgaaccggaccgcgccgcgctcgcctcgctgttgcggcagctcgaattcaagtcgctgttgaaacggctcggactcgacggcacgtccgccgatgccgacgtcgacggcgtccgttcctccgcgcggccggcggacgagaaacggccgagggccgtcgccgtcgctgaggagggcgtcgacgtccgctgtccggatcgcccggaagaagtcgaagaagcgctgtcgcggctggaagccgcccagtcggtcgtcgtcgaggtgacgggcgacaacccgcacgacggcgaagtgcgcggcgtcgcatggtgggacggacatacggcgtatttcattccgtttgaacggctggtgcagtccgacatgcggccgctggccgactggctcgccgacgcgcgtcggccgaagcgtacgcacgactcccatcgcgctgaagtggcgctgttctggcacggccttgcgtttcgcggcacgtcgttctgcacgcatatcgccgcctatttgctcgaccccacggaatcgcgccatacgctggcggacctgtcgcgccgctacggtctgccgccggtaccggaagccgaggacgtttacggcaagggcgcgaagttcaaggttcccgatcgcgacacgctggcgcgttacgtcggccgcaaggccgccctagtcgcgcggctcgttccgctgctcgaggcggatttggcggcctgcggcatgcgttcgcttttttacgacctggagctgccgctttcatccgaactcgccgtcatggagacggtcggcgtccgcgtcgacgcggcggcgctcgccgcctacggcgaggaattgcgcgaggcggcggcgaaagtcgagcgggagatttacgagctggccgggacgacgttcaacatcggatcgacgaaacagctcggcgaaattttgttcgataagctggggctgcccgtcgtcaagaaaacgaaaaccggctattccaccgacgcagacgtgctggaggaactggcgccgtaccatccgatcgtcgaaaagattttgcattaccgccaactgacgaaattgcagtcgacctacatcgaggggcttttgaaagaaatccgtccgcaaaccggtaaaatccatacgtattatcagcagacgatcgcggcgacggggcggctgagcagtcagtttcccaatcttcagaacattccgatccgtctcgaagaggggcggaaaatccgcaaggcgttcgttccgtcagaaccgggatggctgatgctcgccgccgactattcgcagatcgaactgcgcgtgctcgcgcacgtttccggcgacgaacggctgaaggaagcgtttcggacaggcatggacatccacacgaagaccgcgatggacgtgttcggcgtttccgaagaccgcgtcgacgcgcgcatgcggcggcaggcgaaggcggtcaatttcggcatcatctacggcatcagcgatttcggactggcgcaaaacctgaacatttcccgcaaggaggcggcggagttcatccggcaatatttcgccgtcttttcgggcgtcaaggcgtaccgcgagcggatcgtcgagcaggcgcgccgcgacggttacgtgacgaccctgctcggtcgcaggcgctatttgccggacatcaacgcgtcgaattgtaacctccgctcgttcgcggagcggacggcgatgaatacgccgatccagggcacggccgccgacatcatcaagaccgcgatggtgcgtctgacgcggcggatgcgcgacgtcggactgaagagccgcatgctgctgcaggttcacgacgagctcgtgtttgaagtgccgccggacgagctcgacgcgatgcgggagcttgtgacggacgtcatggagtcggcggtcccgctcgacgtgccgctgaaggtcgacgtcagctggggcgccgactggtacgcggcgaagtgagggaagcgggatcc

SEQ ID NO: 1212 - DNA, 2792 bp, Artificial Sequence
  Description of Artificial Sequence: Synthetic Caldibacillus cellulovorans CompA.2 DNA Polymerase Y830E
atgaaatacctgctgccgaccgctgctgctggtctgctgctcctcgctgcccagccggcgatggccatgggcaaactgattctggtcgacggaaacagcgtcgccaaccgggcgttttacgccgtccggctgctcagcacgcgcggcggcctgcacacaaacgcggtgtacggattcgccaacatgttgctcaagctgatcgaggaggaacggccgacgcattttctcgtcgcgttcgacgcgggcaaggcgacgttccgtcatcgcgaatacgaggcctacaaggcgggtcgcctgcagacgccgcccgagctgtccgagcagtttccgtacatccgggagctcgtccgggcgttcggcgtcgcgtccggcgagctggaggaatacgaggcggacgacatgatcggtacgctggcgaaacgggcggaggccgagggcgtcgacacgctggtcgtcaccggcgaccgcgatttgctccagctcgtatcggaccgcgtgaccgtcgcgctgacgcgcaagggcatcacggaaacggagcggtacgacccggcgcgcatccgcgaggaatacggcttcgatcccgaccgcatccgcgacctcaaagggctgatgggcgacgcgtctgacaatcttcccggcgttcccggcgtcggtgagaaaaccgcactgaaactgctcaggcagtacggttcgctggagagcgtcctggaacacgcgtcggaaatcgccggaaagctcggtgaaaatctgcgggcgcacgccgacgccgcccgattgagcaagcggctggcgacgatcgactgcgcggtaccgttgcagtcgggatgggactggctgcgcctcggcgaaccggaccgcgccgcgctcgcctcgctgttgcggcagctcgaattcaagtcgctgttgaaacggctcggactcgacggcacgtccgccgatgccgacgtcgacggcgtccgttcctccgcgcggccggcggacgagaaacggccgagggccgtcgccgtcgctgaggagggcgtcgacgtccgctgtccggatcgcccggaagaagtcgaagaagcgctgtcgcggctggaagccgcccagtcggtcgtcgtcgaggtgacgggcgacaacccgcacgacggcgaagtgcgcggcgtcgcatggtgggacggacatacggcgtatttcattccgtttgaacggctggtgcagtccgacatgcggccgctggccgactggctcgccgacgcgcgtcggccgaagcgtacgcacgactcccatcgcgctgaagtggcgctgttctggcacggccttgcgtttcgcggcacgtcgttctgcacgcatatcgccgcctatttgctcgaccccacggaatcgcgccatacgctggcggacctgtcgcgccgctacggtctgccgccggtaccggaagccgaggacgtttacggcaagggcgcgaagttcaaggttcccgatcgcgacacgctggcgcgttacgtcggccgcaaggccgccctagtcgcgcggctcgttccgctgctcgaggcggatttggcggcctgcggcatgcgttcgcttttttacgacctggagctgccgctttcatccgaactcgccgtcatggagacggtcggcgtccgcgtcgacgcggcggcgctcgccgcctacggcgaggaattgcgcgaggcggcggcgaaagtcgagcgggagatttacgagctggccgggacgacgttcaacatcggatcgacgaaacagctcggcgaaattttgttcgataagctggggctgcccgtcgtcaagaaaacgaaaaccggctattccaccgacgcagacgtgctggaggaactggcgccgtaccatccgatcgtcgaaaagattttgcattaccgccaactgacgaaattgcagtcgacctacatcgaggggcttttgaaagaaatccgtccgcaaaccggtaaaatccatacgtattatcagcagacgatcgcggcgacggggcggctgagcagtcagtttcccaatcttcagaacattccgatccgtctcgaagaggggcggaaaatccgcaaggcgttcgttccgtcagaaccgggatggctgatgctcgccgccgactattcgcagatcgaactgcgcgtgctcgcgcacgtttccggcgacgaacggctgaaggaagcgtttcggacaggcatggacatccacacgaagaccgcgatggacgtgttcggcgtttccgaagaccgcgtcgacgcgcgcatgcggcggcaggcgaaggcggtcaatttcggcatcatctacggcatcagcgatttcggactggcgcaaaacctgaacatttcccgcaaggaggcggcggagttcatccggcaatatttcgccgtcttttcgggcgtcaaggcgtaccgcgagcggatcgtcgagcaggcgcgccgcgacggttacgtgacgaccctgctcggtcgcaggcgctatttgccggacatcaacgcgtcgaatgaaaacctccgctcgttcgcggagcggacggcgatgaatacgccgatccagggcacggccgccgacatcatcaagaccgcgatggtgcgtctgacgcggcggatgcgcgacgtcggactgaagagccgcatgctgctgcaggttcacgacgagctcgtgtttgaagtgccgccggacgagctcgacgcgatgcgggagcttgtgacggacgtcatggagtcggcggtcccgctcgacgtgccgctgaaggtcgacgtcagctggggcgccgactggtacgcggcgaagtgagggaagcgggatcc

SEQ ID NO: 1213 - DNA, 2792 bp, Artificial Sequence
  Description of Artificial Sequence: Synthetic Caldibacillus cellulovorans CompA.2 DNA Polymerase Y830Q
atgaaatacctgctgccgaccgctgctgctggtctgctgctcctcgctgcccagccggcgatggccatgggcaaactgattctggtcgacggaaacagcgtcgccaaccgggcgttttacgccgtccggctgctcagcacgcgcggcggcctgcacacaaacgcggtgtacggattcgccaacatgttgctcaagctgatcgaggaggaacggccgacgcattttctcgtcgcgttcgacgcgggcaaggcgacgttccgtcatcgcgaatacgaggcctacaaggcgggtcgcctgcagacgccgcccgagctgtccgagcagtttccgtacatccgggagctcgtccgggcgttcggcgtcgcgtccggcgagctggaggaatacgaggcggacgacatgatcggtacgctggcgaaacgggcggaggccgagggcgtcgacacgctggtcgtcaccggcgaccgcgatttgctccagctcgtatcggaccgcgtgaccgtcgcgctgacgcgcaagggcatcacggaaacggagcggtacgacccggcgcgcatccgcgaggaatacggcttcgatcccgaccgcatccgcgacctcaaagggctgatgggcgacgcgtctgacaatcttcccggcgttcccggcgtcggtgagaaaaccgcactgaaactgctcaggcagtacggttcgctggagagcgtcctggaacacgcgtcggaaatcgccggaaagctcggtgaaaatctgcgggcgcacgccgacgccgcccgattgagcaagcggctggcgacgatcgactgcgcggtaccgttgcagtcgggatgggactggctgcgcctcggcgaaccggaccgcgccgcgctcgcctcgctgttgcggcagctcgaattcaagtcgctgttgaaacggctcggactcgacggcacgtccgccgatgccgacgtcgacggcgtccgttcctccgcgcggccggcggacgagaaacggccgagggccgtcgccgtcgctgaggagggcgtcgacgtccgctgtccggatcgcccggaagaagtcgaagaagcgctgtcgcggctggaagccgcccagtcggtcgtcgtcgaggtgacgggcgacaacccgcacgacggcgaagtgcgcggcgtcgcatggtgggacggacatacggcgtatttcattccgtttgaacggctggtgcagtccgacatgcggccgctggccgactggctcgccgacgcgcgtcggccgaagcgtacgcacgactcccatcgcgctgaagtggcgctgttctggcacggccttgcgtttcgcggcacgtcgttctgcacgcatatcgccgcctatttgctcgaccccacggaatcgcgccatacgctggcggacctgtcgcgccgctacggtctgccgccggtaccggaagccgaggacgtttacggcaagggcgcgaagttcaaggttcccgatcgcgacacgctggcgcgttacgtcggccgcaaggccgccctagtcgcgcggctcgttccgctgctcgaggcggatttggcggcctgcggcatgcgttcgcttttttacgacctggagctgccgctttcatccgaactcgccgtcatggagacggtcggcgtccgcgtcgacgcggcggcgctcgccgcctacggcgaggaattgcgcgaggcggcggcgaaagtcgagcgggagatttacgagctggccgggacgacgttcaacatcggatcgacgaaacagctcggcgaaattttgttcgataagctggggctgcccgtcgtcaagaaaacgaaaaccggctattccaccgacgcagacgtgctggaggaactggcgccgtaccatccgatcgtcgaaaagattttgcattaccgccaactgacgaaattgcagtcgacctacatcgaggggcttttgaaagaaatccgtccgcaaaccggtaaaatccatacgtattatcagcagacgatcgcggcgacggggcggctgagcagtcagtttcccaatcttcagaacattccgatccgtctcgaagaggggcggaaaatccgcaaggcgttcgttccgtcagaaccgggatggctgatgctcgccgccgactattcgcagatcgaactgcgcgtgctcgcgcacgtttccggcgacgaacggctgaaggaagcgtttcggacaggcatggacatccacacgaagaccgcgatggacgtgttcggcgtttccgaagaccgcgtcgacgcgcgcatgcggcggcaggcgaaggcggtcaatttcggcatcatctacggcatcagcgatttcggactggcgcaaaacctgaacatttcccgcaaggaggcggcggagttcatccggcaatatttcgccgtcttttcgggcgtcaaggcgtaccgcgagcggatcgtcgagcaggcgcgccgcgacggttacgtgacgaccctgctcggtcgcaggcgctatttgccggacatcaacgcgtcgaatcaaaacctccgctcgttcgcggagcggacggcgatgaatacgccgatccagggcacggccgccgacatcatcaagaccgcgatggtgcgtctgacgcggcggatgcgcgacgtcggactgaagagccgcatgctgctgcaggttcacgacgagctcgtgtttgaagtgccgccggacgagctcgacgcgatgcgggagcttgtgacggacgtcatggagtcggcggtcccgctcgacgtgccgctgaaggtcgacgtcagctggggcgccgactggtacgcggcgaagtgagggaagcgggatcc

SEQ ID NO: 1214 - DNA, 2792 bp, Artificial Sequence
  Description of Artificial Sequence: Synthetic Caldibacillus cellulovorans CompA.2 DNA Polymerase Y830G
atgaaatacctgctgccgaccgctgctgctggtctgctgctcctcgctgcccagccggcgatggccatgggcaaactgattctggtcgacggaaacagcgtcgccaaccgggcgttttacgccgtccggctgctcagcacgcgcggcggcctgcacacaaacgcggtgtacggattcgccaacatgttgctcaagctgatcgaggaggaacggccgacgcattttctcgtcgcgttcgacgcgggcaaggcgacgttccgtcatcgcgaatacgaggcctacaaggcgggtcgcctgcagacgccgcccgagctgtccgagcagtttccgtacatccgggagctcgtccgggcgttcggcgtcgcgtccggcgagctggaggaatacgaggcggacgacatgatcggtacgctggcgaaacgggcggaggccgagggcgtcgacacgctggtcgtcaccggcgaccgcgatttgctccagctcgtatcggaccgcgtgaccgtcgcgctgacgcgcaagggcatcacggaaacggagcggtacgacccggcgcgcatccgcgaggaatacggcttcgatcccgaccgcatccgcgacctcaaagggctgatgggcgacgcgtctgacaatcttcccggcgttcccggcgtcggtgagaaaaccgcactgaaactgctcaggcagtacggttcgctggagagcgtcctggaacacgcgtcggaaatcgccggaaagctcggtgaaaatctgcgggcgcacgccgacgccgcccgattgagcaagcggctggcgacgatcgactgcgcggtaccgttgcagtcgggatgggactggctgcgcctcggcgaaccggaccgcgccgcgctcgcctcgctgttgcggcagctcgaattcaagtcgctgttgaaacggctcggactcgacggcacgtccgccgatgccgacgtcgacggcgtccgttcctccgcgcggccggcggacgagaaacggccgagggccgtcgccgtcgctgaggagggcgtcgacgtccgctgtccggatcgcccggaagaagtcgaagaagcgctgtcgcggctggaagccgcccagtcggtcgtcgtcgaggtgacgggcgacaacccgcacgacggcgaagtgcgcggcgtcgcatggtgggacggacatacggcgtatttcattccgtttgaacggctggtgcagtccgacatgcggccgctggccgactggctcgccgacgcgcgtcggccgaagcgtacgcacgactcccatcgcgctgaagtggcgctgttctggcacggccttgcgtttcgcggcacgtcgttctgcacgcatatcgccgcctatttgctcgaccccacggaatcgcgccatacgctggcggacctgtcgcgccgctacggtctgccgccggtaccggaagccgaggacgtttacggcaagggcgcgaagttcaaggttcccgatcgcgacacgctggcgcgttacgtcggccgcaaggccgccctagtcgcgcggctcgttccgctgctcgaggcggatttggcggcctgcggcatgcgttcgcttttttacgacctggagctgccgctttcatccgaactcgccgtcatggagacggtcggcgtccgcgtcgacgcggcggcgctcgccgcctacggcgaggaattgcgcgaggcggcggcgaaagtcgagcgggagatttacgagctggccgggacgacgttcaacatcggatcgacgaaacagctcggcgaaattttgttcgataagctggggctgcccgtcgtcaagaaaacgaaaaccggctattccaccgacgcagacgtgctggaggaactggcgccgtaccatccgatcgtcgaaaagattttgcattaccgccaactgacgaaattgcagtcgacctacatcgaggggcttttgaaagaaatccgtccgcaaaccggtaaaatccatacgtattatcagcagacgatcgcggcgacggggcggctgagcagtcagtttcccaatcttcagaacattccgatccgtctcgaagaggggcggaaaatccgcaaggcgttcgttccgtcagaaccgggatggctgatgctcgccgccgactattcgcagatcgaactgcgcgtgctcgcgcacgtttccggcgacgaacggctgaaggaagcgtttcggacaggcatggacatccacacgaagaccgcgatggacgtgttcggcgtttccgaagaccgcgtcgacgcgcgcatgcggcggcaggcgaaggcggtcaatttcggcatcatctacggcatcagcgatttcggactggcgcaaaacctgaacatttcccgcaaggaggcggcggagttcatccggcaatatttcgccgtcttttcgggcgtcaaggcgtaccgcgagcggatcgtcgagcaggcgcgccgcgacggttacgtgacgaccctgctcggtcgcaggcgctatttgccggacatcaacgcgtcgaatggtaacctccgctcgttcgcggagcggacggcgatgaatacgccgatccagggcacggccgccgacatcatcaagaccgcgatggtgcgtctgacgcggcggatgcgcgacgtcggactgaagagccgcatgctgctgcaggttcacgacgagctcgtgtttgaagtgccgccggacgagctcgacgcgatgcgggagcttgtgacggacgtcatggagtcggcggtcccgctcgacgtgccgctgaaggtcgacgtcagctggggcgccgactggtacgcggcgaagtgagggaagcgggatcc

SEQ ID NO: 1215 - DNA, 2792 bp, Artificial Sequence
  Description of Artificial Sequence: Synthetic Caldibacillus cellulovorans CompA.2 DNA Polymerase Y830H
atgaaatacctgctgccgaccgctgctgctggtctgctgctcctcgctgcccagccggcgatggccatgggcaaactgattctggtcgacggaaacagcgtcgccaaccgggcgttttacgccgtccggctgctcagcacgcgcggcggcctgcacacaaacgcggtgtacggattcgccaacatgttgctcaagctgatcgaggaggaacggccgacgcattttctcgtcgcgttcgacgcgggcaaggcgacgttccgtcatcgcgaatacgaggcctacaaggcgggtcgcctgcagacgccgcccgagctgtccgagcagtttccgtacatccgggagctcgtccgggcgttcggcgtcgcgtccggcgagctggaggaatacgaggcggacgacatgatcggtacgctggcgaaacgggcggaggccgagggcgtcgacacgctggtcgtcaccggcgaccgcgatttgctccagctcgtatcggaccgcgtgaccgtcgcgctgacgcgcaagggcatcacggaaacggagcggtacgacccggcgcgcatccgcgaggaatacggcttcgatcccgaccgcatccgcgacctcaaagggctgatgggcgacgcgtctgacaatcttcccggcgttcccggcgtcggtgagaaaaccgcactgaaactgctcaggcagtacggttcgctggagagcgtcctggaacacgcgtcggaaatcgccggaaagctcggtgaaaatctgcgggcgcacgccgacgccgcccgattgagcaagcggctggcgacgatcgactgcgcggtaccgttgcagtcgggatgggactggctgcgcctcggcgaaccggaccgcgccgcgctcgcctcgctgttgcggcagctcgaattcaagtcgctgttgaaacggctcggactcgacggcacgtccgccgatgccgacgtcgacggcgtccgttcctccgcgcggccggcggacgagaaacggccgagggccgtcgccgtcgctgaggagggcgtcgacgtccgctgtccggatcgcccggaagaagtcgaagaagcgctgtcgcggctggaagccgcccagtcggtcgtcgtcgaggtgacgggcgacaacccgcacgacggcgaagtgcgcggcgtcgcatggtgggacggacatacggcgtatttcattccgtttgaacggctggtgcagtccgacatgcggccgctggccgactggctcgccgacgcgcgtcggccgaagcgtacgcacgactcccatcgcgctgaagtggcgctgttctggcacggccttgcgtttcgcggcacgtcgttctgcacgcatatcgccgcctatttgctcgaccccacggaatcgcgccatacgctggcggacctgtcgcgccgctacggtctgccgccggtaccggaagccgaggacgtttacggcaagggcgcgaagttcaaggttcccgatcgcgacacgctggcgcgttacgtcggccgcaaggccgccctagtcgcgcggctcgttccgctgctcgaggcggatttggcggcctgcggcatgcgttcgcttttttacgacctggagctgccgctttcatccgaactcgccgtcatggagacggtcggcgtccgcgtcgacgcggcggcgctcgccgcctacggcgaggaattgcgcgaggcggcggcgaaagtcgagcgggagatttacgagctggccgggacgacgttcaacatcggatcgacgaaacagctcggcgaaattttgttcgataagctggggctgcccgtcgtcaagaaaacgaaaaccggctattccaccgacgcagacgtgctggaggaactggcgccgtaccatccgatcgtcgaaaagattttgcattaccgccaactgacgaaattgcagtcgacctacatcgaggggcttttgaaagaaatccgtccgcaaaccggtaaaatccatacgtattatcagcagacgatcgcggcgacggggcggctgagcagtcagtttcccaatcttcagaacattccgatccgtctcgaagaggggcggaaaatccgcaaggcgttcgttccgtcagaaccgggatggctgatgctcgccgccgactattcgcagatcgaactgcgcgtgctcgcgcacgtttccggcgacgaacggctgaaggaagcgtttcggacaggcatggacatccacacgaagaccgcgatggacgtgttcggcgtttccgaagaccgcgtcgacgcgcgcatgcggcggcaggcgaaggcggtcaatttcggcatcatctacggcatcagcgatttcggactggcgcaaaacctgaacatttcccgcaaggaggcggcggagttcatccggcaatatttcgccgtcttttcgggcgtcaaggcgtaccgcgagcggatcgtcgagcaggcgcgccgcgacggttacgtgacgaccctgctcggtcgcaggcgctatttgccggacatcaacgcgtcgaatcataacctccgctcgttcgcggagcggacggcgatgaatacgccgatccagggcacggccgccgacatcatcaagaccgcgatggtgcgtctgacgcggcggatgcgcgacgtcggactgaagagccgcatgctgctgcaggttcacgacgagctcgtgtttgaagtgccgccggacgagctcgacgcgatgcgggagcttgtgacggacgtcatggagtcggcggtcccgctcgacgtgccgctgaaggtcgacgtcagctggggcgccgactggtacgcggcgaagtgagggaagcgggatcc

SEQ ID NO: 1216 - DNA, 2792 bp, Artificial Sequence
  Description of Artificial Sequence: Synthetic Caldibacillus cellulovorans CompA.2 DNA Polymerase Y830I
atgaaatacctgctgccgaccgctgctgctggtctgctgctcctcgctgcccagccggcgatggccatgggcaaactgattctggtcgacggaaacagcgtcgccaaccgggcgttttacgccgtccggctgctcagcacgcgcggcggcctgcacacaaacgcggtgtacggattcgccaacatgttgctcaagctgatcgaggaggaacggccgacgcattttctcgtcgcgttcgacgcgggcaaggcgacgttccgtcatcgcgaatacgaggcctacaaggcgggtcgcctgcagacgccgcccgagctgtccgagcagtttccgtacatccgggagctcgtccgggcgttcggcgtcgcgtccggcgagctggaggaatacgaggcggacgacatgatcggtacgctggcgaaacgggcggaggccgagggcgtcgacacgctggtcgtcaccggcgaccgcgatttgctccagctcgtatcggaccgcgtgaccgtcgcgctgacgcgcaagggcatcacggaaacggagcggtacgacccggcgcgcatccgcgaggaatacggcttcgatcccgaccgcatccgcgacctcaaagggctgatgggcgacgcgtctgacaatcttcccggcgttcccggcgtcggtgagaaaaccgcactgaaactgctcaggcagtacggttcgctggagagcgtcctggaacacgcgtcggaaatcgccggaaagctcggtgaaaatctgcgggcgcacgccgacgccgcccgattgagcaagcggctggcgacgatcgactgcgcggtaccgttgcagtcgggatgggactggctgcgcctcggcgaaccggaccgcgccgcgctcgcctcgctgttgcggcagctcgaattcaagtcgctgttgaaacggctcggactcgacggcacgtccgccgatgccgacgtcgacggcgtccgttcctccgcgcggccggcggacgagaaacggccgagggccgtcgccgtcgctgaggagggcgtcgacgtccgctgtccggatcgcccggaagaagtcgaagaagcgctgtcgcggctggaagccgcccagtcggtcgtcgtcgaggtgacgggcgacaacccgcacgacggcgaagtgcgcggcgtcgcatggtgggacggacatacggcgtatttcattccgtttgaacggctggtgcagtccgacatgcggccgctggccgactggctcgccgacgcgcgtcggccgaagcgtacgcacgactcccatcgcgctgaagtggcgctgttctggcacggccttgcgtttcgcggcacgtcgttctgcacgcatatcgccgcctatttgctcgaccccacggaatcgcgccatacgctggcggacctgtcgcgccgctacggtctgccgccggtaccggaagccgaggacgtttacggcaagggcgcgaagttcaaggttcccgatcgcgacacgctggcgcgttacgtcggccgcaaggccgccctagtcgcgcggctcgttccgctgctcgaggcggatttggcggcctgcggcatgcgttcgcttttttacgacctggagctgccgctttcatccgaactcgccgtcatggagacggtcggcgtccgcgtcgacgcggcggcgctcgccgcctacggcgaggaattgcgcgaggcggcggcgaaagtcgagcgggagatttacgagctggccgggacgacgttcaacatcggatcgacgaaacagctcggcgaaattttgttcgataagctggggctgcccgtcgtcaagaaaacgaaaaccggctattccaccgacgcagacgtgctggaggaactggcgccgtaccatccgatcgtcgaaaagattttgcattaccgccaactgacgaaattgcagtcgacctacatcgaggggcttttgaaagaaatccgtccgcaaaccggtaaaatccatacgtattatcagcagacgatcgcggcgacggggcggctgagcagtcagtttcccaatcttcagaacattccgatccgtctcgaagaggggcggaaaatccgcaaggcgttcgttccgtcagaaccgggatggctgatgctcgccgccgactattcgcagatcgaactgcgcgtgctcgcgcacgtttccggcgacgaacggctgaaggaagcgtttcggacaggcatggacatccacacgaagaccgcgatggacgtgttcggcgtttccgaagaccgcgtcgacgcgcgcatgcggcggcaggcgaaggcggtcaatttcggcatcatctacggcatcagcgatttcggactggcgcaaaacctgaacatttcccgcaaggaggcggcggagttcatccggcaatatttcgccgtcttttcgggcgtcaaggcgtaccgcgagcggatcgtcgagcaggcgcgccgcgacggttacgtgacgaccctgctcggtcgcaggcgctatttgccggacatcaacgcgtcgaatattaacctccgctcgttcgcggagcggacggcgatgaatacgccgatccagggcacggccgccgacatcatcaagaccgcgatggtgcgtctgacgcggcggatgcgcgacgtcggactgaagagccgcatgctgctgcaggttcacgacgagctcgtgtttgaagtgccgccggacgagctcgacgcgatgcgggagcttgtgacggacgtcatggagtcggcggtcccgctcgacgtgccgctgaaggtcgacgtcagctggggcgccgactggtacgcggcgaagtgagggaagcgggatcc

SEQ ID NO: 1217 - DNA, 2792 bp, Artificial Sequence
  Description of Artificial Sequence: Synthetic Caldibacillus cellulovorans CompA.2 DNA Polymerase Y830L
atgaaatacctgctgccgaccgctgctgctggtctgctgctcctcgctgcccagccggcgatggccatgggcaaactgattctggtcgacggaaacagcgtcgccaaccgggcgttttacgccgtccggctgctcagcacgcgcggcggcctgcacacaaacgcggtgtacggattcgccaacatgttgctcaagctgatcgaggaggaacggccgacgcattttctcgtcgcgttcgacgcgggcaaggcgacgttccgtcatcgcgaatacgaggcctacaaggcgggtcgcctgcagacgccgcccgagctgtccgagcagtttccgtacatccgggagctcgtccgggcgttcggcgtcgcgtccggcgagctggaggaatacgaggcggacgacatgatcggtacgctggcgaaacgggcggaggccgagggcgtcgacacgctggtcgtcaccggcgaccgcgatttgctccagctcgtatcggaccgcgtgaccgtcgcgctgacgcgcaagggcatcacggaaacggagcggtacgacccggcgcgcatccgcgaggaatacggcttcgatcccgaccgcatccgcgacctcaaagggctgatgggcgacgcgtctgacaatcttcccggcgttcccggcgtcggtgagaaaaccgcactgaaactgctcaggcagtacggttcgctggagagcgtcctggaacacgcgtcggaaatcgccggaaagctcggtgaaaatctgcgggcgcacgccgacgccgcccgattgagcaagcggctggcgacgatcgactgcgcggtaccgttgcagtcgggatgggactggctgcgcctcggcgaaccggaccgcgccgcgctcgcctcgctgttgcggcagctcgaattcaagtcgctgttgaaacggctcggactcgacggcacgtccgccgatgccgacgtcgacggcgtccgttcctccgcgcggccggcggacgagaaacggccgagggccgtcgccgtcgctgaggagggcgtcgacgtccgctgtccggatcgcccggaagaagtcgaagaagcgctgtcgcggctggaagccgcccagtcggtcgtcgtcgaggtgacgggcgacaacccgcacgacggcgaagtgcgcggcgtcgcatggtgggacggacatacggcgtatttcattccgtttgaacggctggtgcagtccgacatgcggccgctggccgactggctcgccgacgcgcgtcggccgaagcgtacgcacgactcccatcgcgctgaagtggcgctgttctggcacggccttgcgtttcgcggcacgtcgttctgcacgcatatcgccgcctatttgctcgaccccacggaatcgcgccatacgctggcggacctgtcgcgccgctacggtctgccgccggtaccggaagccgaggacgtttacggcaagggcgcgaagttcaaggttcccgatcgcgacacgctggcgcgttacgtcggccgcaaggccgccctagtcgcgcggctcgttccgctgctcgaggcggatttggcggcctgcggcatgcgttcgcttttttacgacctggagctgccgctttcatccgaactcgccgtcatggagacggtcggcgtccgcgtcgacgcggcggcgctcgccgcctacggcgaggaattgcgcgaggcggcggcgaaagtcgagcgggagatttacgagctggccgggacgacgttcaacatcggatcgacgaaacagctcggcgaaattttgttcgataagctggggctgcccgtcgtcaagaaaacgaaaaccggctattccaccgacgcagacgtgctggaggaactggcgccgtaccatccgatcgtcgaaaagattttgcattaccgccaactgacgaaattgcagtcgacctacatcgaggggcttttgaaagaaatccgtccgcaaaccggtaaaatccatacgtattatcagcagacgatcgcggcgacggggcggctgagcagtcagtttcccaatcttcagaacattccgatccgtctcgaagaggggcggaaaatccgcaaggcgttcgttccgtcagaaccgggatggctgatgctcgccgccgactattcgcagatcgaactgcgcgtgctcgcgcacgtttccggcgacgaacggctgaaggaagcgtttcggacaggcatggacatccacacgaagaccgcgatggacgtgttcggcgtttccgaagaccgcgtcgacgcgcgcatgcggcggcaggcgaaggcggtcaatttcggcatcatctacggcatcagcgatttcggactggcgcaaaacctgaacatttcccgcaaggaggcggcggagttcatccggcaatatttcgccgtcttttcgggcgtcaaggcgtaccgcgagcggatcgtcgagcaggcgcgccgcgacggttacgtgacgaccctgctcggtcgcaggcgctatttgccggacatcaacgcgtcgaatcttaacctccgctcgttcgcggagcggacggcgatgaatacgccgatccagggcacggccgccgacatcatcaagaccgcgatggtgcgtctgacgcggcggatgcgcgacgtcggactgaagagccgcatgctgctgcaggttcacgacgagctcgtgtttgaagtgccgccggacgagctcgacgcgatgcgggagcttgtgacggacgtcatggagtcggcggtcccgctcgacgtgccgctgaaggtcgacgtcagctggggcgccgactggtacgcggcgaagtgagggaagcgggatcc

SEQ ID NO: 1218 - DNA, 2792 bp, Artificial Sequence
  Description of Artificial Sequence: Synthetic Caldibacillus cellulovorans CompA.2 DNA Polymerase Y830K
atgaaatacctgctgccgaccgctgctgctggtctgctgctcctcgctgcccagccggcgatggccatgggcaaactgattctggtcgacggaaacagcgtcgccaaccgggcgttttacgccgtccggctgctcagcacgcgcggcggcctgcacacaaacgcggtgtacggattcgccaacatgttgctcaagctgatcgaggaggaacggccgacgcattttctcgtcgcgttcgacgcgggcaaggcgacgttccgtcatcgcgaatacgaggcctacaaggcgggtcgcctgcagacgccgcccgagctgtccgagcagtttccgtacatccgggagctcgtccgggcgttcggcgtcgcgtccggcgagctggaggaatacgaggcggacgacatgatcggtacgctggcgaaacgggcggaggccgagggcgtcgacacgctggtcgtcaccggcgaccgcgatttgctccagctcgtatcggaccgcgtgaccgtcgcgctgacgcgcaagggcatcacggaaacggagcggtacgacccggcgcgcatccgcgaggaatacggcttcgatcccgaccgcatccgcgacctcaaagggctgatgggcgacgcgtctgacaatcttcccggcgttcccggcgtcggtgagaaaaccgcactgaaactgctcaggcagtacggttcgctggagagcgtcctggaacacgcgtcggaaatcgccggaaagctcggtgaaaatctgcgggcgcacgccgacgccgcccgattgagcaagcggctggcgacgatcgactgcgcggtaccgttgcagtcgggatgggactggctgcgcctcggcgaaccggaccgcgccgcgctcgcctcgctgttgcggcagctcgaattcaagtcgctgttgaaacggctcggactcgacggcacgtccgccgatgccgacgtcgacggcgtccgttcctccgcgcggccggcggacgagaaacggccgagggccgtcgccgtcgctgaggagggcgtcgacgtccgctgtccggatcgcccggaagaagtcgaagaagcgctgtcgcggctggaagccgcccagtcggtcgtcgtcgaggtgacgggcgacaacccgcacgacggcgaagtgcgcggcgtcgcatggtgggacggacatacggcgtatttcattccgtttgaacggctggtgcagtccgacatgcggccgctggccgactggctcgccgacgcgcgtcggccgaagcgtacgcacgactcccatcgcgctgaagtggcgctgttctggcacggccttgcgtttcgcggcacgtcgttctgcacgcatatcgccgcctatttgctcgaccccacggaatcgcgccatacgctggcggacctgtcgcgccgctacggtctgccgccggtaccggaagccgaggacgtttacggcaagggcgcgaagttcaaggttcccgatcgcgacacgctggcgcgttacgtcggccgcaaggccgccctagtcgcgcggctcgttccgctgctcgaggcggatttggcggcctgcggcatgcgttcgcttttttacgacctggagctgccgctttcatccgaactcgccgtcatggagacggtcggcgtccgcgtcgacgcggcggcgctcgccgcctacggcgaggaattgcgcgaggcggcggcgaaagtcgagcgggagatttacgagctggccgggacgacgttcaacatcggatcgacgaaacagctcggcgaaattttgttcgataagctggggctgcccgtcgtcaagaaaacgaaaaccggctattccaccgacgcagacgtgctggaggaactggcgccgtaccatccgatcgtcgaaaagattttgcattaccgccaactgacgaaattgcagtcgacctacatcgaggggcttttgaaagaaatccgtccgcaaaccggtaaaatccatacgtattatcagcagacgatcgcggcgacggggcggctgagcagtcagtttcccaatcttcagaacattccgatccgtctcgaagaggggcggaaaatccgcaaggcgttcgttccgtcagaaccgggatggctgatgctcgccgccgactattcgcagatcgaactgcgcgtgctcgcgcacgtttccggcgacgaacggctgaaggaagcgtttcggacaggcatggacatccacacgaagaccgcgatggacgtgttcggcgtttccgaagaccgcgtcgacgcgcgcatgcggcggcaggcgaaggcggtcaatttcggcatcatctacggcatcagcgatttcggactggcgcaaaacctgaacatttcccgcaaggaggcggcggagttcatccggcaatatttcgccgtcttttcgggcgtcaaggcgtaccgcgagcggatcgtcgagcaggcgcgccgcgacggttacgtgacgaccctgctcggtcgcaggcgctatttgccggacatcaacgcgtcgaataaaaacctccgctcgttcgcggagcggacggcgatgaatacgccgatccagggcacggccgccgacatcatcaagaccgcgatggtgcgtctgacgcggcggatgcgcgacgtcggactgaagagccgcatgctgctgcaggttcacgacgagctcgtgtttgaagtgccgccggacgagctcgacgcgatgcgggagcttgtgacggacgtcatggagtcggcggtcccgctcgacgtgccgctgaaggtcgacgtcagctggggcgccgactggtacgcggcgaagtgagggaagcgggatcc

SEQ ID NO: 1219 - DNA, 2792 bp, Artificial Sequence
  Description of Artificial Sequence: Synthetic Caldibacillus cellulovorans CompA.2 DNA Polymerase Y830M
atgaaatacctgctgccgaccgctgctgctggtctgctgctcctcgctgcccagccggcgatggccatgggcaaactgattctggtcgacggaaacagcgtcgccaaccgggcgttttacgccgtccggctgctcagcacgcgcggcggcctgcacacaaacgcggtgtacggattcgccaacatgttgctcaagctgatcgaggaggaacggccgacgcattttctcgtcgcgttcgacgcgggcaaggcgacgttccgtcatcgcgaatacgaggcctacaaggcgggtcgcctgcagacgccgcccgagctgtccgagcagtttccgtacatccgggagctcgtccgggcgttcggcgtcgcgtccggcgagctggaggaatacgaggcggacgacatgatcggtacgctggcgaaacgggcggaggccgagggcgtcgacacgctggtcgtcaccggcgaccgcgatttgctccagctcgtatcggaccgcgtgaccgtcgcgctgacgcgcaagggcatcacggaaacggagcggtacgacccggcgcgcatccgcgaggaatacggcttcgatcccgaccgcatccgcgacctcaaagggctgatgggcgacgcgtctgacaatcttcccggcgttcccggcgtcggtgagaaaaccgcactgaaactgctcaggcagtacggttcgctggagagcgtcctggaacacgcgtcggaaatcgccggaaagctcggtgaaaatctgcgggcgcacgccgacgccgcccgattgagcaagcggctggcgacgatcgactgcgcggtaccgttgcagtcgggatgggactggctgcgcctcggcgaaccggaccgcgccgcgctcgcctcgctgttgcggcagctcgaattcaagtcgctgttgaaacggctcggactcgacggcacgtccgccgatgccgacgtcgacggcgtccgttcctccgcgcggccggcggacgagaaacggccgagggccgtcgccgtcgctgaggagggcgtcgacgtccgctgtccggatcgcccggaagaagtcgaagaagcgctgtcgcggctggaagccgcccagtcggtcgtcgtcgaggtgacgggcgacaacccgcacgacggcgaagtgcgcggcgtcgcatggtgggacggacatacggcgtatttcattccgtttgaacggctggtgcagtccgacatgcggccgctggccgactggctcgccgacgcgcgtcggccgaagcgtacgcacgactcccatcgcgctgaagtggcgctgttctggcacggccttgcgtttcgcggcacgtcgttctgcacgcatatcgccgcctatttgctcgaccccacggaatcgcgccatacgctggcggacctgtcgcgccgctacggtctgccgccggtaccggaagccgaggacgtttacggcaagggcgcgaagttcaaggttcccgatcgcgacacgctggcgcgttacgtcggccgcaaggccgccctagtcgcgcggctcgttccgctgctcgaggcggatttggcggcctgcggcatgcgttcgcttttttacgacctggagctgccgctttcatccgaactcgccgtcatggagacggtcggcgtccgcgtcgacgcggcggcgctcgccgcctacggcgaggaattgcgcgaggcggcggcgaaagtcgagcgggagatttacgagctggccgggacgacgttcaacatcggatcgacgaaacagctcggcgaaattttgttcgataagctggggctgcccgtcgtcaagaaaacgaaaaccggctattccaccgacgcagacgtgctggaggaactggcgccgtaccatccgatcgtcgaaaagattttgcattaccgccaactgacgaaattgcagtcgacctacatcgaggggcttttgaaagaaatccgtccgcaaaccggtaaaatccatacgtattatcagcagacgatcgcggcgacggggcggctgagcagtcagtttcccaatcttcagaacattccgatccgtctcgaagaggggcggaaaatccgcaaggcgttcgttccgtcagaaccgggatggctgatgctcgccgccgactattcgcagatcgaactgcgcgtgctcgcgcacgtttccggcgacgaacggctgaaggaagcgtttcggacaggcatggacatccacacgaagaccgcgatggacgtgttcggcgtttccgaagaccgcgtcgacgcgcgcatgcggcggcaggcgaaggcggtcaatttcggcatcatctacggcatcagcgatttcggactggcgcaaaacctgaacatttcccgcaaggaggcggcggagttcatccggcaatatttcgccgtcttttcgggcgtcaaggcgtaccgcgagcggatcgtcgagcaggcgcgccgcgacggttacgtgacgaccctgctcggtcgcaggcgctatttgccggacatcaacgcgtcgaatatgaacctccgctcgttcgcggagcggacggcgatgaatacgccgatccagggcacggccgccgacatcatcaagaccgcgatggtgcgtctgacgcggcggatgcgcgacgtcggactgaagagccgcatgctgctgcaggttcacgacgagctcgtgtttgaagtgccgccggacgagctcgacgcgatgcgggagcttgtgacggacgtcatggagtcggcggtcccgctcgacgtgccgctgaaggtcgacgtcagctggggcgccgactggtacgcggcgaagtgagggaagcgggatcc

SEQ ID NO: 1220 - DNA, 2792 bp, Artificial Sequence
  Description of Artificial Sequence: Synthetic Caldibacillus cellulovorans CompA.2 DNA Polymerase Y830F
atgaaatacctgctgccgaccgctgctgctggtctgctgctcctcgctgcccagccggcgatggccatgggcaaactgattctggtcgacggaaacagcgtcgccaaccgggcgttttacgccgtccggctgctcagcacgcgcggcggcctgcacacaaacgcggtgtacggattcgccaacatgttgctcaagctgatcgaggaggaacggccgacgcattttctcgtcgcgttcgacgcgggcaaggcgacgttccgtcatcgcgaatacgaggcctacaaggcgggtcgcctgcagacgccgcccgagctgtccgagcagtttccgtacatccgggagctcgtccgggcgttcggcgtcgcgtccggcgagctggaggaatacgaggcggacgacatgatcggtacgctggcgaaacgggcggaggccgagggcgtcgacacgctggtcgtcaccggcgaccgcgatttgctccagctcgtatcggaccgcgtgaccgtcgcgctgacgcgcaagggcatcacggaaacggagcggtacgacccggcgcgcatccgcgaggaatacggcttcgatcccgaccgcatccgcgacctcaaagggctgatgggcgacgcgtctgacaatcttcccggcgttcccggcgtcggtgagaaaaccgcactgaaactgctcaggcagtacggttcgctggagagcgtcctggaacacgcgtcggaaatcgccggaaagctcggtgaaaatctgcgggcgcacgccgacgccgcccgattgagcaagcggctggcgacgatcgactgcgcggtaccgttgcagtcgggatgggactggctgcgcctcggcgaaccggaccgcgccgcgctcgcctcgctgttgcggcagctcgaattcaagtcgctgttgaaacggctcggactcgacggcacgtccgccgatgccgacgtcgacggcgtccgttcctccgcgcggccggcggacgagaaacggccgagggccgtcgccgtcgctgaggagggcgtcgacgtccgctgtccggatcgcccggaagaagtcgaagaagcgctgtcgcggctggaagccgcccagtcggtcgtcgtcgaggtgacgggcgacaacccgcacgacggcgaagtgcgcggcgtcgcatggtgggacggacatacggcgtatttcattccgtttgaacggctggtgcagtccgacatgcggccgctggccgactggctcgccgacgcgcgtcggccgaagcgtacgcacgactcccatcgcgctgaagtggcgctgttctggcacggccttgcgtttcgcggcacgtcgttctgcacgcatatcgccgcctatttgctcgaccccacggaatcgcgccatacgctggcggacctgtcgcgccgctacggtctgccgccggtaccggaagccgaggacgtttacggcaagggcgcgaagttcaaggttcccgatcgcgacacgctggcgcgttacgtcggccgcaaggccgccctagtcgcgcggctcgttccgctgctcgaggcggatttggcggcctgcggcatgcgttcgcttttttacgacctggagctgccgctttcatccgaactcgccgtcatggagacggtcggcgtccgcgtcgacgcggcggcgctcgccgcctacggcgaggaattgcgcgaggcggcggcgaaagtcgagcgggagatttacgagctggccgggacgacgttcaacatcggatcgacgaaacagctcggcgaaattttgttcgataagctggggctgcccgtcgtcaagaaaacgaaaaccggctattccaccgacgcagacgtgctggaggaactggcgccgtaccatccgatcgtcgaaaagattttgcattaccgccaactgacgaaattgcagtcgacctacatcgaggggcttttgaaagaaatccgtccgcaaaccggtaaaatccatacgtattatcagcagacgatcgcggcgacggggcggctgagcagtcagtttcccaatcttcagaacattccgatccgtctcgaagaggggcggaaaatccgcaaggcgttcgttccgtcagaaccgggatggctgatgctcgccgccgactattcgcagatcgaactgcgcgtgctcgcgcacgtttccggcgacgaacggctgaaggaagcgtttcggacaggcatggacatccacacgaagaccgcgatggacgtgttcggcgtttccgaagaccgcgtcgacgcgcgcatgcggcggcaggcgaaggcggtcaatttcggcatcatctacggcatcagcgatttcggactggcgcaaaacctgaacatttcccgcaaggaggcggcggagttcatccggcaatatttcgccgtcttttcgggcgtcaaggcgtaccgcgagcggatcgtcgagcaggcgcgccgcgacggttacgtgacgaccctgctcggtcgcaggcgctatttgccggacatcaacgcgtcgaattttaacctccgctcgttcgcggagcggacggcgatgaatacgccgatccagggcacggccgccgacatcatcaagaccgcgatggtgcgtctgacgcggcggatgcgcgacgtcggactgaagagccgcatgctgctgcaggttcacgacgagctcgtgtttgaagtgccgccggacgagctcgacgcgatgcgggagcttgtgacggacgtcatggagtcggcggtcccgctcgacgtgccgctgaaggtcgacgtcagctggggcgccgactggtacgcggcgaagtgagggaagcgggatcc

SEQ ID NO: 1221 - DNA, 2792 bp, Artificial Sequence
  Description of Artificial Sequence: Synthetic Caldibacillus cellulovorans CompA.2 DNA Polymerase Y830P
atgaaatacctgctgccgaccgctgctgctggtctgctgctcctcgctgcccagccggcgatggccatgggcaaactgattctggtcgacggaaacagcgtcgccaaccgggcgttttacgccgtccggctgctcagcacgcgcggcggcctgcacacaaacgcggtgtacggattcgccaacatgttgctcaagctgatcgaggaggaacggccgacgcattttctcgtcgcgttcgacgcgggcaaggcgacgttccgtcatcgcgaatacgaggcctacaaggcgggtcgcctgcagacgccgcccgagctgtccgagcagtttccgtacatccgggagctcgtccgggcgttcggcgtcgcgtccggcgagctggaggaatacgaggcggacgacatgatcggtacgctggcgaaacgggcggaggccgagggcgtcgacacgctggtcgtcaccggcgaccgcgatttgctccagctcgtatcggaccgcgtgaccgtcgcgctgacgcgcaagggcatcacggaaacggagcggtacgacccggcgcgcatccgcgaggaatacggcttcgatcccgaccgcatccgcgacctcaaagggctgatgggcgacgcgtctgacaatcttcccggcgttcccggcgtcggtgagaaaaccgcactgaaactgctcaggcagtacggttcgctggagagcgtcctggaacacgcgtcggaaatcgccggaaagctcggtgaaaatctgcgggcgcacgccgacgccgcccgattgagcaagcggctggcgacgatcgactgcgcggtaccgttgcagtcgggatgggactggctgcgcctcggcgaaccggaccgcgccgcgctcgcctcgctgttgcggcagctcgaattcaagtcgctgttgaaacggctcggactcgacggcacgtccgccgatgccgacgtcgacggcgtccgttcctccgcgcggccggcggacgagaaacggccgagggccgtcgccgtcgctgaggagggcgtcgacgtccgctgtccggatcgcccggaagaagtcgaagaagcgctgtcgcggctggaagccgcccagtcggtcgtcgtcgaggtgacgggcgacaacccgcacgacggcgaagtgcgcggcgtcgcatggtgggacggacatacggcgtatttcattccgtttgaacggctggtgcagtccgacatgcggccgctggccgactggctcgccgacgcgcgtcggccgaagcgtacgcacgactcccatcgcgctgaagtggcgctgttctggcacggccttgcgtttcgcggcacgtcgttctgcacgcatatcgccgcctatttgctcgaccccacggaatcgcgccatacgctggcggacctgtcgcgccgctacggtctgccgccggtaccggaagccgaggacgtttacggcaagggcgcgaagttcaaggttcccgatcgcgacacgctggcgcgttacgtcggccgcaaggccgccctagtcgcgcggctcgttccgctgctcgaggcggatttggcggcctgcggcatgcgttcgcttttttacgacctggagctgccgctttcatccgaactcgccgtcatggagacggtcggcgtccgcgtcgacgcggcggcgctcgccgcctacggcgaggaattgcgcgaggcggcggcgaaagtcgagcgggagatttacgagctggccgggacgacgttcaacatcggatcgacgaaacagctcggcgaaattttgttcgataagctggggctgcccgtcgtcaagaaaacgaaaaccggctattccaccgacgcagacgtgctggaggaactggcgccgtaccatccgatcgtcgaaaagattttgcattaccgccaactgacgaaattgcagtcgacctacatcgaggggcttttgaaagaaatccgtccgcaaaccggtaaaatccatacgtattatcagcagacgatcgcggcgacggggcggctgagcagtcagtttcccaatcttcagaacattccgatccgtctcgaagaggggcggaaaatccgcaaggcgttcgttccgtcagaaccgggatggctgatgctcgccgccgactattcgcagatcgaactgcgcgtgctcgcgcacgtttccggcgacgaacggctgaaggaagcgtttcggacaggcatggacatccacacgaagaccgcgatggacgtgttcggcgtttccgaagaccgcgtcgacgcgcgcatgcggcggcaggcgaaggcggtcaatttcggcatcatctacggcatcagcgatttcggactggcgcaaaacctgaacatttcccgcaaggaggcggcggagttcatccggcaatatttcgccgtcttttcgggcgtcaaggcgtaccgcgagcggatcgtcgagcaggcgcgccgcgacggttacgtgacgaccctgctcggtcgcaggcgctatttgccggacatcaacgcgtcgaatcctaacctccgctcgttcgcggagcggacggcgatgaatacgccgatccagggcacggccgccgacatcatcaagaccgcgatggtgcgtctgacgcggcggatgcgcgacgtcggactgaagagccgcatgctgctgcaggttcacgacgagctcgtgtttgaagtgccgccggacgagctcgacgcgatgcgggagcttgtgacggacgtcatggagtcggcggtcccgctcgacgtgccgctgaaggtcgacgtcagctggggcgccgactggtacgcggcgaagtgagggaagcgggatcc

SEQ ID NO: 1222 - DNA, 2792 bp, Artificial Sequence
  Description of Artificial Sequence: Synthetic Caldibacillus cellulovorans CompA.2 DNA Polymerase Y830S
atgaaatacctgctgccgaccgctgctgctggtctgctgctcctcgctgcccagccggcgatggccatgggcaaactgattctggtcgacggaaacagcgtcgccaaccgggcgttttacgccgtccggctgctcagcacgcgcggcggcctgcacacaaacgcggtgtacggattcgccaacatgttgctcaagctgatcgaggaggaacggccgacgcattttctcgtcgcgttcgacgcgggcaaggcgacgttccgtcatcgcgaatacgaggcctacaaggcgggtcgcctgcagacgccgcccgagctgtccgagcagtttccgtacatccgggagctcgtccgggcgttcggcgtcgcgtccggcgagctggaggaatacgaggcggacgacatgatcggtacgctggcgaaacgggcggaggccgagggcgtcgacacgctggtcgtcaccggcgaccgcgatttgctccagctcgtatcggaccgcgtgaccgtcgcgctgacgcgcaagggcatcacggaaacggagcggtacgacccggcgcgcatccgcgaggaatacggcttcgatcccgaccgcatccgcgacctcaaagggctgatgggcgacgcgtctgacaatcttcccggcgttcccggcgtcggtgagaaaaccgcactgaaactgctcaggcagtacggttcgctggagagcgtcctggaacacgcgtcggaaatcgccggaaagctcggtgaaaatctgcgggcgcacgccgacgccgcccgattgagcaagcggctggcgacgatcgactgcgcggtaccgttgcagtcgggatgggactggctgcgcctcggcgaaccggaccgcgccgcgctcgcctcgctgttgcggcagctcgaattcaagtcgctgttgaaacggctcggactcgacggcacgtccgccgatgccgacgtcgacggcgtccgttcctccgcgcggccggcggacgagaaacggccgagggccgtcgccgtcgctgaggagggcgtcgacgtccgctgtccggatcgcccggaagaagtcgaagaagcgctgtcgcggctggaagccgcccagtcggtcgtcgtcgaggtgacgggcgacaacccgcacgacggcgaagtgcgcggcgtcgcatggtgggacggacatacggcgtatttcattccgtttgaacggctggtgcagtccgacatgcggccgctggccgactggctcgccgacgcgcgtcggccgaagcgtacgcacgactcccatcgcgctgaagtggcgctgttctggcacggccttgcgtttcgcggcacgtcgttctgcacgcatatcgccgcctatttgctcgaccccacggaatcgcgccatacgctggcggacctgtcgcgccgctacggtctgccgccggtaccggaagccgaggacgtttacggcaagggcgcgaagttcaaggttcccgatcgcgacacgctggcgcgttacgtcggccgcaaggccgccctagtcgcgcggctcgttccgctgctcgaggcggatttggcggcctgcggcatgcgttcgcttttttacgacctggagctgccgctttcatccgaactcgccgtcatggagacggtcggcgtccgcgtcgacgcggcggcgctcgccgcctacggcgaggaattgcgcgaggcggcggcgaaagtcgagcgggagatttacgagctggccgggacgacgttcaacatcggatcgacgaaacagctcggcgaaattttgttcgataagctggggctgcccgtcgtcaagaaaacgaaaaccggctattccaccgacgcagacgtgctggaggaactggcgccgtaccatccgatcgtcgaaaagattttgcattaccgccaactgacgaaattgcagtcgacctacatcgaggggcttttgaaagaaatccgtccgcaaaccggtaaaatccatacgtattatcagcagacgatcgcggcgacggggcggctgagcagtcagtttcccaatcttcagaacattccgatccgtctcgaagaggggcggaaaatccgcaaggcgttcgttccgtcagaaccgggatggctgatgctcgccgccgactattcgcagatcgaactgcgcgtgctcgcgcacgtttccggcgacgaacggctgaaggaagcgtttcggacaggcatggacatccacacgaagaccgcgatggacgtgttcggcgtttccgaagaccgcgtcgacgcgcgcatgcggcggcaggcgaaggcggtcaatttcggcatcatctacggcatcagcgatttcggactggcgcaaaacctgaacatttcccgcaaggaggcggcggagttcatccggcaatatttcgccgtcttttcgggcgtcaaggcgtaccgcgagcggatcgtcgagcaggcgcgccgcgacggttacgtgacgaccctgctcggtcgcaggcgctatttgccggacatcaacgcgtcgaattctaacctccgctcgttcgcggagcggacggcgatgaatacgccgatccagggcacggccgccgacatcatcaagaccgcgatggtgcgtctgacgcggcggatgcgcgacgtcggactgaagagccgcatgctgctgcaggttcacgacgagctcgtgtttgaagtgccgccggacgagctcgacgcgatgcgggagcttgtgacggacgtcatggagtcggcggtcccgctcgacgtgccgctgaaggtcgacgtcagctggggcgccgactggtacgcggcgaagtgagggaagcgggatcc

SEQ ID NO: 1223 - DNA, 2792 bp, Artificial Sequence
  Description of Artificial Sequence: Synthetic Caldibacillus cellulovorans CompA.2 DNA Polymerase Y830T
atgaaatacctgctgccgaccgctgctgctggtctgctgctcctcgctgcccagccggcgatggccatgggcaaactgattctggtcgacggaaacagcgtcgccaaccgggcgttttacgccgtccggctgctcagcacgcgcggcggcctgcacacaaacgcggtgtacggattcgccaacatgttgctcaagctgatcgaggaggaacggccgacgcattttctcgtcgcgttcgacgcgggcaaggcgacgttccgtcatcgcgaatacgaggcctacaaggcgggtcgcctgcagacgccgcccgagctgtccgagcagtttccgtacatccgggagctcgtccgggcgttcggcgtcgcgtccggcgagctggaggaatacgaggcggacgacatgatcggtacgctggcgaaacgggcggaggccgagggcgtcgacacgctggtcgtcaccggcgaccgcgatttgctccagctcgtatcggaccgcgtgaccgtcgcgctgacgcgcaagggcatcacggaaacggagcggtacgacccggcgcgcatccgcgaggaatacggcttcgatcccgaccgcatccgcgacctcaaagggctgatgggcgacgcgtctgacaatcttcccggcgttcccggcgtcggtgagaaaaccgcactgaaactgctcaggcagtacggttcgctggagagcgtcctggaacacgcgtcggaaatcgccggaaagctcggtgaaaatctgcgggcgcacgccgacgccgcccgattgagcaagcggctggcgacgatcgactgcgcggtaccgttgcagtcgggatgggactggctgcgcctcggcgaaccggaccgcgccgcgctcgcctcgctgttgcggcagctcgaattcaagtcgctgttgaaacggctcggactcgacggcacgtccgccgatgccgacgtcgacggcgtccgttcctccgcgcggccggcggacgagaaacggccgagggccgtcgccgtcgctgaggagggcgtcgacgtccgctgtccggatcgcccggaagaagtcgaagaagcgctgtcgcggctggaagccgcccagtcggtcgtcgtcgaggtgacgggcgacaacccgcacgacggcgaagtgcgcggcgtcgcatggtgggacggacatacggcgtatttcattccgtttgaacggctggtgcagtccgacatgcggccgctggccgactggctcgccgacgcgcgtcggccgaagcgtacgcacgactcccatcgcgctgaagtggcgctgttctggcacggccttgcgtttcgcggcacgtcgttctgcacgcatatcgccgcctatttgctcgaccccacggaatcgcgccatacgctggcggacctgtcgcgccgctacggtctgccgccggtaccggaagccgaggacgtttacggcaagggcgcgaagttcaaggttcccgatcgcgacacgctggcgcgttacgtcggccgcaaggccgccctagtcgcgcggctcgttccgctgctcgaggcggatttggcggcctgcggcatgcgttcgcttttttacgacctggagctgccgctttcatccgaactcgccgtcatggagacggtcggcgtccgcgtcgacgcggcggcgctcgccgcctacggcgaggaattgcgcgaggcggcggcgaaagtcgagcgggagatttacgagctggccgggacgacgttcaacatcggatcgacgaaacagctcggcgaaattttgttcgataagctggggctgcccgtcgtcaagaaaacgaaaaccggctattccaccgacgcagacgtgctggaggaactggcgccgtaccatccgatcgtcgaaaagattttgcattaccgccaactgacgaaattgcagtcgacctacatcgaggggcttttgaaagaaatccgtccgcaaaccggtaaaatccatacgtattatcagcagacgatcgcggcgacggggcggctgagcagtcagtttcccaatcttcagaacattccgatccgtctcgaagaggggcggaaaatccgcaaggcgttcgttccgtcagaaccgggatggctgatgctcgccgccgactattcgcagatcgaactgcgcgtgctcgcgcacgtttccggcgacgaacggctgaaggaagcgtttcggacaggcatggacatccacacgaagaccgcgatggacgtgttcggcgtttccgaagaccgcgtcgacgcgcgcatgcggcggcaggcgaaggcggtcaatttcggcatcatctacggcatcagcgatttcggactggcgcaaaacctgaacatttcccgcaaggaggcggcggagttcatccggcaatatttcgccgtcttttcgggcgtcaaggcgtaccgcgagcggatcgtcgagcaggcgcgccgcgacggttacgtgacgaccctgctcggtcgcaggcgctatttgccggacatcaacgcgtcgaatactaacctccgctcgttcgcggagcggacggcgatgaatacgccgatccagggcacggccgccgacatcatcaagaccgcgatggtgcgtctgacgcggcggatgcgcgacgtcggactgaagagccgcatgctgctgcaggttcacgacgagctcgtgtttgaagtgccgccggacgagctcgacgcgatgcgggagcttgtgacggacgtcatggagtcggcggtcccgctcgacgtgccgctgaaggtcgacgtcagctggggcgccgactggtacgcggcgaagtgagggaagcgggatcc

SEQ ID NO: 1224 - DNA, 2792 bp, Artificial Sequence
  Description of Artificial Sequence: Synthetic Caldibacillus cellulovorans CompA.2 DNA Polymerase Y830W
atgaaatacctgctgccgaccgctgctgctggtctgctgctcctcgctgcccagccggcgatggccatgggcaaactgattctggtcgacggaaacagcgtcgccaaccgggcgttttacgccgtccggctgctcagcacgcgcggcggcctgcacacaaacgcggtgtacggattcgccaacatgttgctcaagctgatcgaggaggaacggccgacgcattttctcgtcgcgttcgacgcgggcaaggcgacgttccgtcatcgcgaatacgaggcctacaaggcgggtcgcctgcagacgccgcccgagctgtccgagcagtttccgtacatccgggagctcgtccgggcgttcggcgtcgcgtccggcgagctggaggaatacgaggcggacgacatgatcggtacgctggcgaaacgggcggaggccgagggcgtcgacacgctggtcgtcaccggcgaccgcgatttgctccagctcgtatcggaccgcgtgaccgtcgcgctgacgcgcaagggcatcacggaaacggagcggtacgacccggcgcgcatccgcgaggaatacggcttcgatcccgaccgcatccgcgacctcaaagggctgatgggcgacgcgtctgacaatcttcccggcgttcccggcgtcggtgagaaaaccgcactgaaactgctcaggcagtacggttcgctggagagcgtcctggaacacgcgtcggaaatcgccggaaagctcggtgaaaatctgcgggcgcacgccgacgccgcccgattgagcaagcggctggcgacgatcgactgcgcggtaccgttgcagtcgggatgggactggctgcgcctcggcgaaccggaccgcgccgcgctcgcctcgctgttgcggcagctcgaattcaagtcgctgttgaaacggctcggactcgacggcacgtccgccgatgccgacgtcgacggcgtccgttcctccgcgcggccggcggacgagaaacggccgagggccgtcgccgtcgctgaggagggcgtcgacgtccgctgtccggatcgcccggaagaagtcgaagaagcgctgtcgcggctggaagccgcccagtcggtcgtcgtcgaggtgacgggcgacaacccgcacgacggcgaagtgcgcggcgtcgcatggtgggacggacatacggcgtatttcattccgtttgaacggctggtgcagtccgacatgcggccgctggccgactggctcgccgacgcgcgtcggccgaagcgtacgcacgactcccatcgcgctgaagtggcgctgttctggcacggccttgcgtttcgcggcacgtcgttctgcacgcatatcgccgcctatttgctcgaccccacggaatcgcgccatacgctggcggacctgtcgcgccgctacggtctgccgccggtaccggaagccgaggacgtttacggcaagggcgcgaagttcaaggttcccgatcgcgacacgctggcgcgttacgtcggccgcaaggccgccctagtcgcgcggctcgttccgctgctcgaggcggatttggcggcctgcggcatgcgttcgcttttttacgacctggagctgccgctttcatccgaactcgccgtcatggagacggtcggcgtccgcgtcgacgcggcggcgctcgccgcctacggcgaggaattgcgcgaggcggcggcgaaagtcgagcgggagatttacgagctggccgggacgacgttcaacatcggatcgacgaaacagctcggcgaaattttgttcgataagctggggctgcccgtcgtcaagaaaacgaaaaccggctattccaccgacgcagacgtgctggaggaactggcgccgtaccatccgatcgtcgaaaagattttgcattaccgccaactgacgaaattgcagtcgacctacatcgaggggcttttgaaagaaatccgtccgcaaaccggtaaaatccatacgtattatcagcagacgatcgcggcgacggggcggctgagcagtcagtttcccaatcttcagaacattccgatccgtctcgaagaggggcggaaaatccgcaaggcgttcgttccgtcagaaccgggatggctgatgctcgccgccgactattcgcagatcgaactgcgcgtgctcgcgcacgtttccggcgacgaacggctgaaggaagcgtttcggacaggcatggacatccacacgaagaccgcgatggacgtgttcggcgtttccgaagaccgcgtcgacgcgcgcatgcggcggcaggcgaaggcggtcaatttcggcatcatctacggcatcagcgatttcggactggcgcaaaacctgaacatttcccgcaaggaggcggcggagttcatccggcaatatttcgccgtcttttcgggcgtcaaggcgtaccgcgagcggatcgtcgagcaggcgcgccgcgacggttacgtgacgaccctgctcggtcgcaggcgctatttgccggacatcaacgcgtcgaattggaacctccgctcgttcgcggagcggacggcgatgaatacgccgatccagggcacggccgccgacatcatcaagaccgcgatggtgcgtctgacgcggcggatgcgcgacgtcggactgaagagccgcatgctgctgcaggttcacgacgagctcgtgtttgaagtgccgccggacgagctcgacgcgatgcgggagcttgtgacggacgtcatggagtcggcggtcccgctcgacgtgccgctgaaggtcgacgtcagctggggcgccgactggtacgcggcgaagtgagggaagcgggatcc

SEQ ID NO: 1225 - DNA, 2792 bp, Artificial Sequence
  Description of Artificial Sequence: Synthetic Caldibacillus cellulovorans CompA.2 DNA Polymerase Y830V
atgaaatacctgctgccgaccgctgctgctggtctgctgctcctcgctgcccagccggcgatggccatgggcaaactgattctggtcgacggaaacagcgtcgccaaccgggcgttttacgccgtccggctgctcagcacgcgcggcggcctgcacacaaacgcggtgtacggattcgccaacatgttgctcaagctgatcgaggaggaacggccgacgcattttctcgtcgcgttcgacgcgggcaaggcgacgttccgtcatcgcgaatacgaggcctacaaggcgggtcgcctgcagacgccgcccgagctgtccgagcagtttccgtacatccgggagctcgtccgggcgttcggcgtcgcgtccggcgagctggaggaatacgaggcggacgacatgatcggtacgctggcgaaacgggcggaggccgagggcgtcgacacgctggtcgtcaccggcgaccgcgatttgctccagctcgtatcggaccgcgtgaccgtcgcgctgacgcgcaagggcatcacggaaacggagcggtacgacccggcgcgcatccgcgaggaatacggcttcgatcccgaccgcatccgcgacctcaaagggctgatgggcgacgcgtctgacaatcttcccggcgttcccggcgtcggtgagaaaaccgcactgaaactgctcaggcagtacggttcgctggagagcgtcctggaacacgcgtcggaaatcgccggaaagctcggtgaaaatctgcgggcgcacgccgacgccgcccgattgagcaagcggctggcgacgatcgactgcgcggtaccgttgcagtcgggatgggactggctgcgcctcggcgaaccggaccgcgccgcgctcgcctcgctgttgcggcagctcgaattcaagtcgctgttgaaacggctcggactcgacggcacgtccgccgatgccgacgtcgacggcgtccgttcctccgcgcggccggcggacgagaaacggccgagggccgtcgccgtcgctgaggagggcgtcgacgtccgctgtccggatcgcccggaagaagtcgaagaagcgctgtcgcggctggaagccgcccagtcggtcgtcgtcgaggtgacgggcgacaacccgcacgacggcgaagtgcgcggcgtcgcatggtgggacggacatacggcgtatttcattccgtttgaacggctggtgcagtccgacatgcggccgctggccgactggctcgccgacgcgcgtcggccgaagcgtacgcacgactcccatcgcgctgaagtggcgctgttctggcacggccttgcgtttcgcggcacgtcgttctgcacgcatatcgccgcctatttgctcgaccccacggaatcgcgccatacgctggcggacctgtcgcgccgctacggtctgccgccggtaccggaagccgaggacgtttacggcaagggcgcgaagttcaaggttcccgatcgcgacacgctggcgcgttacgtcggccgcaaggccgccctagtcgcgcggctcgttccgctgctcgaggcggatttggcggcctgcggcatgcgttcgcttttttacgacctggagctgccgctttcatccgaactcgccgtcatggagacggtcggcgtccgcgtcgacgcggcggcgctcgccgcctacggcgaggaattgcgcgaggcggcggcgaaagtcgagcgggagatttacgagctggccgggacgacgttcaacatcggatcgacgaaacagctcggcgaaattttgttcgataagctggggctgcccgtcgtcaagaaaacgaaaaccggctattccaccgacgcagacgtgctggaggaactggcgccgtaccatccgatcgtcgaaaagattttgcattaccgccaactgacgaaattgcagtcgacctacatcgaggggcttttgaaagaaatccgtccgcaaaccggtaaaatccatacgtattatcagcagacgatcgcggcgacggggcggctgagcagtcagtttcccaatcttcagaacattccgatccgtctcgaagaggggcggaaaatccgcaaggcgttcgttccgtcagaaccgggatggctgatgctcgccgccgactattcgcagatcgaactgcgcgtgctcgcgcacgtttccggcgacgaacggctgaaggaagcgtttcggacaggcatggacatccacacgaagaccgcgatggacgtgttcggcgtttccgaagaccgcgtcgacgcgcgcatgcggcggcaggcgaaggcggtcaatttcggcatcatctacggcatcagcgatttcggactggcgcaaaacctgaacatttcccgcaaggaggcggcggagttcatccggcaatatttcgccgtcttttcgggcgtcaaggcgtaccgcgagcggatcgtcgagcaggcgcgccgcgacggttacgtgacgaccctgctcggtcgcaggcgctatttgccggacatcaacgcgtcgaatgttaacctccgctcgttcgcggagcggacggcgatgaatacgccgatccagggcacggccgccgacatcatcaagaccgcgatggtgcgtctgacgcggcggatgcgcgacgtcggactgaagagccgcatgctgctgcaggttcacgacgagctcgtgtttgaagtgccgccggacgagctcgacgcgatgcgggagcttgtgacggacgtcatggagtcggcggtcccgctcgacgtgccgctgaaggtcgacgtcagctggggcgccgactggtacgcggcgaagtgagggaagcgggatcc

SEQ ID NO: 1226 - DNA, 2792 bp, Artificial Sequence
  Description of Artificial Sequence: Synthetic Caldibacillus cellulovorans CompA.2 DNA Polymerase N831A
atgaaatacctgctgccgaccgctgctgctggtctgctgctcctcgctgcccagccggcgatggccatgggcaaactgattctggtcgacggaaacagcgtcgccaaccgggcgttttacgccgtccggctgctcagcacgcgcggcggcctgcacacaaacgcggtgtacggattcgccaacatgttgctcaagctgatcgaggaggaacggccgacgcattttctcgtcgcgttcgacgcgggcaaggcgacgttccgtcatcgcgaatacgaggcctacaaggcgggtcgcctgcagacgccgcccgagctgtccgagcagtttccgtacatccgggagctcgtccgggcgttcggcgtcgcgtccggcgagctggaggaatacgaggcggacgacatgatcggtacgctggcgaaacgggcggaggccgagggcgtcgacacgctggtcgtcaccggcgaccgcgatttgctccagctcgtatcggaccgcgtgaccgtcgcgctgacgcgcaagggcatcacggaaacggagcggtacgacccggcgcgcatccgcgaggaatacggcttcgatcccgaccgcatccgcgacctcaaagggctgatgggcgacgcgtctgacaatcttcccggcgttcccggcgtcggtgagaaaaccgcactgaaactgctcaggcagtacggttcgctggagagcgtcctggaacacgcgtcggaaatcgccggaaagctcggtgaaaatctgcgggcgcacgccgacgccgcccgattgagcaagcggctggcgacgatcgactgcgcggtaccgttgcagtcgggatgggactggctgcgcctcggcgaaccggaccgcgccgcgctcgcctcgctgttgcggcagctcgaattcaagtcgctgttgaaacggctcggactcgacggcacgtccgccgatgccgacgtcgacggcgtccgttcctccgcgcggccggcggacgagaaacggccgagggccgtcgccgtcgctgaggagggcgtcgacgtccgctgtccggatcgcccggaagaagtcgaagaagcgctgtcgcggctggaagccgcccagtcggtcgtcgtcgaggtgacgggcgacaacccgcacgacggcgaagtgcgcggcgtcgcatggtgggacggacatacggcgtatttcattccgtttgaacggctggtgcagtccgacatgcggccgctggccgactggctcgccgacgcgcgtcggccgaagcgtacgcacgactcccatcgcgctgaagtggcgctgttctggcacggccttgcgtttcgcggcacgtcgttctgcacgcatatcgccgcctatttgctcgaccccacggaatcgcgccatacgctggcggacctgtcgcgccgctacggtctgccgccggtaccggaagccgaggacgtttacggcaagggcgcgaagttcaaggttcccgatcgcgacacgctggcgcgttacgtcggccgcaaggccgccctagtcgcgcggctcgttccgctgctcgaggcggatttggcggcctgcggcatgcgttcgcttttttacgacctggagctgccgctttcatccgaactcgccgtcatggagacggtcggcgtccgcgtcgacgcggcggcgctcgccgcctacggcgaggaattgcgcgaggcggcggcgaaagtcgagcgggagatttacgagctggccgggacgacgttcaacatcggatcgacgaaacagctcggcgaaattttgttcgataagctggggctgcccgtcgtcaagaaaacgaaaaccggctattccaccgacgcagacgtgctggaggaactggcgccgtaccatccgatcgtcgaaaagattttgcattaccgccaactgacgaaattgcagtcgacctacatcgaggggcttttgaaagaaatccgtccgcaaaccggtaaaatccatacgtattatcagcagacgatcgcggcgacggggcggctgagcagtcagtttcccaatcttcagaacattccgatccgtctcgaagaggggcggaaaatccgcaaggcgttcgttccgtcagaaccgggatggctgatgctcgccgccgactattcgcagatcgaactgcgcgtgctcgcgcacgtttccggcgacgaacggctgaaggaagcgtttcggacaggcatggacatccacacgaagaccgcgatggacgtgttcggcgtttccgaagaccgcgtcgacgcgcgcatgcggcggcaggcgaaggcggtcaatttcggcatcatctacggcatcagcgatttcggactggcgcaaaacctgaacatttcccgcaaggaggcggcggagttcatccggcaatatttcgccgtcttttcgggcgtcaaggcgtaccgcgagcggatcgtcgagcaggcgcgccgcgacggttacgtgacgaccctgctcggtcgcaggcgctatttgccggacatcaacgcgtcgaattacgctctccgctcgttcgcggagcggacggcgatgaatacgccgatccagggcacggccgccgacatcatcaagaccgcgatggtgcgtctgacgcggcggatgcgcgacgtcggactgaagagccgcatgctgctgcaggttcacgacgagctcgtgtttgaagtgccgccggacgagctcgacgcgatgcgggagcttgtgacggacgtcatggagtcggcggtcccgctcgacgtgccgctgaaggtcgacgtcagctggggcgccgactggtacgcggcgaagtgagggaagcgggatcc

SEQ ID NO: 1227 - DNA, 2792 bp, Artificial Sequence
  Description of Artificial Sequence: Synthetic Caldibacillus cellulovorans CompA.2 DNA Polymerase N831R
atgaaatacctgctgccgaccgctgctgctggtctgctgctcctcgctgcccagccggcgatggccatgggcaaactgattctggtcgacggaaacagcgtcgccaaccgggcgttttacgccgtccggctgctcagcacgcgcggcggcctgcacacaaacgcggtgtacggattcgccaacatgttgctcaagctgatcgaggaggaacggccgacgcattttctcgtcgcgttcgacgcgggcaaggcgacgttccgtcatcgcgaatacgaggcctacaaggcgggtcgcctgcagacgccgcccgagctgtccgagcagtttccgtacatccgggagctcgtccgggcgttcggcgtcgcgtccggcgagctggaggaatacgaggcggacgacatgatcggtacgctggcgaaacgggcggaggccgagggcgtcgacacgctggtcgtcaccggcgaccgcgatttgctccagctcgtatcggaccgcgtgaccgtcgcgctgacgcgcaagggcatcacggaaacggagcggtacgacccggcgcgcatccgcgaggaatacggcttcgatcccgaccgcatccgcgacctcaaagggctgatgggcgacgcgtctgacaatcttcccggcgttcccggcgtcggtgagaaaaccgcactgaaactgctcaggcagtacggttcgctggagagcgtcctggaacacgcgtcggaaatcgccggaaagctcggtgaaaatctgcgggcgcacgccgacgccgcccgattgagcaagcggctggcgacgatcgactgcgcggtaccgttgcagtcgggatgggactggctgcgcctcggcgaaccggaccgcgccgcgctcgcctcgctgttgcggcagctcgaattcaagtcgctgttgaaacggctcggactcgacggcacgtccgccgatgccgacgtcgacggcgtccgttcctccgcgcggccggcggacgagaaacggccgagggccgtcgccgtcgctgaggagggcgtcgacgtccgctgtccggatcgcccggaagaagtcgaagaagcgctgtcgcggctggaagccgcccagtcggtcgtcgtcgaggtgacgggcgacaacccgcacgacggcgaagtgcgcggcgtcgcatggtgggacggacatacggcgtatttcattccgtttgaacggctggtgcagtccgacatgcggccgctggccgactggctcgccgacgcgcgtcggccgaagcgtacgcacgactcccatcgcgctgaagtggcgctgttctggcacggccttgcgtttcgcggcacgtcgttctgcacgcatatcgccgcctatttgctcgaccccacggaatcgcgccatacgctggcggacctgtcgcgccgctacggtctgccgccggtaccggaagccgaggacgtttacggcaagggcgcgaagttcaaggttcccgatcgcgacacgctggcgcgttacgtcggccgcaaggccgccctagtcgcgcggctcgttccgctgctcgaggcggatttggcggcctgcggcatgcgttcgcttttttacgacctggagctgccgctttcatccgaactcgccgtcatggagacggtcggcgtccgcgtcgacgcggcggcgctcgccgcctacggcgaggaattgcgcgaggcggcggcgaaagtcgagcgggagatttacgagctggccgggacgacgttcaacatcggatcgacgaaacagctcggcgaaattttgttcgataagctggggctgcccgtcgtcaagaaaacgaaaaccggctattccaccgacgcagacgtgctggaggaactggcgccgtaccatccgatcgtcgaaaagattttgcattaccgccaactgacgaaattgcagtcgacctacatcgaggggcttttgaaagaaatccgtccgcaaaccggtaaaatccatacgtattatcagcagacgatcgcggcgacggggcggctgagcagtcagtttcccaatcttcagaacattccgatccgtctcgaagaggggcggaaaatccgcaaggcgttcgttccgtcagaaccgggatggctgatgctcgccgccgactattcgcagatcgaactgcgcgtgctcgcgcacgtttccggcgacgaacggctgaaggaagcgtttcggacaggcatggacatccacacgaagaccgcgatggacgtgttcggcgtttccgaagaccgcgtcgacgcgcgcatgcggcggcaggcgaaggcggtcaatttcggcatcatctacggcatcagcgatttcggactggcgcaaaacctgaacatttcccgcaaggaggcggcggagttcatccggcaatatttcgccgtcttttcgggcgtcaaggcgtaccgcgagcggatcgtcgagcaggcgcgccgcgacggttacgtgacgaccctgctcggtcgcaggcgctatttgccggacatcaacgcgtcgaattaccgtctccgctcgttcgcggagcggacggcgatgaatacgccgatccagggcacggccgccgacatcatcaagaccgcgatggtgcgtctgacgcggcggatgcgcgacgtcggactgaagagccgcatgctgctgcaggttcacgacgagctcgtgtttgaagtgccgccggacgagctcgacgcgatgcgggagcttgtgacggacgtcatggagtcggcggtcccgctcgacgtgccgctgaaggtcgacgtcagctggggcgccgactggtacgcggcgaagtgagggaagcgggatcc

SEQ ID NO: 1228 - DNA, 2792 bp, Artificial Sequence
  Description of Artificial Sequence: Synthetic Caldibacillus cellulovorans CompA.2 DNA Polymerase N831D
atgaaatacctgctgccgaccgctgctgctggtctgctgctcctcgctgcccagccggcgatggccatgggcaaactgattctggtcgacggaaacagcgtcgccaaccgggcgttttacgccgtccggctgctcagcacgcgcggcggcctgcacacaaacgcggtgtacggattcgccaacatgttgctcaagctgatcgaggaggaacggccgacgcattttctcgtcgcgttcgacgcgggcaaggcgacgttccgtcatcgcgaatacgaggcctacaaggcgggtcgcctgcagacgccgcccgagctgtccgagcagtttccgtacatccgggagctcgtccgggcgttcggcgtcgcgtccggcgagctggaggaatacgaggcggacgacatgatcggtacgctggcgaaacgggcggaggccgagggcgtcgacacgctggtcgtcaccggcgaccgcgatttgctccagctcgtatcggaccgcgtgaccgtcgcgctgacgcgcaagggcatcacggaaacggagcggtacgacccggcgcgcatccgcgaggaatacggcttcgatcccgaccgcatccgcgacctcaaagggctgatgggcgacgcgtctgacaatcttcccggcgttcccggcgtcggtgagaaaaccgcactgaaactgctcaggcagtacggttcgctggagagcgtcctggaacacgcgtcggaaatcgccggaaagctcggtgaaaatctgcgggcgcacgccgacgccgcccgattgagcaagcggctggcgacgatcgactgcgcggtaccgttgcagtcgggatgggactggctgcgcctcggcgaaccggaccgcgccgcgctcgcctcgctgttgcggcagctcgaattcaagtcgctgttgaaacggctcggactcgacggcacgtccgccgatgccgacgtcgacggcgtccgttcctccgcgcggccggcggacgagaaacggccgagggccgtcgccgtcgctgaggagggcgtcgacgtccgctgtccggatcgcccggaagaagtcgaagaagcgctgtcgcggctggaagccgcccagtcggtcgtcgtcgaggtgacgggcgacaacccgcacgacggcgaagtgcgcggcgtcgcatggtgggacggacatacggcgtatttcattccgtttgaacggctggtgcagtccgacatgcggccgctggccgactggctcgccgacgcgcgtcggccgaagcgtacgcacgactcccatcgcgctgaagtggcgctgttctggcacggccttgcgtttcgcggcacgtcgttctgcacgcatatcgccgcctatttgctcgaccccacggaatcgcgccatacgctggcggacctgtcgcgccgctacggtctgccgccggtaccggaagccgaggacgtttacggcaagggcgcgaagttcaaggttcccgatcgcgacacgctggcgcgttacgtcggccgcaaggccgccctagtcgcgcggctcgttccgctgctcgaggcggatttggcggcctgcggcatgcgttcgcttttttacgacctggagctgccgctttcatccgaactcgccgtcatggagacggtcggcgtccgcgtcgacgcggcggcgctcgccgcctacggcgaggaattgcgcgaggcggcggcgaaagtcgagcgggagatttacgagctggccgggacgacgttcaacatcggatcgacgaaacagctcggcgaaattttgttcgataagctggggctgcccgtcgtcaagaaaacgaaaaccggctattccaccgacgcagacgtgctggaggaactggcgccgtaccatccgatcgtcgaaaagattttgcattaccgccaactgacgaaattgcagtcgacctacatcgaggggcttttgaaagaaatccgtccgcaaaccggtaaaatccatacgtattatcagcagacgatcgcggcgacggggcggctgagcagtcagtttcccaatcttcagaacattccgatccgtctcgaagaggggcggaaaatccgcaaggcgttcgttccgtcagaaccgggatggctgatgctcgccgccgactattcgcagatcgaactgcgcgtgctcgcgcacgtttccggcgacgaacggctgaaggaagcgtttcggacaggcatggacatccacacgaagaccgcgatggacgtgttcggcgtttccgaagaccgcgtcgacgcgcgcatgcggcggcaggcgaaggcggtcaatttcggcatcatctacggcatcagcgatttcggactggcgcaaaacctgaacatttcccgcaaggaggcggcggagttcatccggcaatatttcgccgtcttttcgggcgtcaaggcgtaccgcgagcggatcgtcgagcaggcgcgccgcgacggttacgtgacgaccctgctcggtcgcaggcgctatttgccggacatcaacgcgtcgaattacgatctccgctcgttcgcggagcggacggcgatgaatacgccgatccagggcacggccgccgacatcatcaagaccgcgatggtgcgtctgacgcggcggatgcgcgacgtcggactgaagagccgcatgctgctgcaggttcacgacgagctcgtgtttgaagtgccgccggacgagctcgacgcgatgcgggagcttgtgacggacgtcatggagtcggcggtcccgctcgacgtgccgctgaaggtcgacgtcagctggggcgccgactggtacgcggcgaagtgagggaagcgggatcc

SEQ ID NO: 1229 - DNA, 2792 bp, Artificial Sequence
  Description of Artificial Sequence: Synthetic Caldibacillus cellulovorans CompA.2 DNA Polymerase N831C
atgaaatacctgctgccgaccgctgctgctggtctgctgctcctcgctgcccagccggcgatggccatgggcaaactgattctggtcgacggaaacagcgtcgccaaccgggcgttttacgccgtccggctgctcagcacgcgcggcggcctgcacacaaacgcggtgtacggattcgccaacatgttgctcaagctgatcgaggaggaacggccgacgcattttctcgtcgcgttcgacgcgggcaaggcgacgttccgtcatcgcgaatacgaggcctacaaggcgggtcgcctgcagacgccgcccgagctgtccgagcagtttccgtacatccgggagctcgtccgggcgttcggcgtcgcgtccggcgagctggaggaatacgaggcggacgacatgatcggtacgctggcgaaacgggcggaggccgagggcgtcgacacgctggtcgtcaccggcgaccgcgatttgctccagctcgtatcggaccgcgtgaccgtcgcgctgacgcgcaagggcatcacggaaacggagcggtacgacccggcgcgcatccgcgaggaatacggcttcgatcccgaccgcatccgcgacctcaaagggctgatgggcgacgcgtctgacaatcttcccggcgttcccggcgtcggtgagaaaaccgcactgaaactgctcaggcagtacggttcgctggagagcgtcctggaacacgcgtcggaaatcgccggaaagctcggtgaaaatctgcgggcgcacgccgacgccgcccgattgagcaagcggctggcgacgatcgactgcgcggtaccgttgcagtcgggatgggactggctgcgcctcggcgaaccggaccgcgccgcgctcgcctcgctgttgcggcagctcgaattcaagtcgctgttgaaacggctcggactcgacggcacgtccgccgatgccgacgtcgacggcgtccgttcctccgcgcggccggcggacgagaaacggccgagggccgtcgccgtcgctgaggagggcgtcgacgtccgctgtccggatcgcccggaagaagtcgaagaagcgctgtcgcggctggaagccgcccagtcggtcgtcgtcgaggtgacgggcgacaacccgcacgacggcgaagtgcgcggcgtcgcatggtgggacggacatacggcgtatttcattccgtttgaacggctggtgcagtccgacatgcggccgctggccgactggctcgccgacgcgcgtcggccgaagcgtacgcacgactcccatcgcgctgaagtggcgctgttctggcacggccttgcgtttcgcggcacgtcgttctgcacgcatatcgccgcctatttgctcgaccccacggaatcgcgccatacgctggcggacctgtcgcgccgctacggtctgccgccggtaccggaagccgaggacgtttacggcaagggcgcgaagttcaaggttcccgatcgcgacacgctggcgcgttacgtcggccgcaaggccgccctagtcgcgcggctcgttccgctgctcgaggcggatttggcggcctgcggcatgcgttcgcttttttacgacctggagctgccgctttcatccgaactcgccgtcatggagacggtcggcgtccgcgtcgacgcggcggcgctcgccgcctacggcgaggaattgcgcgaggcggcggcgaaagtcgagcgggagatttacgagctggccgggacgacgttcaacatcggatcgacgaaacagctcggcgaaattttgttcgataagctggggctgcccgtcgtcaagaaaacgaaaaccggctattccaccgacgcagacgtgctggaggaactggcgccgtaccatccgatcgtcgaaaagattttgcattaccgccaactgacgaaattgcagtcgacctacatcgaggggcttttgaaagaaatccgtccgcaaaccggtaaaatccatacgtattatcagcagacgatcgcggcgacggggcggctgagcagtcagtttcccaatcttcagaacattccgatccgtctcgaagaggggcggaaaatccgcaaggcgttcgttccgtcagaaccgggatggctgatgctcgccgccgactattcgcagatcgaactgcgcgtgctcgcgcacgtttccggcgacgaacggctgaaggaagcgtttcggacaggcatggacatccacacgaagaccgcgatggacgtgttcggcgtttccgaagaccgcgtcgacgcgcgcatgcggcggcaggcgaaggcggtcaatttcggcatcatctacggcatcagcgatttcggactggcgcaaaacctgaacatttcccgcaaggaggcggcggagttcatccggcaatatttcgccgtcttttcgggcgtcaaggcgtaccgcgagcggatcgtcgagcaggcgcgccgcgacggttacgtgacgaccctgctcggtcgcaggcgctatttgccggacatcaacgcgtcgaattactgtctccgctcgttcgcggagcggacggcgatgaatacgccgatccagggcacggccgccgacatcatcaagaccgcgatggtgcgtctgacgcggcggatgcgcgacgtcggactgaagagccgcatgctgctgcaggttcacgacgagctcgtgtttgaagtgccgccggacgagctcgacgcgatgcgggagcttgtgacggacgtcatggagtcggcggtcccgctcgacgtgccgctgaaggtcgacgtcagctggggcgccgactggtacgcggcgaagtgagggaagcgggatcc

SEQ ID NO: 1230 - DNA, 2792 bp, Artificial Sequence
  Description of Artificial Sequence: Synthetic Caldibacillus cellulovorans CompA.2 DNA Polymerase N831E
atgaaatacctgctgccgaccgctgctgctggtctgctgctcctcgctgcccagccggcgatggccatgggcaaactgattctggtcgacggaaacagcgtcgccaaccgggcgttttacgccgtccggctgctcagcacgcgcggcggcctgcacacaaacgcggtgtacggattcgccaacatgttgctcaagctgatcgaggaggaacggccgacgcattttctcgtcgcgttcgacgcgggcaaggcgacgttccgtcatcgcgaatacgaggcctacaaggcgggtcgcctgcagacgccgcccgagctgtccgagcagtttccgtacatccgggagctcgtccgggcgttcggcgtcgcgtccggcgagctggaggaatacgaggcggacgacatgatcggtacgctggcgaaacgggcggaggccgagggcgtcgacacgctggtcgtcaccggcgaccgcgatttgctccagctcgtatcggaccgcgtgaccgtcgcgctgacgcgcaagggcatcacggaaacggagcggtacgacccggcgcgcatccgcgaggaatacggcttcgatcccgaccgcatccgcgacctcaaagggctgatgggcgacgcgtctgacaatcttcccggcgttcccggcgtcggtgagaaaaccgcactgaaactgctcaggcagtacggttcgctggagagcgtcctggaacacgcgtcggaaatcgccggaaagctcggtgaaaatctgcgggcgcacgccgacgccgcccgattgagcaagcggctggcgacgatcgactgcgcggtaccgttgcagtcgggatgggactggctgcgcctcggcgaaccggaccgcgccgcgctcgcctcgctgttgcggcagctcgaattcaagtcgctgttgaaacggctcggactcgacggcacgtccgccgatgccgacgtcgacggcgtccgttcctccgcgcggccggcggacgagaaacggccgagggccgtcgccgtcgctgaggagggcgtcgacgtccgctgtccggatcgcccggaagaagtcgaagaagcgctgtcgcggctggaagccgcccagtcggtcgtcgtcgaggtgacgggcgacaacccgcacgacggcgaagtgcgcggcgtcgcatggtgggacggacatacggcgtatttcattccgtttgaacggctggtgcagtccgacatgcggccgctggccgactggctcgccgacgcgcgtcggccgaagcgtacgcacgactcccatcgcgctgaagtggcgctgttctggcacggccttgcgtttcgcggcacgtcgttctgcacgcatatcgccgcctatttgctcgaccccacggaatcgcgccatacgctggcggacctgtcgcgccgctacggtctgccgccggtaccggaagccgaggacgtttacggcaagggcgcgaagttcaaggttcccgatcgcgacacgctggcgcgttacgtcggccgcaaggccgccctagtcgcgcggctcgttccgctgctcgaggcggatttggcggcctgcggcatgcgttcgcttttttacgacctggagctgccgctttcatccgaactcgccgtcatggagacggtcggcgtccgcgtcgacgcggcggcgctcgccgcctacggcgaggaattgcgcgaggcggcggcgaaagtcgagcgggagatttacgagctggccgggacgacgttcaacatcggatcgacgaaacagctcggcgaaattttgttcgataagctggggctgcccgtcgtcaagaaaacgaaaaccggctattccaccgacgcagacgtgctggaggaactggcgccgtaccatccgatcgtcgaaaagattttgcattaccgccaactgacgaaattgcagtcgacctacatcgaggggcttttgaaagaaatccgtccgcaaaccggtaaaatccatacgtattatcagcagacgatcgcggcgacggggcggctgagcagtcagtttcccaatcttcagaacattccgatccgtctcgaagaggggcggaaaatccgcaaggcgttcgttccgtcagaaccgggatggctgatgctcgccgccgactattcgcagatcgaactgcgcgtgctcgcgcacgtttccggcgacgaacggctgaaggaagcgtttcggacaggcatggacatccacacgaagaccgcgatggacgtgttcggcgtttccgaagaccgcgtcgacgcgcgcatgcggcggcaggcgaaggcggtcaatttcggcatcatctacggcatcagcgatttcggactggcgcaaaacctgaacatttcccgcaaggaggcggcggagttcatccggcaatatttcgccgtcttttcgggcgtcaaggcgtaccgcgagcggatcgtcgagcaggcgcgccgcgacggttacgtgacgaccctgctcggtcgcaggcgctatttgccggacatcaacgcgtcgaattacgaactccgctcgttcgcggagcggacggcgatgaatacgccgatccagggcacggccgccgacatcatcaagaccgcgatggtgcgtctgacgcggcggatgcgcgacgtcggactgaagagccgcatgctgctgcaggttcacgacgagctcgtgtttgaagtgccgccggacgagctcgacgcgatgcgggagcttgtgacggacgtcatggagtcggcggtcccgctcgacgtgccgctgaaggtcgacgtcagctggggcgccgactggtacgcggcgaagtgagggaagcgggatcc

SEQ ID NO: 1231 - DNA, 2792 bp, Artificial Sequence
  Description of Artificial Sequence: Synthetic Caldibacillus cellulovorans CompA.2 DNA Polymerase N831Q
atgaaatacctgctgccgaccgctgctgctggtctgctgctcctcgctgcccagccggcgatggccatgggcaaactgattctggtcgacggaaacagcgtcgccaaccgggcgttttacgccgtccggctgctcagcacgcgcggcggcctgcacacaaacgcggtgtacggattcgccaacatgttgctcaagctgatcgaggaggaacggccgacgcattttctcgtcgcgttcgacgcgggcaaggcgacgttccgtcatcgcgaatacgaggcctacaaggcgggtcgcctgcagacgccgcccgagctgtccgagcagtttccgtacatccgggagctcgtccgggcgttcggcgtcgcgtccggcgagctggaggaatacgaggcggacgacatgatcggtacgctggcgaaacgggcggaggccgagggcgtcgacacgctggtcgtcaccggcgaccgcgatttgctccagctcgtatcggaccgcgtgaccgtcgcgctgacgcgcaagggcatcacggaaacggagcggtacgacccggcgcgcatccgcgaggaatacggcttcgatcccgaccgcatccgcgacctcaaagggctgatgggcgacgcgtctgacaatcttcccggcgttcccggcgtcggtgagaaaaccgcactgaaactgctcaggcagtacggttcgctggagagcgtcctggaacacgcgtcggaaatcgccggaaagctcggtgaaaatctgcgggcgcacgccgacgccgcccgattgagcaagcggctggcgacgatcgactgcgcggtaccgttgcagtcgggatgggactggctgcgcctcggcgaaccggaccgcgccgcgctcgcctcgctgttgcggcagctcgaattcaagtcgctgttgaaacggctcggactcgacggcacgtccgccgatgccgacgtcgacggcgtccgttcctccgcgcggccggcggacgagaaacggccgagggccgtcgccgtcgctgaggagggcgtcgacgtccgctgtccggatcgcccggaagaagtcgaagaagcgctgtcgcggctggaagccgcccagtcggtcgtcgtcgaggtgacgggcgacaacccgcacgacggcgaagtgcgcggcgtcgcatggtgggacggacatacggcgtatttcattccgtttgaacggctggtgcagtccgacatgcggccgctggccgactggctcgccgacgcgcgtcggccgaagcgtacgcacgactcccatcgcgctgaagtggcgctgttctggcacggccttgcgtttcgcggcacgtcgttctgcacgcatatcgccgcctatttgctcgaccccacggaatcgcgccatacgctggcggacctgtcgcgccgctacggtctgccgccggtaccggaagccgaggacgtttacggcaagggcgcgaagttcaaggttcccgatcgcgacacgctggcgcgttacgtcggccgcaaggccgccctagtcgcgcggctcgttccgctgctcgaggcggatttggcggcctgcggcatgcgttcgcttttttacgacctggagctgccgctttcatccgaactcgccgtcatggagacggtcggcgtccgcgtcgacgcggcggcgctcgccgcctacggcgaggaattgcgcgaggcggcggcgaaagtcgagcgggagatttacgagctggccgggacgacgttcaacatcggatcgacgaaacagctcggcgaaattttgttcgataagctggggctgcccgtcgtcaagaaaacgaaaaccggctattccaccgacgcagacgtgctggaggaactggcgccgtaccatccgatcgtcgaaaagattttgcattaccgccaactgacgaaattgcagtcgacctacatcgaggggcttttgaaagaaatccgtccgcaaaccggtaaaatccatacgtattatcagcagacgatcgcggcgacggggcggctgagcagtcagtttcccaatcttcagaacattccgatccgtctcgaagaggggcggaaaatccgcaaggcgttcgttccgtcagaaccgggatggctgatgctcgccgccgactattcgcagatcgaactgcgcgtgctcgcgcacgtttccggcgacgaacggctgaaggaagcgtttcggacaggcatggacatccacacgaagaccgcgatggacgtgttcggcgtttccgaagaccgcgtcgacgcgcgcatgcggcggcaggcgaaggcggtcaatttcggcatcatctacggcatcagcgatttcggactggcgcaaaacctgaacatttcccgcaaggaggcggcggagttcatccggcaatatttcgccgtcttttcgggcgtcaaggcgtaccgcgagcggatcgtcgagcaggcgcgccgcgacggttacgtgacgaccctgctcggtcgcaggcgctatttgccggacatcaacgcgtcgaattaccaactccgctcgttcgcggagcggacggcgatgaatacgccgatccagggcacggccgccgacatcatcaagaccgcgatggtgcgtctgacgcggcggatgcgcgacgtcggactgaagagccgcatgctgctgcaggttcacgacgagctcgtgtttgaagtgccgccggacgagctcgacgcgatgcgggagcttgtgacggacgtcatggagtcggcggtcccgctcgacgtgccgctgaaggtcgacgtcagctggggcgccgactggtacgcggcgaagtgagggaagcgggatcc

SEQ ID NO: 1232 - DNA, 2792 bp, Artificial Sequence
  Description of Artificial Sequence: Synthetic Caldibacillus cellulovorans CompA.2 DNA Polymerase N831G
atgaaatacctgctgccgaccgctgctgctggtctgctgctcctcgctgcccagccggcgatggccatgggcaaactgattctggtcgacggaaacagcgtcgccaaccgggcgttttacgccgtccggctgctcagcacgcgcggcggcctgcacacaaacgcggtgtacggattcgccaacatgttgctcaagctgatcgaggaggaacggccgacgcattttctcgtcgcgttcgacgcgggcaaggcgacgttccgtcatcgcgaatacgaggcctacaaggcgggtcgcctgcagacgccgcccgagctgtccgagcagtttccgtacatccgggagctcgtccgggcgttcggcgtcgcgtccggcgagctggaggaatacgaggcggacgacatgatcggtacgctggcgaaacgggcggaggccgagggcgtcgacacgctggtcgtcaccggcgaccgcgatttgctccagctcgtatcggaccgcgtgaccgtcgcgctgacgcgcaagggcatcacggaaacggagcggtacgacccggcgcgcatccgcgaggaatacggcttcgatcccgaccgcatccgcgacctcaaagggctgatgggcgacgcgtctgacaatcttcccggcgttcccggcgtcggtgagaaaaccgcactgaaactgctcaggcagtacggttcgctggagagcgtcctggaacacgcgtcggaaatcgccggaaagctcggtgaaaatctgcgggcgcacgccgacgccgcccgattgagcaagcggctggcgacgatcgactgcgcggtaccgttgcagtcgggatgggactggctgcgcctcggcgaaccggaccgcgccgcgctcgcctcgctgttgcggcagctcgaattcaagtcgctgttgaaacggctcggactcgacggcacgtccgccgatgccgacgtcgacggcgtccgttcctccgcgcggccggcggacgagaaacggccgagggccgtcgccgtcgctgaggagggcgtcgacgtccgctgtccggatcgcccggaagaagtcgaagaagcgctgtcgcggctggaagccgcccagtcggtcgtcgtcgaggtgacgggcgacaacccgcacgacggcgaagtgcgcggcgtcgcatggtgggacggacatacggcgtatttcattccgtttgaacggctggtgcagtccgacatgcggccgctggccgactggctcgccgacgcgcgtcggccgaagcgtacgcacgactcccatcgcgctgaagtggcgctgttctggcacggccttgcgtttcgcggcacgtcgttctgcacgcatatcgccgcctatttgctcgaccccacggaatcgcgccatacgctggcggacctgtcgcgccgctacggtctgccgccggtaccggaagccgaggacgtttacggcaagggcgcgaagttcaaggttcccgatcgcgacacgctggcgcgttacgtcggccgcaaggccgccctagtcgcgcggctcgttccgctgctcgaggcggatttggcggcctgcggcatgcgttcgcttttttacgacctggagctgccgctttcatccgaactcgccgtcatggagacggtcggcgtccgcgtcgacgcggcggcgctcgccgcctacggcgaggaattgcgcgaggcggcggcgaaagtcgagcgggagatttacgagctggccgggacgacgttcaacatcggatcgacgaaacagctcggcgaaattttgttcgataagctggggctgcccgtcgtcaagaaaacgaaaaccggctattccaccgacgcagacgtgctggaggaactggcgccgtaccatccgatcgtcgaaaagattttgcattaccgccaactgacgaaattgcagtcgacctacatcgaggggcttttgaaagaaatccgtccgcaaaccggtaaaatccatacgtattatcagcagacgatcgcggcgacggggcggctgagcagtcagtttcccaatcttcagaacattccgatccgtctcgaagaggggcggaaaatccgcaaggcgttcgttccgtcagaaccgggatggctgatgctcgccgccgactattcgcagatcgaactgcgcgtgctcgcgcacgtttccggcgacgaacggctgaaggaagcgtttcggacaggcatggacatccacacgaagaccgcgatggacgtgttcggcgtttccgaagaccgcgtcgacgcgcgcatgcggcggcaggcgaaggcggtcaatttcggcatcatctacggcatcagcgatttcggactggcgcaaaacctgaacatttcccgcaaggaggcggcggagttcatccggcaatatttcgccgtcttttcgggcgtcaaggcgtaccgcgagcggatcgtcgagcaggcgcgccgcgacggttacgtgacgaccctgctcggtcgcaggcgctatttgccggacatcaacgcgtcgaattacggtctccgctcgttcgcggagcggacggcgatgaatacgccgatccagggcacggccgccgacatcatcaagaccgcgatggtgcgtctgacgcggcggatgcgcgacgtcggactgaagagccgcatgctgctgcaggttcacgacgagctcgtgtttgaagtgccgccggacgagctcgacgcgatgcgggagcttgtgacggacgtcatggagtcggcggtcccgctcgacgtgccgctgaaggtcgacgtcagctggggcgccgactggtacgcggcgaagtgagggaagcgggatcc

SEQ ID NO: 1233 - DNA, 2792 bp, Artificial Sequence
  Description of Artificial Sequence: Synthetic Caldibacillus cellulovorans CompA.2 DNA Polymerase N831H
atgaaatacctgctgccgaccgctgctgctggtctgctgctcctcgctgcccagccggcgatggccatgggcaaactgattctggtcgacggaaacagcgtcgccaaccgggcgttttacgccgtccggctgctcagcacgcgcggcggcctgcacacaaacgcggtgtacggattcgccaacatgttgctcaagctgatcgaggaggaacggccgacgcattttctcgtcgcgttcgacgcgggcaaggcgacgttccgtcatcgcgaatacgaggcctacaaggcgggtcgcctgcagacgccgcccgagctgtccgagcagtttccgtacatccgggagctcgtccgggcgttcggcgtcgcgtccggcgagctggaggaatacgaggcggacgacatgatcggtacgctggcgaaacgggcggaggccgagggcgtcgacacgctggtcgtcaccggcgaccgcgatttgctccagctcgtatcggaccgcgtgaccgtcgcgctgacgcgcaagggcatcacggaaacggagcggtacgacccggcgcgcatccgcgaggaatacggcttcgatcccgaccgcatccgcgacctcaaagggctgatgggcgacgcgtctgacaatcttcccggcgttcccggcgtcggtgagaaaaccgcactgaaactgctcaggcagtacggttcgctggagagcgtcctggaacacgcgtcggaaatcgccggaaagctcggtgaaaatctgcgggcgcacgccgacgccgcccgattgagcaagcggctggcgacgatcgactgcgcggtaccgttgcagtcgggatgggactggctgcgcctcggcgaaccggaccgcgccgcgctcgcctcgctgttgcggcagctcgaattcaagtcgctgttgaaacggctcggactcgacggcacgtccgccgatgccgacgtcgacggcgtccgttcctccgcgcggccggcggacgagaaacggccgagggccgtcgccgtcgctgaggagggcgtcgacgtccgctgtccggatcgcccggaagaagtcgaagaagcgctgtcgcggctggaagccgcccagtcggtcgtcgtcgaggtgacgggcgacaacccgcacgacggcgaagtgcgcggcgtcgcatggtgggacggacatacggcgtatttcattccgtttgaacggctggtgcagtccgacatgcggccgctggccgactggctcgccgacgcgcgtcggccgaagcgtacgcacgactcccatcgcgctgaagtggcgctgttctggcacggccttgcgtttcgcggcacgtcgttctgcacgcatatcgccgcctatttgctcgaccccacggaatcgcgccatacgctggcggacctgtcgcgccgctacggtctgccgccggtaccggaagccgaggacgtttacggcaagggcgcgaagttcaaggttcccgatcgcgacacgctggcgcgttacgtcggccgcaaggccgccctagtcgcgcggctcgttccgctgctcgaggcggatttggcggcctgcggcatgcgttcgcttttttacgacctggagctgccgctttcatccgaactcgccgtcatggagacggtcggcgtccgcgtcgacgcggcggcgctcgccgcctacggcgaggaattgcgcgaggcggcggcgaaagtcgagcgggagatttacgagctggccgggacgacgttcaacatcggatcgacgaaacagctcggcgaaattttgttcgataagctggggctgcccgtcgtcaagaaaacgaaaaccggctattccaccgacgcagacgtgctggaggaactggcgccgtaccatccgatcgtcgaaaagattttgcattaccgccaactgacgaaattgcagtcgacctacatcgaggggcttttgaaagaaatccgtccgcaaaccggtaaaatccatacgtattatcagcagacgatcgcggcgacggggcggctgagcagtcagtttcccaatcttcagaacattccgatccgtctcgaagaggggcggaaaatccgcaaggcgttcgttccgtcagaaccgggatggctgatgctcgccgccgactattcgcagatcgaactgcgcgtgctcgcgcacgtttccggcgacgaacggctgaaggaagcgtttcggacaggcatggacatccacacgaagaccgcgatggacgtgttcggcgtttccgaagaccgcgtcgacgcgcgcatgcggcggcaggcgaaggcggtcaatttcggcatcatctacggcatcagcgatttcggactggcgcaaaacctgaacatttcccgcaaggaggcggcggagttcatccggcaatatttcgccgtcttttcgggcgtcaaggcgtaccgcgagcggatcgtcgagcaggcgcgccgcgacggttacgtgacgaccctgctcggtcgcaggcgctatttgccggacatcaacgcgtcgaattaccatctccgctcgttcgcggagcggacggcgatgaatacgccgatccagggcacggccgccgacatcatcaagaccgcgatggtgcgtctgacgcggcggatgcgcgacgtcggactgaagagccgcatgctgctgcaggttcacgacgagctcgtgtttgaagtgccgccggacgagctcgacgcgatgcgggagcttgtgacggacgtcatggagtcggcggtcccgctcgacgtgccgctgaaggtcgacgtcagctggggcgccgactggtacgcggcgaagtgagggaagcgggatcc

SEQ ID NO: 1234 - DNA, 2792 bp, Artificial Sequence
  Description of Artificial Sequence: Synthetic Caldibacillus cellulovorans CompA.2 DNA Polymerase N831I
atgaaatacctgctgccgaccgctgctgctggtctgctgctcctcgctgcccagccggcgatggccatgggcaaactgattctggtcgacggaaacagcgtcgccaaccgggcgttttacgccgtccggctgctcagcacgcgcggcggcctgcacacaaacgcggtgtacggattcgccaacatgttgctcaagctgatcgaggaggaacggccgacgcattttctcgtcgcgttcgacgcgggcaaggcgacgttccgtcatcgcgaatacgaggcctacaaggcgggtcgcctgcagacgccgcccgagctgtccgagcagtttccgtacatccgggagctcgtccgggcgttcggcgtcgcgtccggcgagctggaggaatacgaggcggacgacatgatcggtacgctggcgaaacgggcggaggccgagggcgtcgacacgctggtcgtcaccggcgaccgcgatttgctccagctcgtatcggaccgcgtgaccgtcgcgctgacgcgcaagggcatcacggaaacggagcggtacgacccggcgcgcatccgcgaggaatacggcttcgatcccgaccgcatccgcgacctcaaagggctgatgggcgacgcgtctgacaatcttcccggcgttcccggcgtcggtgagaaaaccgcactgaaactgctcaggcagtacggttcgctggagagcgtcctggaacacgcgtcggaaatcgccggaaagctcggtgaaaatctgcgggcgcacgccgacgccgcccgattgagcaagcggctggcgacgatcgactgcgcggtaccgttgcagtcgggatgggactggctgcgcctcggcgaaccggaccgcgccgcgctcgcctcgctgttgcggcagctcgaattcaagtcgctgttgaaacggctcggactcgacggcacgtccgccgatgccgacgtcgacggcgtccgttcctccgcgcggccggcggacgagaaacggccgagggccgtcgccgtcgctgaggagggcgtcgacgtccgctgtccggatcgcccggaagaagtcgaagaagcgctgtcgcggctggaagccgcccagtcggtcgtcgtcgaggtgacgggcgacaacccgcacgacggcgaagtgcgcggcgtcgcatggtgggacggacatacggcgtatttcattccgtttgaacggctggtgcagtccgacatgcggccgctggccgactggctcgccgacgcgcgtcggccgaagcgtacgcacgactcccatcgcgctgaagtggcgctgttctggcacggccttgcgtttcgcggcacgtcgttctgcacgcatatcgccgcctatttgctcgaccccacggaatcgcgccatacgctggcggacctgtcgcgccgctacggtctgccgccggtaccggaagccgaggacgtttacggcaagggcgcgaagttcaaggttcccgatcgcgacacgctggcgcgttacgtcggccgcaaggccgccctagtcgcgcggctcgttccgctgctcgaggcggatttggcggcctgcggcatgcgttcgcttttttacgacctggagctgccgctttcatccgaactcgccgtcatggagacggtcggcgtccgcgtcgacgcggcggcgctcgccgcctacggcgaggaattgcgcgaggcggcggcgaaagtcgagcgggagatttacgagctggccgggacgacgttcaacatcggatcgacgaaacagctcggcgaaattttgttcgataagctggggctgcccgtcgtcaagaaaacgaaaaccggctattccaccgacgcagacgtgctggaggaactggcgccgtaccatccgatcgtcgaaaagattttgcattaccgccaactgacgaaattgcagtcgacctacatcgaggggcttttgaaagaaatccgtccgcaaaccggtaaaatccatacgtattatcagcagacgatcgcggcgacggggcggctgagcagtcagtttcccaatcttcagaacattccgatccgtctcgaagaggggcggaaaatccgcaaggcgttcgttccgtcagaaccgggatggctgatgctcgccgccgactattcgcagatcgaactgcgcgtgctcgcgcacgtttccggcgacgaacggctgaaggaagcgtttcggacaggcatggacatccacacgaagaccgcgatggacgtgttcggcgtttccgaagaccgcgtcgacgcgcgcatgcggcggcaggcgaaggcggtcaatttcggcatcatctacggcatcagcgatttcggactggcgcaaaacctgaacatttcccgcaaggaggcggcggagttcatccggcaatatttcgccgtcttttcgggcgtcaaggcgtaccgcgagcggatcgtcgagcaggcgcgccgcgacggttacgtgacgaccctgctcggtcgcaggcgctatttgccggacatcaacgcgtcgaattacattctccgctcgttcgcggagcggacggcgatgaatacgccgatccagggcacggccgccgacatcatcaagaccgcgatggtgcgtctgacgcggcggatgcgcgacgtcggactgaagagccgcatgctgctgcaggttcacgacgagctcgtgtttgaagtgccgccggacgagctcgacgcgatgcgggagcttgtgacggacgtcatggagtcggcggtcccgctcgacgtgccgctgaaggtcgacgtcagctggggcgccgactggtacgcggcgaagtgagggaagcgggatcc

SEQ ID NO: 1235 - DNA, 2792 bp, Artificial Sequence
  Description of Artificial Sequence: Synthetic Caldibacillus cellulovorans CompA.2 DNA Polymerase N831L
atgaaatacctgctgccgaccgctgctgctggtctgctgctcctcgctgcccagccggcgatggccatgggcaaactgattctggtcgacggaaacagcgtcgccaaccgggcgttttacgccgtccggctgctcagcacgcgcggcggcctgcacacaaacgcggtgtacggattcgccaacatgttgctcaagctgatcgaggaggaacggccgacgcattttctcgtcgcgttcgacgcgggcaaggcgacgttccgtcatcgcgaatacgaggcctacaaggcgggtcgcctgcagacgccgcccgagctgtccgagcagtttccgtacatccgggagctcgtccgggcgttcggcgtcgcgtccggcgagctggaggaatacgaggcggacgacatgatcggtacgctggcgaaacgggcggaggccgagggcgtcgacacgctggtcgtcaccggcgaccgcgatttgctccagctcgtatcggaccgcgtgaccgtcgcgctgacgcgcaagggcatcacggaaacggagcggtacgacccggcgcgcatccgcgaggaatacggcttcgatcccgaccgcatccgcgacctcaaagggctgatgggcgacgcgtctgacaatcttcccggcgttcccggcgtcggtgagaaaaccgcactgaaactgctcaggcagtacggttcgctggagagcgtcctggaacacgcgtcggaaatcgccggaaagctcggtgaaaatctgcgggcgcacgccgacgccgcccgattgagcaagcggctggcgacgatcgactgcgcggtaccgttgcagtcgggatgggactggctgcgcctcggcgaaccggaccgcgccgcgctcgcctcgctgttgcggcagctcgaattcaagtcgctgttgaaacggctcggactcgacggcacgtccgccgatgccgacgtcgacggcgtccgttcctccgcgcggccggcggacgagaaacggccgagggccgtcgccgtcgctgaggagggcgtcgacgtccgctgtccggatcgcccggaagaagtcgaagaagcgctgtcgcggctggaagccgcccagtcggtcgtcgtcgaggtgacgggcgacaacccgcacgacggcgaagtgcgcggcgtcgcatggtgggacggacatacggcgtatttcattccgtttgaacggctggtgcagtccgacatgcggccgctggccgactggctcgccgacgcgcgtcggccgaagcgtacgcacgactcccatcgcgctgaagtggcgctgttctggcacggccttgcgtttcgcggcacgtcgttctgcacgcatatcgccgcctatttgctcgaccccacggaatcgcgccatacgctggcggacctgtcgcgccgctacggtctgccgccggtaccggaagccgaggacgtttacggcaagggcgcgaagttcaaggttcccgatcgcgacacgctggcgcgttacgtcggccgcaaggccgccctagtcgcgcggctcgttccgctgctcgaggcggatttggcggcctgcggcatgcgttcgcttttttacgacctggagctgccgctttcatccgaactcgccgtcatggagacggtcggcgtccgcgtcgacgcggcggcgctcgccgcctacggcgaggaattgcgcgaggcggcggcgaaagtcgagcgggagatttacgagctggccgggacgacgttcaacatcggatcgacgaaacagctcggcgaaattttgttcgataagctggggctgcccgtcgtcaagaaaacgaaaaccggctattccaccgacgcagacgtgctggaggaactggcgccgtaccatccgatcgtcgaaaagattttgcattaccgccaactgacgaaattgcagtcgacctacatcgaggggcttttgaaagaaatccgtccgcaaaccggtaaaatccatacgtattatcagcagacgatcgcggcgacggggcggctgagcagtcagtttcccaatcttcagaacattccgatccgtctcgaagaggggcggaaaatccgcaaggcgttcgttccgtcagaaccgggatggctgatgctcgccgccgactattcgcagatcgaactgcgcgtgctcgcgcacgtttccggcgacgaacggctgaaggaagcgtttcggacaggcatggacatccacacgaagaccgcgatggacgtgttcggcgtttccgaagaccgcgtcgacgcgcgcatgcggcggcaggcgaaggcggtcaatttcggcatcatctacggcatcagcgatttcggactggcgcaaaacctgaacatttcccgcaaggaggcggcggagttcatccggcaatatttcgccgtcttttcgggcgtcaaggcgtaccgcgagcggatcgtcgagcaggcgcgccgcgacggttacgtgacgaccctgctcggtcgcaggcgctatttgccggacatcaacgcgtcgaattaccttctccgctcgttcgcggagcggacggcgatgaatacgccgatccagggcacggccgccgacatcatcaagaccgcgatggtgcgtctgacgcggcggatgcgcgacgtcggactgaagagccgcatgctgctgcaggttcacgacgagctcgtgtttgaagtgccgccggacgagctcgacgcgatgcgggagcttgtgacggacgtcatggagtcggcggtcccgctcgacgtgccgctgaaggtcgacgtcagctggggcgccgactggtacgcggcgaagtgagggaagcgggatcc

SEQ ID NO: 1236 - DNA, 2792 bp, Artificial Sequence
  Description of Artificial Sequence: Synthetic Caldibacillus cellulovorans CompA.2 DNA Polymerase N831K
atgaaatacctgctgccgaccgctgctgctggtctgctgctcctcgctgcccagccggcgatggccatgggcaaactgattctggtcgacggaaacagcgtcgccaaccgggcgttttacgccgtccggctgctcagcacgcgcggcggcctgcacacaaacgcggtgtacggattcgccaacatgttgctcaagctgatcgaggaggaacggccgacgcattttctcgtcgcgttcgacgcgggcaaggcgacgttccgtcatcgcgaatacgaggcctacaaggcgggtcgcctgcagacgccgcccgagctgtccgagcagtttccgtacatccgggagctcgtccgggcgttcggcgtcgcgtccggcgagctggaggaatacgaggcggacgacatgatcggtacgctggcgaaacgggcggaggccgagggcgtcgacacgctggtcgtcaccggcgaccgcgatttgctccagctcgtatcggaccgcgtgaccgtcgcgctgacgcgcaagggcatcacggaaacggagcggtacgacccggcgcgcatccgcgaggaatacggcttcgatcccgaccgcatccgcgacctcaaagggctgatgggcgacgcgtctgacaatcttcccggcgttcccggcgtcggtgagaaaaccgcactgaaactgctcaggcagtacggttcgctggagagcgtcctggaacacgcgtcggaaatcgccggaaagctcggtgaaaatctgcgggcgcacgccgacgccgcccgattgagcaagcggctggcgacgatcgactgcgcggtaccgttgcagtcgggatgggactggctgcgcctcggcgaaccggaccgcgccgcgctcgcctcgctgttgcggcagctcgaattcaagtcgctgttgaaacggctcggactcgacggcacgtccgccgatgccgacgtcgacggcgtccgttcctccgcgcggccggcggacgagaaacggccgagggccgtcgccgtcgctgaggagggcgtcgacgtccgctgtccggatcgcccggaagaagtcgaagaagcgctgtcgcggctggaagccgcccagtcggtcgtcgtcgaggtgacgggcgacaacccgcacgacggcgaagtgcgcggcgtcgcatggtgggacggacatacggcgtatttcattccgtttgaacggctggtgcagtccgacatgcggccgctggccgactggctcgccgacgcgcgtcggccgaagcgtacgcacgactcccatcgcgctgaagtggcgctgttctggcacggccttgcgtttcgcggcacgtcgttctgcacgcatatcgccgcctatttgctcgaccccacggaatcgcgccatacgctggcggacctgtcgcgccgctacggtctgccgccggtaccggaagccgaggacgtttacggcaagggcgcgaagttcaaggttcccgatcgcgacacgctggcgcgttacgtcggccgcaaggccgccctagtcgcgcggctcgttccgctgctcgaggcggatttggcggcctgcggcatgcgttcgcttttttacgacctggagctgccgctttcatccgaactcgccgtcatggagacggtcggcgtccgcgtcgacgcggcggcgctcgccgcctacggcgaggaattgcgcgaggcggcggcgaaagtcgagcgggagatttacgagctggccgggacgacgttcaacatcggatcgacgaaacagctcggcgaaattttgttcgataagctggggctgcccgtcgtcaagaaaacgaaaaccggctattccaccgacgcagacgtgctggaggaactggcgccgtaccatccgatcgtcgaaaagattttgcattaccgccaactgacgaaattgcagtcgacctacatcgaggggcttttgaaagaaatccgtccgcaaaccggtaaaatccatacgtattatcagcagacgatcgcggcgacggggcggctgagcagtcagtttcccaatcttcagaacattccgatccgtctcgaagaggggcggaaaatccgcaaggcgttcgttccgtcagaaccgggatggctgatgctcgccgccgactattcgcagatcgaactgcgcgtgctcgcgcacgtttccggcgacgaacggctgaaggaagcgtttcggacaggcatggacatccacacgaagaccgcgatggacgtgttcggcgtttccgaagaccgcgtcgacgcgcgcatgcggcggcaggcgaaggcggtcaatttcggcatcatctacggcatcagcgatttcggactggcgcaaaacctgaacatttcccgcaaggaggcggcggagttcatccggcaatatttcgccgtcttttcgggcgtcaaggcgtaccgcgagcggatcgtcgagcaggcgcgccgcgacggttacgtgacgaccctgctcggtcgcaggcgctatttgccggacatcaacgcgtcgaattacaaactccgctcgttcgcggagcggacggcgatgaatacgccgatccagggcacggccgccgacatcatcaagaccgcgatggtgcgtctgacgcggcggatgcgcgacgtcggactgaagagccgcatgctgctgcaggttcacgacgagctcgtgtttgaagtgccgccggacgagctcgacgcgatgcgggagcttgtgacggacgtcatggagtcggcggtcccgctcgacgtgccgctgaaggtcgacgtcagctggggcgccgactggtacgcggcgaagtgagggaagcgggatcc

SEQ ID NO: 1237 - DNA, 2792 bp, Artificial Sequence
  Description of Artificial Sequence: Synthetic Caldibacillus cellulovorans CompA.2 DNA Polymerase N831M
atgaaatacctgctgccgaccgctgctgctggtctgctgctcctcgctgcccagccggcgatggccatgggcaaactgattctggtcgacggaaacagcgtcgccaaccgggcgttttacgccgtccggctgctcagcacgcgcggcggcctgcacacaaacgcggtgtacggattcgccaacatgttgctcaagctgatcgaggaggaacggccgacgcattttctcgtcgcgttcgacgcgggcaaggcgacgttccgtcatcgcgaatacgaggcctacaaggcgggtcgcctgcagacgccgcccgagctgtccgagcagtttccgtacatccgggagctcgtccgggcgttcggcgtcgcgtccggcgagctggaggaatacgaggcggacgacatgatcggtacgctggcgaaacgggcggaggccgagggcgtcgacacgctggtcgtcaccggcgaccgcgatttgctccagctcgtatcggaccgcgtgaccgtcgcgctgacgcgcaagggcatcacggaaacggagcggtacgacccggcgcgcatccgcgaggaatacggcttcgatcccgaccgcatccgcgacctcaaagggctgatgggcgacgcgtctgacaatcttcccggcgttcccggcgtcggtgagaaaaccgcactgaaactgctcaggcagtacggttcgctggagagcgtcctggaacacgcgtcggaaatcgccggaaagctcggtgaaaatctgcgggcgcacgccgacgccgcccgattgagcaagcggctggcgacgatcgactgcgcggtaccgttgcagtcgggatgggactggctgcgcctcggcgaaccggaccgcgccgcgctcgcctcgctgttgcggcagctcgaattcaagtcgctgttgaaacggctcggactcgacggcacgtccgccgatgccgacgtcgacggcgtccgttcctccgcgcggccggcggacgagaaacggccgagggccgtcgccgtcgctgaggagggcgtcgacgtccgctgtccggatcgcccggaagaagtcgaagaagcgctgtcgcggctggaagccgcccagtcggtcgtcgtcgaggtgacgggcgacaacccgcacgacggcgaagtgcgcggcgtcgcatggtgggacggacatacggcgtatttcattccgtttgaacggctggtgcagtccgacatgcggccgctggccgactggctcgccgacgcgcgtcggccgaagcgtacgcacgactcccatcgcgctgaagtggcgctgttctggcacggccttgcgtttcgcggcacgtcgttctgcacgcatatcgccgcctatttgctcgaccccacggaatcgcgccatacgctggcggacctgtcgcgccgctacggtctgccgccggtaccggaagccgaggacgtttacggcaagggcgcgaagttcaaggttcccgatcgcgacacgctggcgcgttacgtcggccgcaaggccgccctagtcgcgcggctcgttccgctgctcgaggcggatttggcggcctgcggcatgcgttcgcttttttacgacctggagctgccgctttcatccgaactcgccgtcatggagacggtcggcgtccgcgtcgacgcggcggcgctcgccgcctacggcgaggaattgcgcgaggcggcggcgaaagtcgagcgggagatttacgagctggccgggacgacgttcaacatcggatcgacgaaacagctcggcgaaattttgttcgataagctggggctgcccgtcgtcaagaaaacgaaaaccggctattccaccgacgcagacgtgctggaggaactggcgccgtaccatccgatcgtcgaaaagattttgcattaccgccaactgacgaaattgcagtcgacctacatcgaggggcttttgaaagaaatccgtccgcaaaccggtaaaatccatacgtattatcagcagacgatcgcggcgacggggcggctgagcagtcagtttcccaatcttcagaacattccgatccgtctcgaagaggggcggaaaatccgcaaggcgttcgttccgtcagaaccgggatggctgatgctcgccgccgactattcgcagatcgaactgcgcgtgctcgcgcacgtttccggcgacgaacggctgaaggaagcgtttcggacaggcatggacatccacacgaagaccgcgatggacgtgttcggcgtttccgaagaccgcgtcgacgcgcgcatgcggcggcaggcgaaggcggtcaatttcggcatcatctacggcatcagcgatttcggactggcgcaaaacctgaacatttcccgcaaggaggcggcggagttcatccggcaatatttcgccgtcttttcgggcgtcaaggcgtaccgcgagcggatcgtcgagcaggcgcgccgcgacggttacgtgacgaccctgctcggtcgcaggcgctatttgccggacatcaacgcgtcgaattacatgctccgctcgttcgcggagcggacggcgatgaatacgccgatccagggcacggccgccgacatcatcaagaccgcgatggtgcgtctgacgcggcggatgcgcgacgtcggactgaagagccgcatgctgctgcaggttcacgacgagctcgtgtttgaagtgccgccggacgagctcgacgcgatgcgggagcttgtgacggacgtcatggagtcggcggtcccgctcgacgtgccgctgaaggtcgacgtcagctggggcgccgactggtacgcggcgaagtgagggaagcgggatcc

SEQ ID NO: 1238 - DNA, 2792 bp, Artificial Sequence
  Description of Artificial Sequence: Synthetic Caldibacillus cellulovorans CompA.2 DNA Polymerase N831F
atgaaatacctgctgccgaccgctgctgctggtctgctgctcctcgctgcccagccggcgatggccatgggcaaactgattctggtcgacggaaacagcgtcgccaaccgggcgttttacgccgtccggctgctcagcacgcgcggcggcctgcacacaaacgcggtgtacggattcgccaacatgttgctcaagctgatcgaggaggaacggccgacgcattttctcgtcgcgttcgacgcgggcaaggcgacgttccgtcatcgcgaatacgaggcctacaaggcgggtcgcctgcagacgccgcccgagctgtccgagcagtttccgtacatccgggagctcgtccgggcgttcggcgtcgcgtccggcgagctggaggaatacgaggcggacgacatgatcggtacgctggcgaaacgggcggaggccgagggcgtcgacacgctggtcgtcaccggcgaccgcgatttgctccagctcgtatcggaccgcgtgaccgtcgcgctgacgcgcaagggcatcacggaaacggagcggtacgacccggcgcgcatccgcgaggaatacggcttcgatcccgaccgcatccgcgacctcaaagggctgatgggcgacgcgtctgacaatcttcccggcgttcccggcgtcggtgagaaaaccgcactgaaactgctcaggcagtacggttcgctggagagcgtcctggaacacgcgtcggaaatcgccggaaagctcggtgaaaatctgcgggcgcacgccgacgccgcccgattgagcaagcggctggcgacgatcgactgcgcggtaccgttgcagtcgggatgggactggctgcgcctcggcgaaccggaccgcgccgcgctcgcctcgctgttgcggcagctcgaattcaagtcgctgttgaaacggctcggactcgacggcacgtccgccgatgccgacgtcgacggcgtccgttcctccgcgcggccggcggacgagaaacggccgagggccgtcgccgtcgctgaggagggcgtcgacgtccgctgtccggatcgcccggaagaagtcgaagaagcgctgtcgcggctggaagccgcccagtcggtcgtcgtcgaggtgacgggcgacaacccgcacgacggcgaagtgcgcggcgtcgcatggtgggacggacatacggcgtatttcattccgtttgaacggctggtgcagtccgacatgcggccgctggccgactggctcgccgacgcgcgtcggccgaagcgtacgcacgactcccatcgcgctgaagtggcgctgttctggcacggccttgcgtttcgcggcacgtcgttctgcacgcatatcgccgcctatttgctcgaccccacggaatcgcgccatacgctggcggacctgtcgcgccgctacggtctgccgccggtaccggaagccgaggacgtttacggcaagggcgcgaagttcaaggttcccgatcgcgacacgctggcgcgttacgtcggccgcaaggccgccctagtcgcgcggctcgttccgctgctcgaggcggatttggcggcctgcggcatgcgttcgcttttttacgacctggagctgccgctttcatccgaactcgccgtcatggagacggtcggcgtccgcgtcgacgcggcggcgctcgccgcctacggcgaggaattgcgcgaggcggcggcgaaagtcgagcgggagatttacgagctggccgggacgacgttcaacatcggatcgacgaaacagctcggcgaaattttgttcgataagctggggctgcccgtcgtcaagaaaacgaaaaccggctattccaccgacgcagacgtgctggaggaactggcgccgtaccatccgatcgtcgaaaagattttgcattaccgccaactgacgaaattgcagtcgacctacatcgaggggcttttgaaagaaatccgtccgcaaaccggtaaaatccatacgtattatcagcagacgatcgcggcgacggggcggctgagcagtcagtttcccaatcttcagaacattccgatccgtctcgaagaggggcggaaaatccgcaaggcgttcgttccgtcagaaccgggatggctgatgctcgccgccgactattcgcagatcgaactgcgcgtgctcgcgcacgtttccggcgacgaacggctgaaggaagcgtttcggacaggcatggacatccacacgaagaccgcgatggacgtgttcggcgtttccgaagaccgcgtcgacgcgcgcatgcggcggcaggcgaaggcggtcaatttcggcatcatctacggcatcagcgatttcggactggcgcaaaacctgaacatttcccgcaaggaggcggcggagttcatccggcaatatttcgccgtcttttcgggcgtcaaggcgtaccgcgagcggatcgtcgagcaggcgcgccgcgacggttacgtgacgaccctgctcggtcgcaggcgctatttgccggacatcaacgcgtcgaattactttctccgctcgttcgcggagcggacggcgatgaatacgccgatccagggcacggccgccgacatcatcaagaccgcgatggtgcgtctgacgcggcggatgcgcgacgtcggactgaagagccgcatgctgctgcaggttcacgacgagctcgtgtttgaagtgccgccggacgagctcgacgcgatgcgggagcttgtgacggacgtcatggagtcggcggtcccgctcgacgtgccgctgaaggtcgacgtcagctggggcgccgactggtacgcggcgaagtgagggaagcgggatcc

SEQ ID NO: 1239 - DNA, 2792 bp, Artificial Sequence
  Description of Artificial Sequence: Synthetic Caldibacillus cellulovorans CompA.2 DNA Polymerase N831P
atgaaatacctgctgccgaccgctgctgctggtctgctgctcctcgctgcccagccggcgatggccatgggcaaactgattctggtcgacggaaacagcgtcgccaaccgggcgttttacgccgtccggctgctcagcacgcgcggcggcctgcacacaaacgcggtgtacggattcgccaacatgttgctcaagctgatcgaggaggaacggccgacgcattttctcgtcgcgttcgacgcgggcaaggcgacgttccgtcatcgcgaatacgaggcctacaaggcgggtcgcctgcagacgccgcccgagctgtccgagcagtttccgtacatccgggagctcgtccgggcgttcggcgtcgcgtccggcgagctggaggaatacgaggcggacgacatgatcggtacgctggcgaaacgggcggaggccgagggcgtcgacacgctggtcgtcaccggcgaccgcgatttgctccagctcgtatcggaccgcgtgaccgtcgcgctgacgcgcaagggcatcacggaaacggagcggtacgacccggcgcgcatccgcgaggaatacggcttcgatcccgaccgcatccgcgacctcaaagggctgatgggcgacgcgtctgacaatcttcccggcgttcccggcgtcggtgagaaaaccgcactgaaactgctcaggcagtacggttcgctggagagcgtcctggaacacgcgtcggaaatcgccggaaagctcggtgaaaatctgcgggcgcacgccgacgccgcccgattgagcaagcggctggcgacgatcgactgcgcggtaccgttgcagtcgggatgggactggctgcgcctcggcgaaccggaccgcgccgcgctcgcctcgctgttgcggcagctcgaattcaagtcgctgttgaaacggctcggactcgacggcacgtccgccgatgccgacgtcgacggcgtccgttcctccgcgcggccggcggacgagaaacggccgagggccgtcgccgtcgctgaggagggcgtcgacgtccgctgtccggatcgcccggaagaagtcgaagaagcgctgtcgcggctggaagccgcccagtcggtcgtcgtcgaggtgacgggcgacaacccgcacgacggcgaagtgcgcggcgtcgcatggtgggacggacatacggcgtatttcattccgtttgaacggctggtgcagtccgacatgcggccgctggccgactggctcgccgacgcgcgtcggccgaagcgtacgcacgactcccatcgcgctgaagtggcgctgttctggcacggccttgcgtttcgcggcacgtcgttctgcacgcatatcgccgcctatttgctcgaccccacggaatcgcgccatacgctggcggacctgtcgcgccgctacggtctgccgccggtaccggaagccgaggacgtttacggcaagggcgcgaagttcaaggttcccgatcgcgacacgctggcgcgttacgtcggccgcaaggccgccctagtcgcgcggctcgttccgctgctcgaggcggatttggcggcctgcggcatgcgttcgcttttttacgacctggagctgccgctttcatccgaactcgccgtcatggagacggtcggcgtccgcgtcgacgcggcggcgctcgccgcctacggcgaggaattgcgcgaggcggcggcgaaagtcgagcgggagatttacgagctggccgggacgacgttcaacatcggatcgacgaaacagctcggcgaaattttgttcgataagctggggctgcccgtcgtcaagaaaacgaaaaccggctattccaccgacgcagacgtgctggaggaactggcgccgtaccatccgatcgtcgaaaagattttgcattaccgccaactgacgaaattgcagtcgacctacatcgaggggcttttgaaagaaatccgtccgcaaaccggtaaaatccatacgtattatcagcagacgatcgcggcgacggggcggctgagcagtcagtttcccaatcttcagaacattccgatccgtctcgaagaggggcggaaaatccgcaaggcgttcgttccgtcagaaccgggatggctgatgctcgccgccgactattcgcagatcgaactgcgcgtgctcgcgcacgtttccggcgacgaacggctgaaggaagcgtttcggacaggcatggacatccacacgaagaccgcgatggacgtgttcggcgtttccgaagaccgcgtcgacgcgcgcatgcggcggcaggcgaaggcggtcaatttcggcatcatctacggcatcagcgatttcggactggcgcaaaacctgaacatttcccgcaaggaggcggcggagttcatccggcaatatttcgccgtcttttcgggcgtcaaggcgtaccgcgagcggatcgtcgagcaggcgcgccgcgacggttacgtgacgaccctgctcggtcgcaggcgctatttgccggacatcaacgcgtcgaattaccctctccgctcgttcgcggagcggacggcgatgaatacgccgatccagggcacggccgccgacatcatcaagaccgcgatggtgcgtctgacgcggcggatgcgcgacgtcggactgaagagccgcatgctgctgcaggttcacgacgagctcgtgtttgaagtgccgccggacgagctcgacgcgatgcgggagcttgtgacggacgtcatggagtcggcggtcccgctcgacgtgccgctgaaggtcgacgtcagctggggcgccgactggtacgcggcgaagtgagggaagcgggatcc

SEQ ID NO: 1240 - DNA, 2792 bp, Artificial Sequence
  Description of Artificial Sequence: Synthetic Caldibacillus cellulovorans CompA.2 DNA Polymerase N831S
atgaaatacctgctgccgaccgctgctgctggtctgctgctcctcgctgcccagccggcgatggccatgggcaaactgattctggtcgacggaaacagcgtcgccaaccgggcgttttacgccgtccggctgctcagcacgcgcggcggcctgcacacaaacgcggtgtacggattcgccaacatgttgctcaagctgatcgaggaggaacggccgacgcattttctcgtcgcgttcgacgcgggcaaggcgacgttccgtcatcgcgaatacgaggcctacaaggcgggtcgcctgcagacgccgcccgagctgtccgagcagtttccgtacatccgggagctcgtccgggcgttcggcgtcgcgtccggcgagctggaggaatacgaggcggacgacatgatcggtacgctggcgaaacgggcggaggccgagggcgtcgacacgctggtcgtcaccggcgaccgcgatttgctccagctcgtatcggaccgcgtgaccgtcgcgctgacgcgcaagggcatcacggaaacggagcggtacgacccggcgcgcatccgcgaggaatacggcttcgatcccgaccgcatccgcgacctcaaagggctgatgggcgacgcgtctgacaatcttcccggcgttcccggcgtcggtgagaaaaccgcactgaaactgctcaggcagtacggttcgctggagagcgtcctggaacacgcgtcggaaatcgccggaaagctcggtgaaaatctgcgggcgcacgccgacgccgcccgattgagcaagcggctggcgacgatcgactgcgcggtaccgttgcagtcgggatgggactggctgcgcctcggcgaaccggaccgcgccgcgctcgcctcgctgttgcggcagctcgaattcaagtcgctgttgaaacggctcggactcgacggcacgtccgccgatgccgacgtcgacggcgtccgttcctccgcgcggccggcggacgagaaacggccgagggccgtcgccgtcgctgaggagggcgtcgacgtccgctgtccggatcgcccggaagaagtcgaagaagcgctgtcgcggctggaagccgcccagtcggtcgtcgtcgaggtgacgggcgacaacccgcacgacggcgaagtgcgcggcgtcgcatggtgggacggacatacggcgtatttcattccgtttgaacggctggtgcagtccgacatgcggccgctggccgactggctcgccgacgcgcgtcggccgaagcgtacgcacgactcccatcgcgctgaagtggcgctgttctggcacggccttgcgtttcgcggcacgtcgttctgcacgcatatcgccgcctatttgctcgaccccacggaatcgcgccatacgctggcggacctgtcgcgccgctacggtctgccgccggtaccggaagccgaggacgtttacggcaagggcgcgaagttcaaggttcccgatcgcgacacgctggcgcgttacgtcggccgcaaggccgccctagtcgcgcggctcgttccgctgctcgaggcggatttggcggcctgcggcatgcgttcgcttttttacgacctggagctgccgctttcatccgaactcgccgtcatggagacggtcggcgtccgcgtcgacgcggcggcgctcgccgcctacggcgaggaattgcgcgaggcggcggcgaaagtcgagcgggagatttacgagctggccgggacgacgttcaacatcggatcgacgaaacagctcggcgaaattttgttcgataagctggggctgcccgtcgtcaagaaaacgaaaaccggctattccaccgacgcagacgtgctggaggaactggcgccgtaccatccgatcgtcgaaaagattttgcattaccgccaactgacgaaattgcagtcgacctacatcgaggggcttttgaaagaaatccgtccgcaaaccggtaaaatccatacgtattatcagcagacgatcgcggcgacggggcggctgagcagtcagtttcccaatcttcagaacattccgatccgtctcgaagaggggcggaaaatccgcaaggcgttcgttccgtcagaaccgggatggctgatgctcgccgccgactattcgcagatcgaactgcgcgtgctcgcgcacgtttccggcgacgaacggctgaaggaagcgtttcggacaggcatggacatccacacgaagaccgcgatggacgtgttcggcgtttccgaagaccgcgtcgacgcgcgcatgcggcggcaggcgaaggcggtcaatttcggcatcatctacggcatcagcgatttcggactggcgcaaaacctgaacatttcccgcaaggaggcggcggagttcatccggcaatatttcgccgtcttttcgggcgtcaaggcgtaccgcgagcggatcgtcgagcaggcgcgccgcgacggttacgtgacgaccctgctcggtcgcaggcgctatttgccggacatcaacgcgtcgaattactctctccgctcgttcgcggagcggacggcgatgaatacgccgatccagggcacggccgccgacatcatcaagaccgcgatggtgcgtctgacgcggcggatgcgcgacgtcggactgaagagccgcatgctgctgcaggttcacgacgagctcgtgtttgaagtgccgccggacgagctcgacgcgatgcgggagcttgtgacggacgtcatggagtcggcggtcccgctcgacgtgccgctgaaggtcgacgtcagctggggcgccgactggtacgcggcgaagtgagggaagcgggatcc

SEQ ID NO: 1241 - DNA, 2792 bp, Artificial Sequence
  Description of Artificial Sequence: Synthetic Caldibacillus cellulovorans CompA.2 DNA Polymerase N831T
atgaaatacctgctgccgaccgctgctgctggtctgctgctcctcgctgcccagccggcgatggccatgggcaaactgattctggtcgacggaaacagcgtcgccaaccgggcgttttacgccgtccggctgctcagcacgcgcggcggcctgcacacaaacgcggtgtacggattcgccaacatgttgctcaagctgatcgaggaggaacggccgacgcattttctcgtcgcgttcgacgcgggcaaggcgacgttccgtcatcgcgaatacgaggcctacaaggcgggtcgcctgcagacgccgcccgagctgtccgagcagtttccgtacatccgggagctcgtccgggcgttcggcgtcgcgtccggcgagctggaggaatacgaggcggacgacatgatcggtacgctggcgaaacgggcggaggccgagggcgtcgacacgctggtcgtcaccggcgaccgcgatttgctccagctcgtatcggaccgcgtgaccgtcgcgctgacgcgcaagggcatcacggaaacggagcggtacgacccggcgcgcatccgcgaggaatacggcttcgatcccgaccgcatccgcgacctcaaagggctgatgggcgacgcgtctgacaatcttcccggcgttcccggcgtcggtgagaaaaccgcactgaaactgctcaggcagtacggttcgctggagagcgtcctggaacacgcgtcggaaatcgccggaaagctcggtgaaaatctgcgggcgcacgccgacgccgcccgattgagcaagcggctggcgacgatcgactgcgcggtaccgttgcagtcgggatgggactggctgcgcctcggcgaaccggaccgcgccgcgctcgcctcgctgttgcggcagctcgaattcaagtcgctgttgaaacggctcggactcgacggcacgtccgccgatgccgacgtcgacggcgtccgttcctccgcgcggccggcggacgagaaacggccgagggccgtcgccgtcgctgaggagggcgtcgacgtccgctgtccggatcgcccggaagaagtcgaagaagcgctgtcgcggctggaagccgcccagtcggtcgtcgtcgaggtgacgggcgacaacccgcacgacggcgaagtgcgcggcgtcgcatggtgggacggacatacggcgtatttcattccgtttgaacggctggtgcagtccgacatgcggccgctggccgactggctcgccgacgcgcgtcggccgaagcgtacgcacgactcccatcgcgctgaagtggcgctgttctggcacggccttgcgtttcgcggcacgtcgttctgcacgcatatcgccgcctatttgctcgaccccacggaatcgcgccatacgctggcggacctgtcgcgccgctacggtctgccgccggtaccggaagccgaggacgtttacggcaagggcgcgaagttcaaggttcccgatcgcgacacgctggcgcgttacgtcggccgcaaggccgccctagtcgcgcggctcgttccgctgctcgaggcggatttggcggcctgcggcatgcgttcgcttttttacgacctggagctgccgctttcatccgaactcgccgtcatggagacggtcggcgtccgcgtcgacgcggcggcgctcgccgcctacggcgaggaattgcgcgaggcggcggcgaaagtcgagcgggagatttacgagctggccgggacgacgttcaacatcggatcgacgaaacagctcggcgaaattttgttcgataagctggggctgcccgtcgtcaagaaaacgaaaaccggctattccaccgacgcagacgtgctggaggaactggcgccgtaccatccgatcgtcgaaaagattttgcattaccgccaactgacgaaattgcagtcgacctacatcgaggggcttttgaaagaaatccgtccgcaaaccggtaaaatccatacgtattatcagcagacgatcgcggcgacggggcggctgagcagtcagtttcccaatcttcagaacattccgatccgtctcgaagaggggcggaaaatccgcaaggcgttcgttccgtcagaaccgggatggctgatgctcgccgccgactattcgcagatcgaactgcgcgtgctcgcgcacgtttccggcgacgaacggctgaaggaagcgtttcggacaggcatggacatccacacgaagaccgcgatggacgtgttcggcgtttccgaagaccgcgtcgacgcgcgcatgcggcggcaggcgaaggcggtcaatttcggcatcatctacggcatcagcgatttcggactggcgcaaaacctgaacatttcccgcaaggaggcggcggagttcatccggcaatatttcgccgtcttttcgggcgtcaaggcgtaccgcgagcggatcgtcgagcaggcgcgccgcgacggttacgtgacgaccctgctcggtcgcaggcgctatttgccggacatcaacgcgtcgaattacactctccgctcgttcgcggagcggacggcgatgaatacgccgatccagggcacggccgccgacatcatcaagaccgcgatggtgcgtctgacgcggcggatgcgcgacgtcggactgaagagccgcatgctgctgcaggttcacgacgagctcgtgtttgaagtgccgccggacgagctcgacgcgatgcgggagcttgtgacggacgtcatggagtcggcggtcccgctcgacgtgccgctgaaggtcgacgtcagctggggcgccgactggtacgcggcgaagtgagggaagcgggatcc

SEQ ID NO: 1242 - DNA, 2792 bp, Artificial Sequence
  Description of Artificial Sequence: Synthetic Caldibacillus cellulovorans CompA.2 DNA Polymerase N831W
atgaaatacctgctgccgaccgctgctgctggtctgctgctcctcgctgcccagccggcgatggccatgggcaaactgattctggtcgacggaaacagcgtcgccaaccgggcgttttacgccgtccggctgctcagcacgcgcggcggcctgcacacaaacgcggtgtacggattcgccaacatgttgctcaagctgatcgaggaggaacggccgacgcattttctcgtcgcgttcgacgcgggcaaggcgacgttccgtcatcgcgaatacgaggcctacaaggcgggtcgcctgcagacgccgcccgagctgtccgagcagtttccgtacatccgggagctcgtccgggcgttcggcgtcgcgtccggcgagctggaggaatacgaggcggacgacatgatcggtacgctggcgaaacgggcggaggccgagggcgtcgacacgctggtcgtcaccggcgaccgcgatttgctccagctcgtatcggaccgcgtgaccgtcgcgctgacgcgcaagggcatcacggaaacggagcggtacgacccggcgcgcatccgcgaggaatacggcttcgatcccgaccgcatccgcgacctcaaagggctgatgggcgacgcgtctgacaatcttcccggcgttcccggcgtcggtgagaaaaccgcactgaaactgctcaggcagtacggttcgctggagagcgtcctggaacacgcgtcggaaatcgccggaaagctcggtgaaaatctgcgggcgcacgccgacgccgcccgattgagcaagcggctggcgacgatcgactgcgcggtaccgttgcagtcgggatgggactggctgcgcctcggcgaaccggaccgcgccgcgctcgcctcgctgttgcggcagctcgaattcaagtcgctgttgaaacggctcggactcgacggcacgtccgccgatgccgacgtcgacggcgtccgttcctccgcgcggccggcggacgagaaacggccgagggccgtcgccgtcgctgaggagggcgtcgacgtccgctgtccggatcgcccggaagaagtcgaagaagcgctgtcgcggctggaagccgcccagtcggtcgtcgtcgaggtgacgggcgacaacccgcacgacggcgaagtgcgcggcgtcgcatggtgggacggacatacggcgtatttcattccgtttgaacggctggtgcagtccgacatgcggccgctggccgactggctcgccgacgcgcgtcggccgaagcgtacgcacgactcccatcgcgctgaagtggcgctgttctggcacggccttgcgtttcgcggcacgtcgttctgcacgcatatcgccgcctatttgctcgaccccacggaatcgcgccatacgctggcggacctgtcgcgccgctacggtctgccgccggtaccggaagccgaggacgtttacggcaagggcgcgaagttcaaggttcccgatcgcgacacgctggcgcgttacgtcggccgcaaggccgccctagtcgcgcggctcgttccgctgctcgaggcggatttggcggcctgcggcatgcgttcgcttttttacgacctggagctgccgctttcatccgaactcgccgtcatggagacggtcggcgtccgcgtcgacgcggcggcgctcgccgcctacggcgaggaattgcgcgaggcggcggcgaaagtcgagcgggagatttacgagctggccgggacgacgttcaacatcggatcgacgaaacagctcggcgaaattttgttcgataagctggggctgcccgtcgtcaagaaaacgaaaaccggctattccaccgacgcagacgtgctggaggaactggcgccgtaccatccgatcgtcgaaaagattttgcattaccgccaactgacgaaattgcagtcgacctacatcgaggggcttttgaaagaaatccgtccgcaaaccggtaaaatccatacgtattatcagcagacgatcgcggcgacggggcggctgagcagtcagtttcccaatcttcagaacattccgatccgtctcgaagaggggcggaaaatccgcaaggcgttcgttccgtcagaaccgggatggctgatgctcgccgccgactattcgcagatcgaactgcgcgtgctcgcgcacgtttccggcgacgaacggctgaaggaagcgtttcggacaggcatggacatccacacgaagaccgcgatggacgtgttcggcgtttccgaagaccgcgtcgacgcgcgcatgcggcggcaggcgaaggcggtcaatttcggcatcatctacggcatcagcgatttcggactggcgcaaaacctgaacatttcccgcaaggaggcggcggagttcatccggcaatatttcgccgtcttttcgggcgtcaaggcgtaccgcgagcggatcgtcgagcaggcgcgccgcgacggttacgtgacgaccctgctcggtcgcaggcgctatttgccggacatcaacgcgtcgaattactggctccgctcgttcgcggagcggacggcgatgaatacgccgatccagggcacggccgccgacatcatcaagaccgcgatggtgcgtctgacgcggcggatgcgcgacgtcggactgaagagccgcatgctgctgcaggttcacgacgagctcgtgtttgaagtgccgccggacgagctcgacgcgatgcgggagcttgtgacggacgtcatggagtcggcggtcccgctcgacgtgccgctgaaggtcgacgtcagctggggcgccgactggtacgcggcgaagtgagggaagcgggatcc

SEQ ID NO: 1243 - DNA, 2792 bp, Artificial Sequence
  Description of Artificial Sequence: Synthetic Caldibacillus cellulovorans CompA.2 DNA Polymerase N831Y
atgaaatacctgctgccgaccgctgctgctggtctgctgctcctcgctgcccagccggcgatggccatgggcaaactgattctggtcgacggaaacagcgtcgccaaccgggcgttttacgccgtccggctgctcagcacgcgcggcggcctgcacacaaacgcggtgtacggattcgccaacatgttgctcaagctgatcgaggaggaacggccgacgcattttctcgtcgcgttcgacgcgggcaaggcgacgttccgtcatcgcgaatacgaggcctacaaggcgggtcgcctgcagacgccgcccgagctgtccgagcagtttccgtacatccgggagctcgtccgggcgttcggcgtcgcgtccggcgagctggaggaatacgaggcggacgacatgatcggtacgctggcgaaacgggcggaggccgagggcgtcgacacgctggtcgtcaccggcgaccgcgatttgctccagctcgtatcggaccgcgtgaccgtcgcgctgacgcgcaagggcatcacggaaacggagcggtacgacccggcgcgcatccgcgaggaatacggcttcgatcccgaccgcatccgcgacctcaaagggctgatgggcgacgcgtctgacaatcttcccggcgttcccggcgtcggtgagaaaaccgcactgaaactgctcaggcagtacggttcgctggagagcgtcctggaacacgcgtcggaaatcgccggaaagctcggtgaaaatctgcgggcgcacgccgacgccgcccgattgagcaagcggctggcgacgatcgactgcgcggtaccgttgcagtcgggatgggactggctgcgcctcggcgaaccggaccgcgccgcgctcgcctcgctgttgcggcagctcgaattcaagtcgctgttgaaacggctcggactcgacggcacgtccgccgatgccgacgtcgacggcgtccgttcctccgcgcggccggcggacgagaaacggccgagggccgtcgccgtcgctgaggagggcgtcgacgtccgctgtccggatcgcccggaagaagtcgaagaagcgctgtcgcggctggaagccgcccagtcggtcgtcgtcgaggtgacgggcgacaacccgcacgacggcgaagtgcgcggcgtcgcatggtgggacggacatacggcgtatttcattccgtttgaacggctggtgcagtccgacatgcggccgctggccgactggctcgccgacgcgcgtcggccgaagcgtacgcacgactcccatcgcgctgaagtggcgctgttctggcacggccttgcgtttcgcggcacgtcgttctgcacgcatatcgccgcctatttgctcgaccccacggaatcgcgccatacgctggcggacctgtcgcgccgctacggtctgccgccggtaccggaagccgaggacgtttacggcaagggcgcgaagttcaaggttcccgatcgcgacacgctggcgcgttacgtcggccgcaaggccgccctagtcgcgcggctcgttccgctgctcgaggcggatttggcggcctgcggcatgcgttcgcttttttacgacctggagctgccgctttcatccgaactcgccgtcatggagacggtcggcgtccgcgtcgacgcggcggcgctcgccgcctacggcgaggaattgcgcgaggcggcggcgaaagtcgagcgggagatttacgagctggccgggacgacgttcaacatcggatcgacgaaacagctcggcgaaattttgttcgataagctggggctgcccgtcgtcaagaaaacgaaaaccggctattccaccgacgcagacgtgctggaggaactggcgccgtaccatccgatcgtcgaaaagattttgcattaccgccaactgacgaaattgcagtcgacctacatcgaggggcttttgaaagaaatccgtccgcaaaccggtaaaatccatacgtattatcagcagacgatcgcggcgacggggcggctgagcagtcagtttcccaatcttcagaacattccgatccgtctcgaagaggggcggaaaatccgcaaggcgttcgttccgtcagaaccgggatggctgatgctcgccgccgactattcgcagatcgaactgcgcgtgctcgcgcacgtttccggcgacgaacggctgaaggaagcgtttcggacaggcatggacatccacacgaagaccgcgatggacgtgttcggcgtttccgaagaccgcgtcgacgcgcgcatgcggcggcaggcgaaggcggtcaatttcggcatcatctacggcatcagcgatttcggactggcgcaaaacctgaacatttcccgcaaggaggcggcggagttcatccggcaatatttcgccgtcttttcgggcgtcaaggcgtaccgcgagcggatcgtcgagcaggcgcgccgcgacggttacgtgacgaccctgctcggtcgcaggcgctatttgccggacatcaacgcgtcgaattactatctccgctcgttcgcggagcggacggcgatgaatacgccgatccagggcacggccgccgacatcatcaagaccgcgatggtgcgtctgacgcggcggatgcgcgacgtcggactgaagagccgcatgctgctgcaggttcacgacgagctcgtgtttgaagtgccgccggacgagctcgacgcgatgcgggagcttgtgacggacgtcatggagtcggcggtcccgctcgacgtgccgctgaaggtcgacgtcagctggggcgccgactggtacgcggcgaagtgagggaagcgggatcc

SEQ ID NO: 1244 - DNA, 2792 bp, Artificial Sequence
  Description of Artificial Sequence: Synthetic Caldibacillus cellulovorans CompA.2 DNA Polymerase N831V
atgaaatacctgctgccgaccgctgctgctggtctgctgctcctcgctgcccagccggcgatggccatgggcaaactgattctggtcgacggaaacagcgtcgccaaccgggcgttttacgccgtccggctgctcagcacgcgcggcggcctgcacacaaacgcggtgtacggattcgccaacatgttgctcaagctgatcgaggaggaacggccgacgcattttctcgtcgcgttcgacgcgggcaaggcgacgttccgtcatcgcgaatacgaggcctacaaggcgggtcgcctgcagacgccgcccgagctgtccgagcagtttccgtacatccgggagctcgtccgggcgttcggcgtcgcgtccggcgagctggaggaatacgaggcggacgacatgatcggtacgctggcgaaacgggcggaggccgagggcgtcgacacgctggtcgtcaccggcgaccgcgatttgctccagctcgtatcggaccgcgtgaccgtcgcgctgacgcgcaagggcatcacggaaacggagcggtacgacccggcgcgcatccgcgaggaatacggcttcgatcccgaccgcatccgcgacctcaaagggctgatgggcgacgcgtctgacaatcttcccggcgttcccggcgtcggtgagaaaaccgcactgaaactgctcaggcagtacggttcgctggagagcgtcctggaacacgcgtcggaaatcgccggaaagctcggtgaaaatctgcgggcgcacgccgacgccgcccgattgagcaagcggctggcgacgatcgactgcgcggtaccgttgcagtcgggatgggactggctgcgcctcggcgaaccggaccgcgccgcgctcgcctcgctgttgcggcagctcgaattcaagtcgctgttgaaacggctcggactcgacggcacgtccgccgatgccgacgtcgacggcgtccgttcctccgcgcggccggcggacgagaaacggccgagggccgtcgccgtcgctgaggagggcgtcgacgtccgctgtccggatcgcccggaagaagtcgaagaagcgctgtcgcggctggaagccgcccagtcggtcgtcgtcgaggtgacgggcgacaacccgcacgacggcgaagtgcgcggcgtcgcatggtgggacggacatacggcgtatttcattccgtttgaacggctggtgcagtccgacatgcggccgctggccgactggctcgccgacgcgcgtcggccgaagcgtacgcacgactcccatcgcgctgaagtggcgctgttctggcacggccttgcgtttcgcggcacgtcgttctgcacgcatatcgccgcctatttgctcgaccccacggaatcgcgccatacgctggcggacctgtcgcgccgctacggtctgccgccggtaccggaagccgaggacgtttacggcaagggcgcgaagttcaaggttcccgatcgcgacacgctggcgcgttacgtcggccgcaaggccgccctagtcgcgcggctcgttccgctgctcgaggcggatttggcggcctgcggcatgcgttcgcttttttacgacctggagctgccgctttcatccgaactcgccgtcatggagacggtcggcgtccgcgtcgacgcggcggcgctcgccgcctacggcgaggaattgcgcgaggcggcggcgaaagtcgagcgggagatttacgagctggccgggacgacgttcaacatcggatcgacgaaacagctcggcgaaattttgttcgataagctggggctgcccgtcgtcaagaaaacgaaaaccggctattccaccgacgcagacgtgctggaggaactggcgccgtaccatccgatcgtcgaaaagattttgcattaccgccaactgacgaaattgcagtcgacctacatcgaggggcttttgaaagaaatccgtccgcaaaccggtaaaatccatacgtattatcagcagacgatcgcggcgacggggcggctgagcagtcagtttcccaatcttcagaacattccgatccgtctcgaagaggggcggaaaatccgcaaggcgttcgttccgtcagaaccgggatggctgatgctcgccgccgactattcgcagatcgaactgcgcgtgctcgcgcacgtttccggcgacgaacggctgaaggaagcgtttcggacaggcatggacatccacacgaagaccgcgatggacgtgttcggcgtttccgaagaccgcgtcgacgcgcgcatgcggcggcaggcgaaggcggtcaatttcggcatcatctacggcatcagcgatttcggactggcgcaaaacctgaacatttcccgcaaggaggcggcggagttcatccggcaatatttcgccgtcttttcgggcgtcaaggcgtaccgcgagcggatcgtcgagcaggcgcgccgcgacggttacgtgacgaccctgctcggtcgcaggcgctatttgccggacatcaacgcgtcgaattacgttctccgctcgttcgcggagcggacggcgatgaatacgccgatccagggcacggccgccgacatcatcaagaccgcgatggtgcgtctgacgcggcggatgcgcgacgtcggactgaagagccgcatgctgctgcaggttcacgacgagctcgtgtttgaagtgccgccggacgagctcgacgcgatgcgggagcttgtgacggacgtcatggagtcggcggtcccgctcgacgtgccgctgaaggtcgacgtcagctggggcgccgactggtacgcggcgaagtgagggaagcgggatcc

SEQ ID NO: 1245 - DNA, 2792 bp, Artificial Sequence
  Description of Artificial Sequence: Synthetic Caldibacillus cellulovorans CompA.2 DNA Polymerase L832A
atgaaatacctgctgccgaccgctgctgctggtctgctgctcctcgctgcccagccggcgatggccatgggcaaactgattctggtcgacggaaacagcgtcgccaaccgggcgttttacgccgtccggctgctcagcacgcgcggcggcctgcacacaaacgcggtgtacggattcgccaacatgttgctcaagctgatcgaggaggaacggccgacgcattttctcgtcgcgttcgacgcgggcaaggcgacgttccgtcatcgcgaatacgaggcctacaaggcgggtcgcctgcagacgccgcccgagctgtccgagcagtttccgtacatccgggagctcgtccgggcgttcggcgtcgcgtccggcgagctggaggaatacgaggcggacgacatgatcggtacgctggcgaaacgggcggaggccgagggcgtcgacacgctggtcgtcaccggcgaccgcgatttgctccagctcgtatcggaccgcgtgaccgtcgcgctgacgcgcaagggcatcacggaaacggagcggtacgacccggcgcgcatccgcgaggaatacggcttcgatcccgaccgcatccgcgacctcaaagggctgatgggcgacgcgtctgacaatcttcccggcgttcccggcgtcggtgagaaaaccgcactgaaactgctcaggcagtacggttcgctggagagcgtcctggaacacgcgtcggaaatcgccggaaagctcggtgaaaatctgcgggcgcacgccgacgccgcccgattgagcaagcggctggcgacgatcgactgcgcggtaccgttgcagtcgggatgggactggctgcgcctcggcgaaccggaccgcgccgcgctcgcctcgctgttgcggcagctcgaattcaagtcgctgttgaaacggctcggactcgacggcacgtccgccgatgccgacgtcgacggcgtccgttcctccgcgcggccggcggacgagaaacggccgagggccgtcgccgtcgctgaggagggcgtcgacgtccgctgtccggatcgcccggaagaagtcgaagaagcgctgtcgcggctggaagccgcccagtcggtcgtcgtcgaggtgacgggcgacaacccgcacgacggcgaagtgcgcggcgtcgcatggtgggacggacatacggcgtatttcattccgtttgaacggctggtgcagtccgacatgcggccgctggccgactggctcgccgacgcgcgtcggccgaagcgtacgcacgactcccatcgcgctgaagtggcgctgttctggcacggccttgcgtttcgcggcacgtcgttctgcacgcatatcgccgcctatttgctcgaccccacggaatcgcgccatacgctggcggacctgtcgcgccgctacggtctgccgccggtaccggaagccgaggacgtttacggcaagggcgcgaagttcaaggttcccgatcgcgacacgctggcgcgttacgtcggccgcaaggccgccctagtcgcgcggctcgttccgctgctcgaggcggatttggcggcctgcggcatgcgttcgcttttttacgacctggagctgccgctttcatccgaactcgccgtcatggagacggtcggcgtccgcgtcgacgcggcggcgctcgccgcctacggcgaggaattgcgcgaggcggcggcgaaagtcgagcgggagatttacgagctggccgggacgacgttcaacatcggatcgacgaaacagctcggcgaaattttgttcgataagctggggctgcccgtcgtcaagaaaacgaaaaccggctattccaccgacgcagacgtgctggaggaactggcgccgtaccatccgatcgtcgaaaagattttgcattaccgccaactgacgaaattgcagtcgacctacatcgaggggcttttgaaagaaatccgtccgcaaaccggtaaaatccatacgtattatcagcagacgatcgcggcgacggggcggctgagcagtcagtttcccaatcttcagaacattccgatccgtctcgaagaggggcggaaaatccgcaaggcgttcgttccgtcagaaccgggatggctgatgctcgccgccgactattcgcagatcgaactgcgcgtgctcgcgcacgtttccggcgacgaacggctgaaggaagcgtttcggacaggcatggacatccacacgaagaccgcgatggacgtgttcggcgtttccgaagaccgcgtcgacgcgcgcatgcggcggcaggcgaaggcggtcaatttcggcatcatctacggcatcagcgatttcggactggcgcaaaacctgaacatttcccgcaaggaggcggcggagttcatccggcaatatttcgccgtcttttcgggcgtcaaggcgtaccgcgagcggatcgtcgagcaggcgcgccgcgacggttacgtgacgaccctgctcggtcgcaggcgctatttgccggacatcaacgcgtcgaattacaacgctcgctcgttcgcggagcggacggcgatgaatacgccgatccagggcacggccgccgacatcatcaagaccgcgatggtgcgtctgacgcggcggatgcgcgacgtcggactgaagagccgcatgctgctgcaggttcacgacgagctcgtgtttgaagtgccgccggacgagctcgacgcgatgcgggagcttgtgacggacgtcatggagtcggcggtcccgctcgacgtgccgctgaaggtcgacgtcagctggggcgccgactggtacgcggcgaagtgagggaagcgggatcc

SEQ ID NO: 1246 - DNA, 2792 bp, Artificial Sequence
  Description of Artificial Sequence: Synthetic Caldibacillus cellulovorans CompA.2 DNA Polymerase L832R
atgaaatacctgctgccgaccgctgctgctggtctgctgctcctcgctgcccagccggcgatggccatgggcaaactgattctggtcgacggaaacagcgtcgccaaccgggcgttttacgccgtccggctgctcagcacgcgcggcggcctgcacacaaacgcggtgtacggattcgccaacatgttgctcaagctgatcgaggaggaacggccgacgcattttctcgtcgcgttcgacgcgggcaaggcgacgttccgtcatcgcgaatacgaggcctacaaggcgggtcgcctgcagacgccgcccgagctgtccgagcagtttccgtacatccgggagctcgtccgggcgttcggcgtcgcgtccggcgagctggaggaatacgaggcggacgacatgatcggtacgctggcgaaacgggcggaggccgagggcgtcgacacgctggtcgtcaccggcgaccgcgatttgctccagctcgtatcggaccgcgtgaccgtcgcgctgacgcgcaagggcatcacggaaacggagcggtacgacccggcgcgcatccgcgaggaatacggcttcgatcccgaccgcatccgcgacctcaaagggctgatgggcgacgcgtctgacaatcttcccggcgttcccggcgtcggtgagaaaaccgcactgaaactgctcaggcagtacggttcgctggagagcgtcctggaacacgcgtcggaaatcgccggaaagctcggtgaaaatctgcgggcgcacgccgacgccgcccgattgagcaagcggctggcgacgatcgactgcgcggtaccgttgcagtcgggatgggactggctgcgcctcggcgaaccggaccgcgccgcgctcgcctcgctgttgcggcagctcgaattcaagtcgctgttgaaacggctcggactcgacggcacgtccgccgatgccgacgtcgacggcgtccgttcctccgcgcggccggcggacgagaaacggccgagggccgtcgccgtcgctgaggagggcgtcgacgtccgctgtccggatcgcccggaagaagtcgaagaagcgctgtcgcggctggaagccgcccagtcggtcgtcgtcgaggtgacgggcgacaacccgcacgacggcgaagtgcgcggcgtcgcatggtgggacggacatacggcgtatttcattccgtttgaacggctggtgcagtccgacatgcggccgctggccgactggctcgccgacgcgcgtcggccgaagcgtacgcacgactcccatcgcgctgaagtggcgctgttctggcacggccttgcgtttcgcggcacgtcgttctgcacgcatatcgccgcctatttgctcgaccccacggaatcgcgccatacgctggcggacctgtcgcgccgctacggtctgccgccggtaccggaagccgaggacgtttacggcaagggcgcgaagttcaaggttcccgatcgcgacacgctggcgcgttacgtcggccgcaaggccgccctagtcgcgcggctcgttccgctgctcgaggcggatttggcggcctgcggcatgcgttcgcttttttacgacctggagctgccgctttcatccgaactcgccgtcatggagacggtcggcgtccgcgtcgacgcggcggcgctcgccgcctacggcgaggaattgcgcgaggcggcggcgaaagtcgagcgggagatttacgagctggccgggacgacgttcaacatcggatcgacgaaacagctcggcgaaattttgttcgataagctggggctgcccgtcgtcaagaaaacgaaaaccggctattccaccgacgcagacgtgctggaggaactggcgccgtaccatccgatcgtcgaaaagattttgcattaccgccaactgacgaaattgcagtcgacctacatcgaggggcttttgaaagaaatccgtccgcaaaccggtaaaatccatacgtattatcagcagacgatcgcggcgacggggcggctgagcagtcagtttcccaatcttcagaacattccgatccgtctcgaagaggggcggaaaatccgcaaggcgttcgttccgtcagaaccgggatggctgatgctcgccgccgactattcgcagatcgaactgcgcgtgctcgcgcacgtttccggcgacgaacggctgaaggaagcgtttcggacaggcatggacatccacacgaagaccgcgatggacgtgttcggcgtttccgaagaccgcgtcgacgcgcgcatgcggcggcaggcgaaggcggtcaatttcggcatcatctacggcatcagcgatttcggactggcgcaaaacctgaacatttcccgcaaggaggcggcggagttcatccggcaatatttcgccgtcttttcgggcgtcaaggcgtaccgcgagcggatcgtcgagcaggcgcgccgcgacggttacgtgacgaccctgctcggtcgcaggcgctatttgccggacatcaacgcgtcgaattacaaccgtcgctcgttcgcggagcggacggcgatgaatacgccgatccagggcacggccgccgacatcatcaagaccgcgatggtgcgtctgacgcggcggatgcgcgacgtcggactgaagagccgcatgctgctgcaggttcacgacgagctcgtgtttgaagtgccgccggacgagctcgacgcgatgcgggagcttgtgacggacgtcatggagtcggcggtcccgctcgacgtgccgctgaaggtcgacgtcagctggggcgccgactggtacgcggcgaagtgagggaagcgggatcc

SEQ ID NO: 1247 - DNA, 2792 bp, Artificial Sequence
  Description of Artificial Sequence: Synthetic Caldibacillus cellulovorans CompA.2 DNA Polymerase L832N
atgaaatacctgctgccgaccgctgctgctggtctgctgctcctcgctgcccagccggcgatggccatgggcaaactgattctggtcgacggaaacagcgtcgccaaccgggcgttttacgccgtccggctgctcagcacgcgcggcggcctgcacacaaacgcggtgtacggattcgccaacatgttgctcaagctgatcgaggaggaacggccgacgcattttctcgtcgcgttcgacgcgggcaaggcgacgttccgtcatcgcgaatacgaggcctacaaggcgggtcgcctgcagacgccgcccgagctgtccgagcagtttccgtacatccgggagctcgtccgggcgttcggcgtcgcgtccggcgagctggaggaatacgaggcggacgacatgatcggtacgctggcgaaacgggcggaggccgagggcgtcgacacgctggtcgtcaccggcgaccgcgatttgctccagctcgtatcggaccgcgtgaccgtcgcgctgacgcgcaagggcatcacggaaacggagcggtacgacccggcgcgcatccgcgaggaatacggcttcgatcccgaccgcatccgcgacctcaaagggctgatgggcgacgcgtctgacaatcttcccggcgttcccggcgtcggtgagaaaaccgcactgaaactgctcaggcagtacggttcgctggagagcgtcctggaacacgcgtcggaaatcgccggaaagctcggtgaaaatctgcgggcgcacgccgacgccgcccgattgagcaagcggctggcgacgatcgactgcgcggtaccgttgcagtcgggatgggactggctgcgcctcggcgaaccggaccgcgccgcgctcgcctcgctgttgcggcagctcgaattcaagtcgctgttgaaacggctcggactcgacggcacgtccgccgatgccgacgtcgacggcgtccgttcctccgcgcggccggcggacgagaaacggccgagggccgtcgccgtcgctgaggagggcgtcgacgtccgctgtccggatcgcccggaagaagtcgaagaagcgctgtcgcggctggaagccgcccagtcggtcgtcgtcgaggtgacgggcgacaacccgcacgacggcgaagtgcgcggcgtcgcatggtgggacggacatacggcgtatttcattccgtttgaacggctggtgcagtccgacatgcggccgctggccgactggctcgccgacgcgcgtcggccgaagcgtacgcacgactcccatcgcgctgaagtggcgctgttctggcacggccttgcgtttcgcggcacgtcgttctgcacgcatatcgccgcctatttgctcgaccccacggaatcgcgccatacgctggcggacctgtcgcgccgctacggtctgccgccggtaccggaagccgaggacgtttacggcaagggcgcgaagttcaaggttcccgatcgcgacacgctggcgcgttacgtcggccgcaaggccgccctagtcgcgcggctcgttccgctgctcgaggcggatttggcggcctgcggcatgcgttcgcttttttacgacctggagctgccgctttcatccgaactcgccgtcatggagacggtcggcgtccgcgtcgacgcggcggcgctcgccgcctacggcgaggaattgcgcgaggcggcggcgaaagtcgagcgggagatttacgagctggccgggacgacgttcaacatcggatcgacgaaacagctcggcgaaattttgttcgataagctggggctgcccgtcgtcaagaaaacgaaaaccggctattccaccgacgcagacgtgctggaggaactggcgccgtaccatccgatcgtcgaaaagattttgcattaccgccaactgacgaaattgcagtcgacctacatcgaggggcttttgaaagaaatccgtccgcaaaccggtaaaatccatacgtattatcagcagacgatcgcggcgacggggcggctgagcagtcagtttcccaatcttcagaacattccgatccgtctcgaagaggggcggaaaatccgcaaggcgttcgttccgtcagaaccgggatggctgatgctcgccgccgactattcgcagatcgaactgcgcgtgctcgcgcacgtttccggcgacgaacggctgaaggaagcgtttcggacaggcatggacatccacacgaagaccgcgatggacgtgttcggcgtttccgaagaccgcgtcgacgcgcgcatgcggcggcaggcgaaggcggtcaatttcggcatcatctacggcatcagcgatttcggactggcgcaaaacctgaacatttcccgcaaggaggcggcggagttcatccggcaatatttcgccgtcttttcgggcgtcaaggcgtaccgcgagcggatcgtcgagcaggcgcgccgcgacggttacgtgacgaccctgctcggtcgcaggcgctatttgccggacatcaacgcgtcgaattacaacaatcgctcgttcgcggagcggacggcgatgaatacgccgatccagggcacggccgccgacatcatcaagaccgcgatggtgcgtctgacgcggcggatgcgcgacgtcggactgaagagccgcatgctgctgcaggttcacgacgagctcgtgtttgaagtgccgccggacgagctcgacgcgatgcgggagcttgtgacggacgtcatggagtcggcggtcccgctcgacgtgccgctgaaggtcgacgtcagctggggcgccgactggtacgcggcgaagtgagggaagcgggatcc

SEQ ID NO: 1248 - DNA, 2792 bp, Artificial Sequence
  Description of Artificial Sequence: Synthetic Caldibacillus cellulovorans CompA.2 DNA Polymerase L832D
atgaaatacctgctgccgaccgctgctgctggtctgctgctcctcgctgcccagccggcgatggccatgggcaaactgattctggtcgacggaaacagcgtcgccaaccgggcgttttacgccgtccggctgctcagcacgcgcggcggcctgcacacaaacgcggtgtacggattcgccaacatgttgctcaagctgatcgaggaggaacggccgacgcattttctcgtcgcgttcgacgcgggcaaggcgacgttccgtcatcgcgaatacgaggcctacaaggcgggtcgcctgcagacgccgcccgagctgtccgagcagtttccgtacatccgggagctcgtccgggcgttcggcgtcgcgtccggcgagctggaggaatacgaggcggacgacatgatcggtacgctggcgaaacgggcggaggccgagggcgtcgacacgctggtcgtcaccggcgaccgcgatttgctccagctcgtatcggaccgcgtgaccgtcgcgctgacgcgcaagggcatcacggaaacggagcggtacgacccggcgcgcatccgcgaggaatacggcttcgatcccgaccgcatccgcgacctcaaagggctgatgggcgacgcgtctgacaatcttcccggcgttcccggcgtcggtgagaaaaccgcactgaaactgctcaggcagtacggttcgctggagagcgtcctggaacacgcgtcggaaatcgccggaaagctcggtgaaaatctgcgggcgcacgccgacgccgcccgattgagcaagcggctggcgacgatcgactgcgcggtaccgttgcagtcgggatgggactggctgcgcctcggcgaaccggaccgcgccgcgctcgcctcgctgttgcggcagctcgaattcaagtcgctgttgaaacggctcggactcgacggcacgtccgccgatgccgacgtcgacggcgtccgttcctccgcgcggccggcggacgagaaacggccgagggccgtcgccgtcgctgaggagggcgtcgacgtccgctgtccggatcgcccggaagaagtcgaagaagcgctgtcgcggctggaagccgcccagtcggtcgtcgtcgaggtgacgggcgacaacccgcacgacggcgaagtgcgcggcgtcgcatggtgggacggacatacggcgtatttcattccgtttgaacggctggtgcagtccgacatgcggccgctggccgactggctcgccgacgcgcgtcggccgaagcgtacgcacgactcccatcgcgctgaagtggcgctgttctggcacggccttgcgtttcgcggcacgtcgttctgcacgcatatcgccgcctatttgctcgaccccacggaatcgcgccatacgctggcggacctgtcgcgccgctacggtctgccgccggtaccggaagccgaggacgtttacggcaagggcgcgaagttcaaggttcccgatcgcgacacgctggcgcgttacgtcggccgcaaggccgccctagtcgcgcggctcgttccgctgctcgaggcggatttggcggcctgcggcatgcgttcgcttttttacgacctggagctgccgctttcatccgaactcgccgtcatggagacggtcggcgtccgcgtcgacgcggcggcgctcgccgcctacggcgaggaattgcgcgaggcggcggcgaaagtcgagcgggagatttacgagctggccgggacgacgttcaacatcggatcgacgaaacagctcggcgaaattttgttcgataagctggggctgcccgtcgtcaagaaaacgaaaaccggctattccaccgacgcagacgtgctggaggaactggcgccgtaccatccgatcgtcgaaaagattttgcattaccgccaactgacgaaattgcagtcgacctacatcgaggggcttttgaaagaaatccgtccgcaaaccggtaaaatccatacgtattatcagcagacgatcgcggcgacggggcggctgagcagtcagtttcccaatcttcagaacattccgatccgtctcgaagaggggcggaaaatccgcaaggcgttcgttccgtcagaaccgggatggctgatgctcgccgccgactattcgcagatcgaactgcgcgtgctcgcgcacgtttccggcgacgaacggctgaaggaagcgtttcggacaggcatggacatccacacgaagaccgcgatggacgtgttcggcgtttccgaagaccgcgtcgacgcgcgcatgcggcggcaggcgaaggcggtcaatttcggcatcatctacggcatcagcgatttcggactggcgcaaaacctgaacatttcccgcaaggaggcggcggagttcatccggcaatatttcgccgtcttttcgggcgtcaaggcgtaccgcgagcggatcgtcgagcaggcgcgccgcgacggttacgtgacgaccctgctcggtcgcaggcgctatttgccggacatcaacgcgtcgaattacaacgatcgctcgttcgcggagcggacggcgatgaatacgccgatccagggcacggccgccgacatcatcaagaccgcgatggtgcgtctgacgcggcggatgcgcgacgtcggactgaagagccgcatgctgctgcaggttcacgacgagctcgtgtttgaagtgccgccggacgagctcgacgcgatgcgggagcttgtgacggacgtcatggagtcggcggtcccgctcgacgtgccgctgaaggtcgacgtcagctggggcgccgactggtacgcggcgaagtgagggaagcgggatcc

SEQ ID NO: 1249 - DNA, 2792 bp, Artificial Sequence
  Description of Artificial Sequence: Synthetic Caldibacillus cellulovorans CompA.2 DNA Polymerase L832C
atgaaatacctgctgccgaccgctgctgctggtctgctgctcctcgctgcccagccggcgatggccatgggcaaactgattctggtcgacggaaacagcgtcgccaaccgggcgttttacgccgtccggctgctcagcacgcgcggcggcctgcacacaaacgcggtgtacggattcgccaacatgttgctcaagctgatcgaggaggaacggccgacgcattttctcgtcgcgttcgacgcgggcaaggcgacgttccgtcatcgcgaatacgaggcctacaaggcgggtcgcctgcagacgccgcccgagctgtccgagcagtttccgtacatccgggagctcgtccgggcgttcggcgtcgcgtccggcgagctggaggaatacgaggcggacgacatgatcggtacgctggcgaaacgggcggaggccgagggcgtcgacacgctggtcgtcaccggcgaccgcgatttgctccagctcgtatcggaccgcgtgaccgtcgcgctgacgcgcaagggcatcacggaaacggagcggtacgacccggcgcgcatccgcgaggaatacggcttcgatcccgaccgcatccgcgacctcaaagggctgatgggcgacgcgtctgacaatcttcccggcgttcccggcgtcggtgagaaaaccgcactgaaactgctcaggcagtacggttcgctggagagcgtcctggaacacgcgtcggaaatcgccggaaagctcggtgaaaatctgcgggcgcacgccgacgccgcccgattgagcaagcggctggcgacgatcgactgcgcggtaccgttgcagtcgggatgggactggctgcgcctcggcgaaccggaccgcgccgcgctcgcctcgctgttgcggcagctcgaattcaagtcgctgttgaaacggctcggactcgacggcacgtccgccgatgccgacgtcgacggcgtccgttcctccgcgcggccggcggacgagaaacggccgagggccgtcgccgtcgctgaggagggcgtcgacgtccgctgtccggatcgcccggaagaagtcgaagaagcgctgtcgcggctggaagccgcccagtcggtcgtcgtcgaggtgacgggcgacaacccgcacgacggcgaagtgcgcggcgtcgcatggtgggacggacatacggcgtatttcattccgtttgaacggctggtgcagtccgacatgcggccgctggccgactggctcgccgacgcgcgtcggccgaagcgtacgcacgactcccatcgcgctgaagtggcgctgttctggcacggccttgcgtttcgcggcacgtcgttctgcacgcatatcgccgcctatttgctcgaccccacggaatcgcgccatacgctggcggacctgtcgcgccgctacggtctgccgccggtaccggaagccgaggacgtttacggcaagggcgcgaagttcaaggttcccgatcgcgacacgctggcgcgttacgtcggccgcaaggccgccctagtcgcgcggctcgttccgctgctcgaggcggatttggcggcctgcggcatgcgttcgcttttttacgacctggagctgccgctttcatccgaactcgccgtcatggagacggtcggcgtccgcgtcgacgcggcggcgctcgccgcctacggcgaggaattgcgcgaggcggcggcgaaagtcgagcgggagatttacgagctggccgggacgacgttcaacatcggatcgacgaaacagctcggcgaaattttgttcgataagctggggctgcccgtcgtcaagaaaacgaaaaccggctattccaccgacgcagacgtgctggaggaactggcgccgtaccatccgatcgtcgaaaagattttgcattaccgccaactgacgaaattgcagtcgacctacatcgaggggcttttgaaagaaatccgtccgcaaaccggtaaaatccatacgtattatcagcagacgatcgcggcgacggggcggctgagcagtcagtttcccaatcttcagaacattccgatccgtctcgaagaggggcggaaaatccgcaaggcgttcgttccgtcagaaccgggatggctgatgctcgccgccgactattcgcagatcgaactgcgcgtgctcgcgcacgtttccggcgacgaacggctgaaggaagcgtttcggacaggcatggacatccacacgaagaccgcgatggacgtgttcggcgtttccgaagaccgcgtcgacgcgcgcatgcggcggcaggcgaaggcggtcaatttcggcatcatctacggcatcagcgatttcggactggcgcaaaacctgaacatttcccgcaaggaggcggcggagttcatccggcaatatttcgccgtcttttcgggcgtcaaggcgtaccgcgagcggatcgtcgagcaggcgcgccgcgacggttacgtgacgaccctgctcggtcgcaggcgctatttgccggacatcaacgcgtcgaattacaactgtcgctcgttcgcggagcggacggcgatgaatacgccgatccagggcacggccgccgacatcatcaagaccgcgatggtgcgtctgacgcggcggatgcgcgacgtcggactgaagagccgcatgctgctgcaggttcacgacgagctcgtgtttgaagtgccgccggacgagctcgacgcgatgcgggagcttgtgacggacgtcatggagtcggcggtcccgctcgacgtgccgctgaaggtcgacgtcagctggggcgccgactggtacgcggcgaagtgagggaagcgggatcc

SEQ ID NO: 1250 - DNA, 2792 bp, Artificial Sequence
  Description of Artificial Sequence: Synthetic Caldibacillus cellulovorans CompA.2 DNA Polymerase L832E
atgaaatacctgctgccgaccgctgctgctggtctgctgctcctcgctgcccagccggcgatggccatgggcaaactgattctggtcgacggaaacagcgtcgccaaccgggcgttttacgccgtccggctgctcagcacgcgcggcggcctgcacacaaacgcggtgtacggattcgccaacatgttgctcaagctgatcgaggaggaacggccgacgcattttctcgtcgcgttcgacgcgggcaaggcgacgttccgtcatcgcgaatacgaggcctacaaggcgggtcgcctgcagacgccgcccgagctgtccgagcagtttccgtacatccgggagctcgtccgggcgttcggcgtcgcgtccggcgagctggaggaatacgaggcggacgacatgatcggtacgctggcgaaacgggcggaggccgagggcgtcgacacgctggtcgtcaccggcgaccgcgatttgctccagctcgtatcggaccgcgtgaccgtcgcgctgacgcgcaagggcatcacggaaacggagcggtacgacccggcgcgcatccgcgaggaatacggcttcgatcccgaccgcatccgcgacctcaaagggctgatgggcgacgcgtctgacaatcttcccggcgttcccggcgtcggtgagaaaaccgcactgaaactgctcaggcagtacggttcgctggagagcgtcctggaacacgcgtcggaaatcgccggaaagctcggtgaaaatctgcgggcgcacgccgacgccgcccgattgagcaagcggctggcgacgatcgactgcgcggtaccgttgcagtcgggatgggactggctgcgcctcggcgaaccggaccgcgccgcgctcgcctcgctgttgcggcagctcgaattcaagtcgctgttgaaacggctcggactcgacggcacgtccgccgatgccgacgtcgacggcgtccgttcctccgcgcggccggcggacgagaaacggccgagggccgtcgccgtcgctgaggagggcgtcgacgtccgctgtccggatcgcccggaagaagtcgaagaagcgctgtcgcggctggaagccgcccagtcggtcgtcgtcgaggtgacgggcgacaacccgcacgacggcgaagtgcgcggcgtcgcatggtgggacggacatacggcgtatttcattccgtttgaacggctggtgcagtccgacatgcggccgctggccgactggctcgccgacgcgcgtcggccgaagcgtacgcacgactcccatcgcgctgaagtggcgctgttctggcacggccttgcgtttcgcggcacgtcgttctgcacgcatatcgccgcctatttgctcgaccccacggaatcgcgccatacgctggcggacctgtcgcgccgctacggtctgccgccggtaccggaagccgaggacgtttacggcaagggcgcgaagttcaaggttcccgatcgcgacacgctggcgcgttacgtcggccgcaaggccgccctagtcgcgcggctcgttccgctgctcgaggcggatttggcggcctgcggcatgcgttcgcttttttacgacctggagctgccgctttcatccgaactcgccgtcatggagacggtcggcgtccgcgtcgacgcggcggcgctcgccgcctacggcgaggaattgcgcgaggcggcggcgaaagtcgagcgggagatttacgagctggccgggacgacgttcaacatcggatcgacgaaacagctcggcgaaattttgttcgataagctggggctgcccgtcgtcaagaaaacgaaaaccggctattccaccgacgcagacgtgctggaggaactggcgccgtaccatccgatcgtcgaaaagattttgcattaccgccaactgacgaaattgcagtcgacctacatcgaggggcttttgaaagaaatccgtccgcaaaccggtaaaatccatacgtattatcagcagacgatcgcggcgacggggcggctgagcagtcagtttcccaatcttcagaacattccgatccgtctcgaagaggggcggaaaatccgcaaggcgttcgttccgtcagaaccgggatggctgatgctcgccgccgactattcgcagatcgaactgcgcgtgctcgcgcacgtttccggcgacgaacggctgaaggaagcgtttcggacaggcatggacatccacacgaagaccgcgatggacgtgttcggcgtttccgaagaccgcgtcgacgcgcgcatgcggcggcaggcgaaggcggtcaatttcggcatcatctacggcatcagcgatttcggactggcgcaaaacctgaacatttcccgcaaggaggcggcggagttcatccggcaatatttcgccgtcttttcgggcgtcaaggcgtaccgcgagcggatcgtcgagcaggcgcgccgcgacggttacgtgacgaccctgctcggtcgcaggcgctatttgccggacatcaacgcgtcgaattacaacgaacgctcgttcgcggagcggacggcgatgaatacgccgatccagggcacggccgccgacatcatcaagaccgcgatggtgcgtctgacgcggcggatgcgcgacgtcggactgaagagccgcatgctgctgcaggttcacgacgagctcgtgtttgaagtgccgccggacgagctcgacgcgatgcgggagcttgtgacggacgtcatggagtcggcggtcccgctcgacgtgccgctgaaggtcgacgtcagctggggcgccgactggtacgcggcgaagtgagggaagcgggatcc

SEQ ID NO: 1251 - DNA, 2792 bp, Artificial Sequence
  Description of Artificial Sequence: Synthetic Caldibacillus cellulovorans CompA.2 DNA Polymerase L832Q
atgaaatacctgctgccgaccgctgctgctggtctgctgctcctcgctgcccagccggcgatggccatgggcaaactgattctggtcgacggaaacagcgtcgccaaccgggcgttttacgccgtccggctgctcagcacgcgcggcggcctgcacacaaacgcggtgtacggattcgccaacatgttgctcaagctgatcgaggaggaacggccgacgcattttctcgtcgcgttcgacgcgggcaaggcgacgttccgtcatcgcgaatacgaggcctacaaggcgggtcgcctgcagacgccgcccgagctgtccgagcagtttccgtacatccgggagctcgtccgggcgttcggcgtcgcgtccggcgagctggaggaatacgaggcggacgacatgatcggtacgctggcgaaacgggcggaggccgagggcgtcgacacgctggtcgtcaccggcgaccgcgatttgctccagctcgtatcggaccgcgtgaccgtcgcgctgacgcgcaagggcatcacggaaacggagcggtacgacccggcgcgcatccgcgaggaatacggcttcgatcccgaccgcatccgcgacctcaaagggctgatgggcgacgcgtctgacaatcttcccggcgttcccggcgtcggtgagaaaaccgcactgaaactgctcaggcagtacggttcgctggagagcgtcctggaacacgcgtcggaaatcgccggaaagctcggtgaaaatctgcgggcgcacgccgacgccgcccgattgagcaagcggctggcgacgatcgactgcgcggtaccgttgcagtcgggatgggactggctgcgcctcggcgaaccggaccgcgccgcgctcgcctcgctgttgcggcagctcgaattcaagtcgctgttgaaacggctcggactcgacggcacgtccgccgatgccgacgtcgacggcgtccgttcctccgcgcggccggcggacgagaaacggccgagggccgtcgccgtcgctgaggagggcgtcgacgtccgctgtccggatcgcccggaagaagtcgaagaagcgctgtcgcggctggaagccgcccagtcggtcgtcgtcgaggtgacgggcgacaacccgcacgacggcgaagtgcgcggcgtcgcatggtgggacggacatacggcgtatttcattccgtttgaacggctggtgcagtccgacatgcggccgctggccgactggctcgccgacgcgcgtcggccgaagcgtacgcacgactcccatcgcgctgaagtggcgctgttctggcacggccttgcgtttcgcggcacgtcgttctgcacgcatatcgccgcctatttgctcgaccccacggaatcgcgccatacgctggcggacctgtcgcgccgctacggtctgccgccggtaccggaagccgaggacgtttacggcaagggcgcgaagttcaaggttcccgatcgcgacacgctggcgcgttacgtcggccgcaaggccgccctagtcgcgcggctcgttccgctgctcgaggcggatttggcggcctgcggcatgcgttcgcttttttacgacctggagctgccgctttcatccgaactcgccgtcatggagacggtcggcgtccgcgtcgacgcggcggcgctcgccgcctacggcgaggaattgcgcgaggcggcggcgaaagtcgagcgggagatttacgagctggccgggacgacgttcaacatcggatcgacgaaacagctcggcgaaattttgttcgataagctggggctgcccgtcgtcaagaaaacgaaaaccggctattccaccgacgcagacgtgctggaggaactggcgccgtaccatccgatcgtcgaaaagattttgcattaccgccaactgacgaaattgcagtcgacctacatcgaggggcttttgaaagaaatccgtccgcaaaccggtaaaatccatacgtattatcagcagacgatcgcggcgacggggcggctgagcagtcagtttcccaatcttcagaacattccgatccgtctcgaagaggggcggaaaatccgcaaggcgttcgttccgtcagaaccgggatggctgatgctcgccgccgactattcgcagatcgaactgcgcgtgctcgcgcacgtttccggcgacgaacggctgaaggaagcgtttcggacaggcatggacatccacacgaagaccgcgatggacgtgttcggcgtttccgaagaccgcgtcgacgcgcgcatgcggcggcaggcgaaggcggtcaatttcggcatcatctacggcatcagcgatttcggactggcgcaaaacctgaacatttcccgcaaggaggcggcggagttcatccggcaatatttcgccgtcttttcgggcgtcaaggcgtaccgcgagcggatcgtcgagcaggcgcgccgcgacggttacgtgacgaccctgctcggtcgcaggcgctatttgccggacatcaacgcgtcgaattacaaccaacgctcgttcgcggagcggacggcgatgaatacgccgatccagggcacggccgccgacatcatcaagaccgcgatggtgcgtctgacgcggcggatgcgcgacgtcggactgaagagccgcatgctgctgcaggttcacgacgagctcgtgtttgaagtgccgccggacgagctcgacgcgatgcgggagcttgtgacggacgtcatggagtcggcggtcccgctcgacgtgccgctgaaggtcgacgtcagctggggcgccgactggtacgcggcgaagtgagggaagcgggatcc

SEQ ID NO: 1252 - DNA, 2792 bp, Artificial Sequence
  Description of Artificial Sequence: Synthetic Caldibacillus cellulovorans CompA.2 DNA Polymerase L832G
atgaaatacctgctgccgaccgctgctgctggtctgctgctcctcgctgcccagccggcgatggccatgggcaaactgattctggtcgacggaaacagcgtcgccaaccgggcgttttacgccgtccggctgctcagcacgcgcggcggcctgcacacaaacgcggtgtacggattcgccaacatgttgctcaagctgatcgaggaggaacggccgacgcattttctcgtcgcgttcgacgcgggcaaggcgacgttccgtcatcgcgaatacgaggcctacaaggcgggtcgcctgcagacgccgcccgagctgtccgagcagtttccgtacatccgggagctcgtccgggcgttcggcgtcgcgtccggcgagctggaggaatacgaggcggacgacatgatcggtacgctggcgaaacgggcggaggccgagggcgtcgacacgctggtcgtcaccggcgaccgcgatttgctccagctcgtatcggaccgcgtgaccgtcgcgctgacgcgcaagggcatcacggaaacggagcggtacgacccggcgcgcatccgcgaggaatacggcttcgatcccgaccgcatccgcgacctcaaagggctgatgggcgacgcgtctgacaatcttcccggcgttcccggcgtcggtgagaaaaccgcactgaaactgctcaggcagtacggttcgctggagagcgtcctggaacacgcgtcggaaatcgccggaaagctcggtgaaaatctgcgggcgcacgccgacgccgcccgattgagcaagcggctggcgacgatcgactgcgcggtaccgttgcagtcgggatgggactggctgcgcctcggcgaaccggaccgcgccgcgctcgcctcgctgttgcggcagctcgaattcaagtcgctgttgaaacggctcggactcgacggcacgtccgccgatgccgacgtcgacggcgtccgttcctccgcgcggccggcggacgagaaacggccgagggccgtcgccgtcgctgaggagggcgtcgacgtccgctgtccggatcgcccggaagaagtcgaagaagcgctgtcgcggctggaagccgcccagtcggtcgtcgtcgaggtgacgggcgacaacccgcacgacggcgaagtgcgcggcgtcgcatggtgggacggacatacggcgtatttcattccgtttgaacggctggtgcagtccgacatgcggccgctggccgactggctcgccgacgcgcgtcggccgaagcgtacgcacgactcccatcgcgctgaagtggcgctgttctggcacggccttgcgtttcgcggcacgtcgttctgcacgcatatcgccgcctatttgctcgaccccacggaatcgcgccatacgctggcggacctgtcgcgccgctacggtctgccgccggtaccggaagccgaggacgtttacggcaagggcgcgaagttcaaggttcccgatcgcgacacgctggcgcgttacgtcggccgcaaggccgccctagtcgcgcggctcgttccgctgctcgaggcggatttggcggcctgcggcatgcgttcgcttttttacgacctggagctgccgctttcatccgaactcgccgtcatggagacggtcggcgtccgcgtcgacgcggcggcgctcgccgcctacggcgaggaattgcgcgaggcggcggcgaaagtcgagcgggagatttacgagctggccgggacgacgttcaacatcggatcgacgaaacagctcggcgaaattttgttcgataagctggggctgcccgtcgtcaagaaaacgaaaaccggctattccaccgacgcagacgtgctggaggaactggcgccgtaccatccgatcgtcgaaaagattttgcattaccgccaactgacgaaattgcagtcgacctacatcgaggggcttttgaaagaaatccgtccgcaaaccggtaaaatccatacgtattatcagcagacgatcgcggcgacggggcggctgagcagtcagtttcccaatcttcagaacattccgatccgtctcgaagaggggcggaaaatccgcaaggcgttcgttccgtcagaaccgggatggctgatgctcgccgccgactattcgcagatcgaactgcgcgtgctcgcgcacgtttccggcgacgaacggctgaaggaagcgtttcggacaggcatggacatccacacgaagaccgcgatggacgtgttcggcgtttccgaagaccgcgtcgacgcgcgcatgcggcggcaggcgaaggcggtcaatttcggcatcatctacggcatcagcgatttcggactggcgcaaaacctgaacatttcccgcaaggaggcggcggagttcatccggcaatatttcgccgtcttttcgggcgtcaaggcgtaccgcgagcggatcgtcgagcaggcgcgccgcgacggttacgtgacgaccctgctcggtcgcaggcgctatttgccggacatcaacgcgtcgaattacaacggtcgctcgttcgcggagcggacggcgatgaatacgccgatccagggcacggccgccgacatcatcaagaccgcgatggtgcgtctgacgcggcggatgcgcgacgtcggactgaagagccgcatgctgctgcaggttcacgacgagctcgtgtttgaagtgccgccggacgagctcgacgcgatgcgggagcttgtgacggacgtcatggagtcggcggtcccgctcgacgtgccgctgaaggtcgacgtcagctggggcgccgactggtacgcggcgaagtgagggaagcgggatcc

SEQ ID NO: 1253 - DNA, 2792 bp, Artificial Sequence
  Description of Artificial Sequence: Synthetic Caldibacillus cellulovorans CompA.2 DNA Polymerase L832H
atgaaatacctgctgccgaccgctgctgctggtctgctgctcctcgctgcccagccggcgatggccatgggcaaactgattctggtcgacggaaacagcgtcgccaaccgggcgttttacgccgtccggctgctcagcacgcgcggcggcctgcacacaaacgcggtgtacggattcgccaacatgttgctcaagctgatcgaggaggaacggccgacgcattttctcgtcgcgttcgacgcgggcaaggcgacgttccgtcatcgcgaatacgaggcctacaaggcgggtcgcctgcagacgccgcccgagctgtccgagcagtttccgtacatccgggagctcgtccgggcgttcggcgtcgcgtccggcgagctggaggaatacgaggcggacgacatgatcggtacgctggcgaaacgggcggaggccgagggcgtcgacacgctggtcgtcaccggcgaccgcgatttgctccagctcgtatcggaccgcgtgaccgtcgcgctgacgcgcaagggcatcacggaaacggagcggtacgacccggcgcgcatccgcgaggaatacggcttcgatcccgaccgcatccgcgacctcaaagggctgatgggcgacgcgtctgacaatcttcccggcgttcccggcgtcggtgagaaaaccgcactgaaactgctcaggcagtacggttcgctggagagcgtcctggaacacgcgtcggaaatcgccggaaagctcggtgaaaatctgcgggcgcacgccgacgccgcccgattgagcaagcggctggcgacgatcgactgcgcggtaccgttgcagtcgggatgggactggctgcgcctcggcgaaccggaccgcgccgcgctcgcctcgctgttgcggcagctcgaattcaagtcgctgttgaaacggctcggactcgacggcacgtccgccgatgccgacgtcgacggcgtccgttcctccgcgcggccggcggacgagaaacggccgagggccgtcgccgtcgctgaggagggcgtcgacgtccgctgtccggatcgcccggaagaagtcgaagaagcgctgtcgcggctggaagccgcccagtcggtcgtcgtcgaggtgacgggcgacaacccgcacgacggcgaagtgcgcggcgtcgcatggtgggacggacatacggcgtatttcattccgtttgaacggctggtgcagtccgacatgcggccgctggccgactggctcgccgacgcgcgtcggccgaagcgtacgcacgactcccatcgcgctgaagtggcgctgttctggcacggccttgcgtttcgcggcacgtcgttctgcacgcatatcgccgcctatttgctcgaccccacggaatcgcgccatacgctggcggacctgtcgcgccgctacggtctgccgccggtaccggaagccgaggacgtttacggcaagggcgcgaagttcaaggttcccgatcgcgacacgctggcgcgttacgtcggccgcaaggccgccctagtcgcgcggctcgttccgctgctcgaggcggatttggcggcctgcggcatgcgttcgcttttttacgacctggagctgccgctttcatccgaactcgccgtcatggagacggtcggcgtccgcgtcgacgcggcggcgctcgccgcctacggcgaggaattgcgcgaggcggcggcgaaagtcgagcgggagatttacgagctggccgggacgacgttcaacatcggatcgacgaaacagctcggcgaaattttgttcgataagctggggctgcccgtcgtcaagaaaacgaaaaccggctattccaccgacgcagacgtgctggaggaactggcgccgtaccatccgatcgtcgaaaagattttgcattaccgccaactgacgaaattgcagtcgacctacatcgaggggcttttgaaagaaatccgtccgcaaaccggtaaaatccatacgtattatcagcagacgatcgcggcgacggggcggctgagcagtcagtttcccaatcttcagaacattccgatccgtctcgaagaggggcggaaaatccgcaaggcgttcgttccgtcagaaccgggatggctgatgctcgccgccgactattcgcagatcgaactgcgcgtgctcgcgcacgtttccggcgacgaacggctgaaggaagcgtttcggacaggcatggacatccacacgaagaccgcgatggacgtgttcggcgtttccgaagaccgcgtcgacgcgcgcatgcggcggcaggcgaaggcggtcaatttcggcatcatctacggcatcagcgatttcggactggcgcaaaacctgaacatttcccgcaaggaggcggcggagttcatccggcaatatttcgccgtcttttcgggcgtcaaggcgtaccgcgagcggatcgtcgagcaggcgcgccgcgacggttacgtgacgaccctgctcggtcgcaggcgctatttgccggacatcaacgcgtcgaattacaaccatcgctcgttcgcggagcggacggcgatgaatacgccgatccagggcacggccgccgacatcatcaagaccgcgatggtgcgtctgacgcggcggatgcgcgacgtcggactgaagagccgcatgctgctgcaggttcacgacgagctcgtgtttgaagtgccgccggacgagctcgacgcgatgcgggagcttgtgacggacgtcatggagtcggcggtcccgctcgacgtgccgctgaaggtcgacgtcagctggggcgccgactggtacgcggcgaagtgagggaagcgggatcc

SEQ ID NO: 1254 - DNA, 2792 bp, Artificial Sequence
  Description of Artificial Sequence: Synthetic Caldibacillus cellulovorans CompA.2 DNA Polymerase L832I
atgaaatacctgctgccgaccgctgctgctggtctgctgctcctcgctgcccagccggcgatggccatgggcaaactgattctggtcgacggaaacagcgtcgccaaccgggcgttttacgccgtccggctgctcagcacgcgcggcggcctgcacacaaacgcggtgtacggattcgccaacatgttgctcaagctgatcgaggaggaacggccgacgcattttctcgtcgcgttcgacgcgggcaaggcgacgttccgtcatcgcgaatacgaggcctacaaggcgggtcgcctgcagacgccgcccgagctgtccgagcagtttccgtacatccgggagctcgtccgggcgttcggcgtcgcgtccggcgagctggaggaatacgaggcggacgacatgatcggtacgctggcgaaacgggcggaggccgagggcgtcgacacgctggtcgtcaccggcgaccgcgatttgctccagctcgtatcggaccgcgtgaccgtcgcgctgacgcgcaagggcatcacggaaacggagcggtacgacccggcgcgcatccgcgaggaatacggcttcgatcccgaccgcatccgcgacctcaaagggctgatgggcgacgcgtctgacaatcttcccggcgttcccggcgtcggtgagaaaaccgcactgaaactgctcaggcagtacggttcgctggagagcgtcctggaacacgcgtcggaaatcgccggaaagctcggtgaaaatctgcgggcgcacgccgacgccgcccgattgagcaagcggctggcgacgatcgactgcgcggtaccgttgcagtcgggatgggactggctgcgcctcggcgaaccggaccgcgccgcgctcgcctcgctgttgcggcagctcgaattcaagtcgctgttgaaacggctcggactcgacggcacgtccgccgatgccgacgtcgacggcgtccgttcctccgcgcggccggcggacgagaaacggccgagggccgtcgccgtcgctgaggagggcgtcgacgtccgctgtccggatcgcccggaagaagtcgaagaagcgctgtcgcggctggaagccgcccagtcggtcgtcgtcgaggtgacgggcgacaacccgcacgacggcgaagtgcgcggcgtcgcatggtgggacggacatacggcgtatttcattccgtttgaacggctggtgcagtccgacatgcggccgctggccgactggctcgccgacgcgcgtcggccgaagcgtacgcacgactcccatcgcgctgaagtggcgctgttctggcacggccttgcgtttcgcggcacgtcgttctgcacgcatatcgccgcctatttgctcgaccccacggaatcgcgccatacgctggcggacctgtcgcgccgctacggtctgccgccggtaccggaagccgaggacgtttacggcaagggcgcgaagttcaaggttcccgatcgcgacacgctggcgcgttacgtcggccgcaaggccgccctagtcgcgcggctcgttccgctgctcgaggcggatttggcggcctgcggcatgcgttcgcttttttacgacctggagctgccgctttcatccgaactcgccgtcatggagacggtcggcgtccgcgtcgacgcggcggcgctcgccgcctacggcgaggaattgcgcgaggcggcggcgaaagtcgagcgggagatttacgagctggccgggacgacgttcaacatcggatcgacgaaacagctcggcgaaattttgttcgataagctggggctgcccgtcgtcaagaaaacgaaaaccggctattccaccgacgcagacgtgctggaggaactggcgccgtaccatccgatcgtcgaaaagattttgcattaccgccaactgacgaaattgcagtcgacctacatcgaggggcttttgaaagaaatccgtccgcaaaccggtaaaatccatacgtattatcagcagacgatcgcggcgacggggcggctgagcagtcagtttcccaatcttcagaacattccgatccgtctcgaagaggggcggaaaatccgcaaggcgttcgttccgtcagaaccgggatggctgatgctcgccgccgactattcgcagatcgaactgcgcgtgctcgcgcacgtttccggcgacgaacggctgaaggaagcgtttcggacaggcatggacatccacacgaagaccgcgatggacgtgttcggcgtttccgaagaccgcgtcgacgcgcgcatgcggcggcaggcgaaggcggtcaatttcggcatcatctacggcatcagcgatttcggactggcgcaaaacctgaacatttcccgcaaggaggcggcggagttcatccggcaatatttcgccgtcttttcgggcgtcaaggcgtaccgcgagcggatcgtcgagcaggcgcgccgcgacggttacgtgacgaccctgctcggtcgcaggcgctatttgccggacatcaacgcgtcgaattacaacattcgctcgttcgcggagcggacggcgatgaatacgccgatccagggcacggccgccgacatcatcaagaccgcgatggtgcgtctgacgcggcggatgcgcgacgtcggactgaagagccgcatgctgctgcaggttcacgacgagctcgtgtttgaagtgccgccggacgagctcgacgcgatgcgggagcttgtgacggacgtcatggagtcggcggtcccgctcgacgtgccgctgaaggtcgacgtcagctggggcgccgactggtacgcggcgaagtgagggaagcgggatcc

SEQ ID NO: 1255 - DNA, 2792 bp, Artificial Sequence
  Description of Artificial Sequence: Synthetic Caldibacillus cellulovorans CompA.2 DNA Polymerase L832K
atgaaatacctgctgccgaccgctgctgctggtctgctgctcctcgctgcccagccggcgatggccatgggcaaactgattctggtcgacggaaacagcgtcgccaaccgggcgttttacgccgtccggctgctcagcacgcgcggcggcctgcacacaaacgcggtgtacggattcgccaacatgttgctcaagctgatcgaggaggaacggccgacgcattttctcgtcgcgttcgacgcgggcaaggcgacgttccgtcatcgcgaatacgaggcctacaaggcgggtcgcctgcagacgccgcccgagctgtccgagcagtttccgtacatccgggagctcgtccgggcgttcggcgtcgcgtccggcgagctggaggaatacgaggcggacgacatgatcggtacgctggcgaaacgggcggaggccgagggcgtcgacacgctggtcgtcaccggcgaccgcgatttgctccagctcgtatcggaccgcgtgaccgtcgcgctgacgcgcaagggcatcacggaaacggagcggtacgacccggcgcgcatccgcgaggaatacggcttcgatcccgaccgcatccgcgacctcaaagggctgatgggcgacgcgtctgacaatcttcccggcgttcccggcgtcggtgagaaaaccgcactgaaactgctcaggcagtacggttcgctggagagcgtcctggaacacgcgtcggaaatcgccggaaagctcggtgaaaatctgcgggcgcacgccgacgccgcccgattgagcaagcggctggcgacgatcgactgcgcggtaccgttgcagtcgggatgggactggctgcgcctcggcgaaccggaccgcgccgcgctcgcctcgctgttgcggcagctcgaattcaagtcgctgttgaaacggctcggactcgacggcacgtccgccgatgccgacgtcgacggcgtccgttcctccgcgcggccggcggacgagaaacggccgagggccgtcgccgtcgctgaggagggcgtcgacgtccgctgtccggatcgcccggaagaagtcgaagaagcgctgtcgcggctggaagccgcccagtcggtcgtcgtcgaggtgacgggcgacaacccgcacgacggcgaagtgcgcggcgtcgcatggtgggacggacatacggcgtatttcattccgtttgaacggctggtgcagtccgacatgcggccgctggccgactggctcgccgacgcgcgtcggccgaagcgtacgcacgactcccatcgcgctgaagtggcgctgttctggcacggccttgcgtttcgcggcacgtcgttctgcacgcatatcgccgcctatttgctcgaccccacggaatcgcgccatacgctggcggacctgtcgcgccgctacggtctgccgccggtaccggaagccgaggacgtttacggcaagggcgcgaagttcaaggttcccgatcgcgacacgctggcgcgttacgtcggccgcaaggccgccctagtcgcgcggctcgttccgctgctcgaggcggatttggcggcctgcggcatgcgttcgcttttttacgacctggagctgccgctttcatccgaactcgccgtcatggagacggtcggcgtccgcgtcgacgcggcggcgctcgccgcctacggcgaggaattgcgcgaggcggcggcgaaagtcgagcgggagatttacgagctggccgggacgacgttcaacatcggatcgacgaaacagctcggcgaaattttgttcgataagctggggctgcccgtcgtcaagaaaacgaaaaccggctattccaccgacgcagacgtgctggaggaactggcgccgtaccatccgatcgtcgaaaagattttgcattaccgccaactgacgaaattgcagtcgacctacatcgaggggcttttgaaagaaatccgtccgcaaaccggtaaaatccatacgtattatcagcagacgatcgcggcgacggggcggctgagcagtcagtttcccaatcttcagaacattccgatccgtctcgaagaggggcggaaaatccgcaaggcgttcgttccgtcagaaccgggatggctgatgctcgccgccgactattcgcagatcgaactgcgcgtgctcgcgcacgtttccggcgacgaacggctgaaggaagcgtttcggacaggcatggacatccacacgaagaccgcgatggacgtgttcggcgtttccgaagaccgcgtcgacgcgcgcatgcggcggcaggcgaaggcggtcaatttcggcatcatctacggcatcagcgatttcggactggcgcaaaacctgaacatttcccgcaaggaggcggcggagttcatccggcaatatttcgccgtcttttcgggcgtcaaggcgtaccgcgagcggatcgtcgagcaggcgcgccgcgacggttacgtgacgaccctgctcggtcgcaggcgctatttgccggacatcaacgcgtcgaattacaacaaacgctcgttcgcggagcggacggcgatgaatacgccgatccagggcacggccgccgacatcatcaagaccgcgatggtgcgtctgacgcggcggatgcgcgacgtcggactgaagagccgcatgctgctgcaggttcacgacgagctcgtgtttgaagtgccgccggacgagctcgacgcgatgcgggagcttgtgacggacgtcatggagtcggcggtcccgctcgacgtgccgctgaaggtcgacgtcagctggggcgccgactggtacgcggcgaagtgagggaagcgggatcc

SEQ ID NO: 1256 - DNA, 2792 bp, Artificial Sequence
  Description of Artificial Sequence: Synthetic Caldibacillus cellulovorans CompA.2 DNA Polymerase L832M
atgaaatacctgctgccgaccgctgctgctggtctgctgctcctcgctgcccagccggcgatggccatgggcaaactgattctggtcgacggaaacagcgtcgccaaccgggcgttttacgccgtccggctgctcagcacgcgcggcggcctgcacacaaacgcggtgtacggattcgccaacatgttgctcaagctgatcgaggaggaacggccgacgcattttctcgtcgcgttcgacgcgggcaaggcgacgttccgtcatcgcgaatacgaggcctacaaggcgggtcgcctgcagacgccgcccgagctgtccgagcagtttccgtacatccgggagctcgtccgggcgttcggcgtcgcgtccggcgagctggaggaatacgaggcggacgacatgatcggtacgctggcgaaacgggcggaggccgagggcgtcgacacgctggtcgtcaccggcgaccgcgatttgctccagctcgtatcggaccgcgtgaccgtcgcgctgacgcgcaagggcatcacggaaacggagcggtacgacccggcgcgcatccgcgaggaatacggcttcgatcccgaccgcatccgcgacctcaaagggctgatgggcgacgcgtctgacaatcttcccggcgttcccggcgtcggtgagaaaaccgcactgaaactgctcaggcagtacggttcgctggagagcgtcctggaacacgcgtcggaaatcgccggaaagctcggtgaaaatctgcgggcgcacgccgacgccgcccgattgagcaagcggctggcgacgatcgactgcgcggtaccgttgcagtcgggatgggactggctgcgcctcggcgaaccggaccgcgccgcgctcgcctcgctgttgcggcagctcgaattcaagtcgctgttgaaacggctcggactcgacggcacgtccgccgatgccgacgtcgacggcgtccgttcctccgcgcggccggcggacgagaaacggccgagggccgtcgccgtcgctgaggagggcgtcgacgtccgctgtccggatcgcccggaagaagtcgaagaagcgctgtcgcggctggaagccgcccagtcggtcgtcgtcgaggtgacgggcgacaacccgcacgacggcgaagtgcgcggcgtcgcatggtgggacggacatacggcgtatttcattccgtttgaacggctggtgcagtccgacatgcggccgctggccgactggctcgccgacgcgcgtcggccgaagcgtacgcacgactcccatcgcgctgaagtggcgctgttctggcacggccttgcgtttcgcggcacgtcgttctgcacgcatatcgccgcctatttgctcgaccccacggaatcgcgccatacgctggcggacctgtcgcgccgctacggtctgccgccggtaccggaagccgaggacgtttacggcaagggcgcgaagttcaaggttcccgatcgcgacacgctggcgcgttacgtcggccgcaaggccgccctagtcgcgcggctcgttccgctgctcgaggcggatttggcggcctgcggcatgcgttcgcttttttacgacctggagctgccgctttcatccgaactcgccgtcatggagacggtcggcgtccgcgtcgacgcggcggcgctcgccgcctacggcgaggaattgcgcgaggcggcggcgaaagtcgagcgggagatttacgagctggccgggacgacgttcaacatcggatcgacgaaacagctcggcgaaattttgttcgataagctggggctgcccgtcgtcaagaaaacgaaaaccggctattccaccgacgcagacgtgctggaggaactggcgccgtaccatccgatcgtcgaaaagattttgcattaccgccaactgacgaaattgcagtcgacctacatcgaggggcttttgaaagaaatccgtccgcaaaccggtaaaatccatacgtattatcagcagacgatcgcggcgacggggcggctgagcagtcagtttcccaatcttcagaacattccgatccgtctcgaagaggggcggaaaatccgcaaggcgttcgttccgtcagaaccgggatggctgatgctcgccgccgactattcgcagatcgaactgcgcgtgctcgcgcacgtttccggcgacgaacggctgaaggaagcgtttcggacaggcatggacatccacacgaagaccgcgatggacgtgttcggcgtttccgaagaccgcgtcgacgcgcgcatgcggcggcaggcgaaggcggtcaatttcggcatcatctacggcatcagcgatttcggactggcgcaaaacctgaacatttcccgcaaggaggcggcggagttcatccggcaatatttcgccgtcttttcgggcgtcaaggcgtaccgcgagcggatcgtcgagcaggcgcgccgcgacggttacgtgacgaccctgctcggtcgcaggcgctatttgccggacatcaacgcgtcgaattacaacatgcgctcgttcgcggagcggacggcgatgaatacgccgatccagggcacggccgccgacatcatcaagaccgcgatggtgcgtctgacgcggcggatgcgcgacgtcggactgaagagccgcatgctgctgcaggttcacgacgagctcgtgtttgaagtgccgccggacgagctcgacgcgatgcgggagcttgtgacggacgtcatggagtcggcggtcccgctcgacgtgccgctgaaggtcgacgtcagctggggcgccgactggtacgcggcgaagtgagggaagcgggatcc

SEQ ID NO: 1257 - DNA, 2792 bp, Artificial Sequence
  Description of Artificial Sequence: Synthetic Caldibacillus cellulovorans CompA.2 DNA Polymerase L832F
atgaaatacctgctgccgaccgctgctgctggtctgctgctcctcgctgcccagccggcgatggccatgggcaaactgattctggtcgacggaaacagcgtcgccaaccgggcgttttacgccgtccggctgctcagcacgcgcggcggcctgcacacaaacgcggtgtacggattcgccaacatgttgctcaagctgatcgaggaggaacggccgacgcattttctcgtcgcgttcgacgcgggcaaggcgacgttccgtcatcgcgaatacgaggcctacaaggcgggtcgcctgcagacgccgcccgagctgtccgagcagtttccgtacatccgggagctcgtccgggcgttcggcgtcgcgtccggcgagctggaggaatacgaggcggacgacatgatcggtacgctggcgaaacgggcggaggccgagggcgtcgacacgctggtcgtcaccggcgaccgcgatttgctccagctcgtatcggaccgcgtgaccgtcgcgctgacgcgcaagggcatcacggaaacggagcggtacgacccggcgcgcatccgcgaggaatacggcttcgatcccgaccgcatccgcgacctcaaagggctgatgggcgacgcgtctgacaatcttcccggcgttcccggcgtcggtgagaaaaccgcactgaaactgctcaggcagtacggttcgctggagagcgtcctggaacacgcgtcggaaatcgccggaaagctcggtgaaaatctgcgggcgcacgccgacgccgcccgattgagcaagcggctggcgacgatcgactgcgcggtaccgttgcagtcgggatgggactggctgcgcctcggcgaaccggaccgcgccgcgctcgcctcgctgttgcggcagctcgaattcaagtcgctgttgaaacggctcggactcgacggcacgtccgccgatgccgacgtcgacggcgtccgttcctccgcgcggccggcggacgagaaacggccgagggccgtcgccgtcgctgaggagggcgtcgacgtccgctgtccggatcgcccggaagaagtcgaagaagcgctgtcgcggctggaagccgcccagtcggtcgtcgtcgaggtgacgggcgacaacccgcacgacggcgaagtgcgcggcgtcgcatggtgggacggacatacggcgtatttcattccgtttgaacggctggtgcagtccgacatgcggccgctggccgactggctcgccgacgcgcgtcggccgaagcgtacgcacgactcccatcgcgctgaagtggcgctgttctggcacggccttgcgtttcgcggcacgtcgttctgcacgcatatcgccgcctatttgctcgaccccacggaatcgcgccatacgctggcggacctgtcgcgccgctacggtctgccgccggtaccggaagccgaggacgtttacggcaagggcgcgaagttcaaggttcccgatcgcgacacgctggcgcgttacgtcggccgcaaggccgccctagtcgcgcggctcgttccgctgctcgaggcggatttggcggcctgcggcatgcgttcgcttttttacgacctggagctgccgctttcatccgaactcgccgtcatggagacggtcggcgtccgcgtcgacgcggcggcgctcgccgcctacggcgaggaattgcgcgaggcggcggcgaaagtcgagcgggagatttacgagctggccgggacgacgttcaacatcggatcgacgaaacagctcggcgaaattttgttcgataagctggggctgcccgtcgtcaagaaaacgaaaaccggctattccaccgacgcagacgtgctggaggaactggcgccgtaccatccgatcgtcgaaaagattttgcattaccgccaactgacgaaattgcagtcgacctacatcgaggggcttttgaaagaaatccgtccgcaaaccggtaaaatccatacgtattatcagcagacgatcgcggcgacggggcggctgagcagtcagtttcccaatcttcagaacattccgatccgtctcgaagaggggcggaaaatccgcaaggcgttcgttccgtcagaaccgggatggctgatgctcgccgccgactattcgcagatcgaactgcgcgtgctcgcgcacgtttccggcgacgaacggctgaaggaagcgtttcggacaggcatggacatccacacgaagaccgcgatggacgtgttcggcgtttccgaagaccgcgtcgacgcgcgcatgcggcggcaggcgaaggcggtcaatttcggcatcatctacggcatcagcgatttcggactggcgcaaaacctgaacatttcccgcaaggaggcggcggagttcatccggcaatatttcgccgtcttttcgggcgtcaaggcgtaccgcgagcggatcgtcgagcaggcgcgccgcgacggttacgtgacgaccctgctcggtcgcaggcgctatttgccggacatcaacgcgtcgaattacaactttcgctcgttcgcggagcggacggcgatgaatacgccgatccagggcacggccgccgacatcatcaagaccgcgatggtgcgtctgacgcggcggatgcgcgacgtcggactgaagagccgcatgctgctgcaggttcacgacgagctcgtgtttgaagtgccgccggacgagctcgacgcgatgcgggagcttgtgacggacgtcatggagtcggcggtcccgctcgacgtgccgctgaaggtcgacgtcagctggggcgccgactggtacgcggcgaagtgagggaagcgggatcc

SEQ ID NO: 1258 - DNA, 2792 bp, Artificial Sequence
  Description of Artificial Sequence: Synthetic Caldibacillus cellulovorans CompA.2 DNA Polymerase L832P
atgaaatacctgctgccgaccgctgctgctggtctgctgctcctcgctgcccagccggcgatggccatgggcaaactgattctggtcgacggaaacagcgtcgccaaccgggcgttttacgccgtccggctgctcagcacgcgcggcggcctgcacacaaacgcggtgtacggattcgccaacatgttgctcaagctgatcgaggaggaacggccgacgcattttctcgtcgcgttcgacgcgggcaaggcgacgttccgtcatcgcgaatacgaggcctacaaggcgggtcgcctgcagacgccgcccgagctgtccgagcagtttccgtacatccgggagctcgtccgggcgttcggcgtcgcgtccggcgagctggaggaatacgaggcggacgacatgatcggtacgctggcgaaacgggcggaggccgagggcgtcgacacgctggtcgtcaccggcgaccgcgatttgctccagctcgtatcggaccgcgtgaccgtcgcgctgacgcgcaagggcatcacggaaacggagcggtacgacccggcgcgcatccgcgaggaatacggcttcgatcccgaccgcatccgcgacctcaaagggctgatgggcgacgcgtctgacaatcttcccggcgttcccggcgtcggtgagaaaaccgcactgaaactgctcaggcagtacggttcgctggagagcgtcctggaacacgcgtcggaaatcgccggaaagctcggtgaaaatctgcgggcgcacgccgacgccgcccgattgagcaagcggctggcgacgatcgactgcgcggtaccgttgcagtcgggatgggactggctgcgcctcggcgaaccggaccgcgccgcgctcgcctcgctgttgcggcagctcgaattcaagtcgctgttgaaacggctcggactcgacggcacgtccgccgatgccgacgtcgacggcgtccgttcctccgcgcggccggcggacgagaaacggccgagggccgtcgccgtcgctgaggagggcgtcgacgtccgctgtccggatcgcccggaagaagtcgaagaagcgctgtcgcggctggaagccgcccagtcggtcgtcgtcgaggtgacgggcgacaacccgcacgacggcgaagtgcgcggcgtcgcatggtgggacggacatacggcgtatttcattccgtttgaacggctggtgcagtccgacatgcggccgctggccgactggctcgccgacgcgcgtcggccgaagcgtacgcacgactcccatcgcgctgaagtggcgctgttctggcacggccttgcgtttcgcggcacgtcgttctgcacgcatatcgccgcctatttgctcgaccccacggaatcgcgccatacgctggcggacctgtcgcgccgctacggtctgccgccggtaccggaagccgaggacgtttacggcaagggcgcgaagttcaaggttcccgatcgcgacacgctggcgcgttacgtcggccgcaaggccgccctagtcgcgcggctcgttccgctgctcgaggcggatttggcggcctgcggcatgcgttcgcttttttacgacctggagctgccgctttcatccgaactcgccgtcatggagacggtcggcgtccgcgtcgacgcggcggcgctcgccgcctacggcgaggaattgcgcgaggcggcggcgaaagtcgagcgggagatttacgagctggccgggacgacgttcaacatcggatcgacgaaacagctcggcgaaattttgttcgataagctggggctgcccgtcgtcaagaaaacgaaaaccggctattccaccgacgcagacgtgctggaggaactggcgccgtaccatccgatcgtcgaaaagattttgcattaccgccaactgacgaaattgcagtcgacctacatcgaggggcttttgaaagaaatccgtccgcaaaccggtaaaatccatacgtattatcagcagacgatcgcggcgacggggcggctgagcagtcagtttcccaatcttcagaacattccgatccgtctcgaagaggggcggaaaatccgcaaggcgttcgttccgtcagaaccgggatggctgatgctcgccgccgactattcgcagatcgaactgcgcgtgctcgcgcacgtttccggcgacgaacggctgaaggaagcgtttcggacaggcatggacatccacacgaagaccgcgatggacgtgttcggcgtttccgaagaccgcgtcgacgcgcgcatgcggcggcaggcgaaggcggtcaatttcggcatcatctacggcatcagcgatttcggactggcgcaaaacctgaacatttcccgcaaggaggcggcggagttcatccggcaatatttcgccgtcttttcgggcgtcaaggcgtaccgcgagcggatcgtcgagcaggcgcgccgcgacggttacgtgacgaccctgctcggtcgcaggcgctatttgccggacatcaacgcgtcgaattacaaccctcgctcgttcgcggagcggacggcgatgaatacgccgatccagggcacggccgccgacatcatcaagaccgcgatggtgcgtctgacgcggcggatgcgcgacgtcggactgaagagccgcatgctgctgcaggttcacgacgagctcgtgtttgaagtgccgccggacgagctcgacgcgatgcgggagcttgtgacggacgtcatggagtcggcggtcccgctcgacgtgccgctgaaggtcgacgtcagctggggcgccgactggtacgcggcgaagtgagggaagcgggatcc

SEQ ID NO: 1259 - DNA, 2792 bp, Artificial Sequence
  Description of Artificial Sequence: Synthetic Caldibacillus cellulovorans CompA.2 DNA Polymerase L832S
atgaaatacctgctgccgaccgctgctgctggtctgctgctcctcgctgcccagccggcgatggccatgggcaaactgattctggtcgacggaaacagcgtcgccaaccgggcgttttacgccgtccggctgctcagcacgcgcggcggcctgcacacaaacgcggtgtacggattcgccaacatgttgctcaagctgatcgaggaggaacggccgacgcattttctcgtcgcgttcgacgcgggcaaggcgacgttccgtcatcgcgaatacgaggcctacaaggcgggtcgcctgcagacgccgcccgagctgtccgagcagtttccgtacatccgggagctcgtccgggcgttcggcgtcgcgtccggcgagctggaggaatacgaggcggacgacatgatcggtacgctggcgaaacgggcggaggccgagggcgtcgacacgctggtcgtcaccggcgaccgcgatttgctccagctcgtatcggaccgcgtgaccgtcgcgctgacgcgcaagggcatcacggaaacggagcggtacgacccggcgcgcatccgcgaggaatacggcttcgatcccgaccgcatccgcgacctcaaagggctgatgggcgacgcgtctgacaatcttcccggcgttcccggcgtcggtgagaaaaccgcactgaaactgctcaggcagtacggttcgctggagagcgtcctggaacacgcgtcggaaatcgccggaaagctcggtgaaaatctgcgggcgcacgccgacgccgcccgattgagcaagcggctggcgacgatcgactgcgcggtaccgttgcagtcgggatgggactggctgcgcctcggcgaaccggaccgcgccgcgctcgcctcgctgttgcggcagctcgaattcaagtcgctgttgaaacggctcggactcgacggcacgtccgccgatgccgacgtcgacggcgtccgttcctccgcgcggccggcggacgagaaacggccgagggccgtcgccgtcgctgaggagggcgtcgacgtccgctgtccggatcgcccggaagaagtcgaagaagcgctgtcgcggctggaagccgcccagtcggtcgtcgtcgaggtgacgggcgacaacccgcacgacggcgaagtgcgcggcgtcgcatggtgggacggacatacggcgtatttcattccgtttgaacggctggtgcagtccgacatgcggccgctggccgactggctcgccgacgcgcgtcggccgaagcgtacgcacgactcccatcgcgctgaagtggcgctgttctggcacggccttgcgtttcgcggcacgtcgttctgcacgcatatcgccgcctatttgctcgaccccacggaatcgcgccatacgctggcggacctgtcgcgccgctacggtctgccgccggtaccggaagccgaggacgtttacggcaagggcgcgaagttcaaggttcccgatcgcgacacgctggcgcgttacgtcggccgcaaggccgccctagtcgcgcggctcgttccgctgctcgaggcggatttggcggcctgcggcatgcgttcgcttttttacgacctggagctgccgctttcatccgaactcgccgtcatggagacggtcggcgtccgcgtcgacgcggcggcgctcgccgcctacggcgaggaattgcgcgaggcggcggcgaaagtcgagcgggagatttacgagctggccgggacgacgttcaacatcggatcgacgaaacagctcggcgaaattttgttcgataagctggggctgcccgtcgtcaagaaaacgaaaaccggctattccaccgacgcagacgtgctggaggaactggcgccgtaccatccgatcgtcgaaaagattttgcattaccgccaactgacgaaattgcagtcgacctacatcgaggggcttttgaaagaaatccgtccgcaaaccggtaaaatccatacgtattatcagcagacgatcgcggcgacggggcggctgagcagtcagtttcccaatcttcagaacattccgatccgtctcgaagaggggcggaaaatccgcaaggcgttcgttccgtcagaaccgggatggctgatgctcgccgccgactattcgcagatcgaactgcgcgtgctcgcgcacgtttccggcgacgaacggctgaaggaagcgtttcggacaggcatggacatccacacgaagaccgcgatggacgtgttcggcgtttccgaagaccgcgtcgacgcgcgcatgcggcggcaggcgaaggcggtcaatttcggcatcatctacggcatcagcgatttcggactggcgcaaaacctgaacatttcccgcaaggaggcggcggagttcatccggcaatatttcgccgtcttttcgggcgtcaaggcgtaccgcgagcggatcgtcgagcaggcgcgccgcgacggttacgtgacgaccctgctcggtcgcaggcgctatttgccggacatcaacgcgtcgaattacaactctcgctcgttcgcggagcggacggcgatgaatacgccgatccagggcacggccgccgacatcatcaagaccgcgatggtgcgtctgacgcggcggatgcgcgacgtcggactgaagagccgcatgctgctgcaggttcacgacgagctcgtgtttgaagtgccgccggacgagctcgacgcgatgcgggagcttgtgacggacgtcatggagtcggcggtcccgctcgacgtgccgctgaaggtcgacgtcagctggggcgccgactggtacgcggcgaagtgagggaagcgggatcc

SEQ ID NO: 1260 - DNA, 2792 bp, Artificial Sequence
  Description of Artificial Sequence: Synthetic Caldibacillus cellulovorans CompA.2 DNA Polymerase L832T
atgaaatacctgctgccgaccgctgctgctggtctgctgctcctcgctgcccagccggcgatggccatgggcaaactgattctggtcgacggaaacagcgtcgccaaccgggcgttttacgccgtccggctgctcagcacgcgcggcggcctgcacacaaacgcggtgtacggattcgccaacatgttgctcaagctgatcgaggaggaacggccgacgcattttctcgtcgcgttcgacgcgggcaaggcgacgttccgtcatcgcgaatacgaggcctacaaggcgggtcgcctgcagacgccgcccgagctgtccgagcagtttccgtacatccgggagctcgtccgggcgttcggcgtcgcgtccggcgagctggaggaatacgaggcggacgacatgatcggtacgctggcgaaacgggcggaggccgagggcgtcgacacgctggtcgtcaccggcgaccgcgatttgctccagctcgtatcggaccgcgtgaccgtcgcgctgacgcgcaagggcatcacggaaacggagcggtacgacccggcgcgcatccgcgaggaatacggcttcgatcccgaccgcatccgcgacctcaaagggctgatgggcgacgcgtctgacaatcttcccggcgttcccggcgtcggtgagaaaaccgcactgaaactgctcaggcagtacggttcgctggagagcgtcctggaacacgcgtcggaaatcgccggaaagctcggtgaaaatctgcgggcgcacgccgacgccgcccgattgagcaagcggctggcgacgatcgactgcgcggtaccgttgcagtcgggatgggactggctgcgcctcggcgaaccggaccgcgccgcgctcgcctcgctgttgcggcagctcgaattcaagtcgctgttgaaacggctcggactcgacggcacgtccgccgatgccgacgtcgacggcgtccgttcctccgcgcggccggcggacgagaaacggccgagggccgtcgccgtcgctgaggagggcgtcgacgtccgctgtccggatcgcccggaagaagtcgaagaagcgctgtcgcggctggaagccgcccagtcggtcgtcgtcgaggtgacgggcgacaacccgcacgacggcgaagtgcgcggcgtcgcatggtgggacggacatacggcgtatttcattccgtttgaacggctggtgcagtccgacatgcggccgctggccgactggctcgccgacgcgcgtcggccgaagcgtacgcacgactcccatcgcgctgaagtggcgctgttctggcacggccttgcgtttcgcggcacgtcgttctgcacgcatatcgccgcctatttgctcgaccccacggaatcgcgccatacgctggcggacctgtcgcgccgctacggtctgccgccggtaccggaagccgaggacgtttacggcaagggcgcgaagttcaaggttcccgatcgcgacacgctggcgcgttacgtcggccgcaaggccgccctagtcgcgcggctcgttccgctgctcgaggcggatttggcggcctgcggcatgcgttcgcttttttacgacctggagctgccgctttcatccgaactcgccgtcatggagacggtcggcgtccgcgtcgacgcggcggcgctcgccgcctacggcgaggaattgcgcgaggcggcggcgaaagtcgagcgggagatttacgagctggccgggacgacgttcaacatcggatcgacgaaacagctcggcgaaattttgttcgataagctggggctgcccgtcgtcaagaaaacgaaaaccggctattccaccgacgcagacgtgctggaggaactggcgccgtaccatccgatcgtcgaaaagattttgcattaccgccaactgacgaaattgcagtcgacctacatcgaggggcttttgaaagaaatccgtccgcaaaccggtaaaatccatacgtattatcagcagacgatcgcggcgacggggcggctgagcagtcagtttcccaatcttcagaacattccgatccgtctcgaagaggggcggaaaatccgcaaggcgttcgttccgtcagaaccgggatggctgatgctcgccgccgactattcgcagatcgaactgcgcgtgctcgcgcacgtttccggcgacgaacggctgaaggaagcgtttcggacaggcatggacatccacacgaagaccgcgatggacgtgttcggcgtttccgaagaccgcgtcgacgcgcgcatgcggcggcaggcgaaggcggtcaatttcggcatcatctacggcatcagcgatttcggactggcgcaaaacctgaacatttcccgcaaggaggcggcggagttcatccggcaatatttcgccgtcttttcgggcgtcaaggcgtaccgcgagcggatcgtcgagcaggcgcgccgcgacggttacgtgacgaccctgctcggtcgcaggcgctatttgccggacatcaacgcgtcgaattacaacactcgctcgttcgcggagcggacggcgatgaatacgccgatccagggcacggccgccgacatcatcaagaccgcgatggtgcgtctgacgcggcggatgcgcgacgtcggactgaagagccgcatgctgctgcaggttcacgacgagctcgtgtttgaagtgccgccggacgagctcgacgcgatgcgggagcttgtgacggacgtcatggagtcggcggtcccgctcgacgtgccgctgaaggtcgacgtcagctggggcgccgactggtacgcggcgaagtgagggaagcgggatcc

SEQ ID NO: 1261 - DNA, 2792 bp, Artificial Sequence
  Description of Artificial Sequence: Synthetic Caldibacillus cellulovorans CompA.2 DNA Polymerase L832W
atgaaatacctgctgccgaccgctgctgctggtctgctgctcctcgctgcccagccggcgatggccatgggcaaactgattctggtcgacggaaacagcgtcgccaaccgggcgttttacgccgtccggctgctcagcacgcgcggcggcctgcacacaaacgcggtgtacggattcgccaacatgttgctcaagctgatcgaggaggaacggccgacgcattttctcgtcgcgttcgacgcgggcaaggcgacgttccgtcatcgcgaatacgaggcctacaaggcgggtcgcctgcagacgccgcccgagctgtccgagcagtttccgtacatccgggagctcgtccgggcgttcggcgtcgcgtccggcgagctggaggaatacgaggcggacgacatgatcggtacgctggcgaaacgggcggaggccgagggcgtcgacacgctggtcgtcaccggcgaccgcgatttgctccagctcgtatcggaccgcgtgaccgtcgcgctgacgcgcaagggcatcacggaaacggagcggtacgacccggcgcgcatccgcgaggaatacggcttcgatcccgaccgcatccgcgacctcaaagggctgatgggcgacgcgtctgacaatcttcccggcgttcccggcgtcggtgagaaaaccgcactgaaactgctcaggcagtacggttcgctggagagcgtcctggaacacgcgtcggaaatcgccggaaagctcggtgaaaatctgcgggcgcacgccgacgccgcccgattgagcaagcggctggcgacgatcgactgcgcggtaccgttgcagtcgggatgggactggctgcgcctcggcgaaccggaccgcgccgcgctcgcctcgctgttgcggcagctcgaattcaagtcgctgttgaaacggctcggactcgacggcacgtccgccgatgccgacgtcgacggcgtccgttcctccgcgcggccggcggacgagaaacggccgagggccgtcgccgtcgctgaggagggcgtcgacgtccgctgtccggatcgcccggaagaagtcgaagaagcgctgtcgcggctggaagccgcccagtcggtcgtcgtcgaggtgacgggcgacaacccgcacgacggcgaagtgcgcggcgtcgcatggtgggacggacatacggcgtatttcattccgtttgaacggctggtgcagtccgacatgcggccgctggccgactggctcgccgacgcgcgtcggccgaagcgtacgcacgactcccatcgcgctgaagtggcgctgttctggcacggccttgcgtttcgcggcacgtcgttctgcacgcatatcgccgcctatttgctcgaccccacggaatcgcgccatacgctggcggacctgtcgcgccgctacggtctgccgccggtaccggaagccgaggacgtttacggcaagggcgcgaagttcaaggttcccgatcgcgacacgctggcgcgttacgtcggccgcaaggccgccctagtcgcgcggctcgttccgctgctcgaggcggatttggcggcctgcggcatgcgttcgcttttttacgacctggagctgccgctttcatccgaactcgccgtcatggagacggtcggcgtccgcgtcgacgcggcggcgctcgccgcctacggcgaggaattgcgcgaggcggcggcgaaagtcgagcgggagatttacgagctggccgggacgacgttcaacatcggatcgacgaaacagctcggcgaaattttgttcgataagctggggctgcccgtcgtcaagaaaacgaaaaccggctattccaccgacgcagacgtgctggaggaactggcgccgtaccatccgatcgtcgaaaagattttgcattaccgccaactgacgaaattgcagtcgacctacatcgaggggcttttgaaagaaatccgtccgcaaaccggtaaaatccatacgtattatcagcagacgatcgcggcgacggggcggctgagcagtcagtttcccaatcttcagaacattccgatccgtctcgaagaggggcggaaaatccgcaaggcgttcgttccgtcagaaccgggatggctgatgctcgccgccgactattcgcagatcgaactgcgcgtgctcgcgcacgtttccggcgacgaacggctgaaggaagcgtttcggacaggcatggacatccacacgaagaccgcgatggacgtgttcggcgtttccgaagaccgcgtcgacgcgcgcatgcggcggcaggcgaaggcggtcaatttcggcatcatctacggcatcagcgatttcggactggcgcaaaacctgaacatttcccgcaaggaggcggcggagttcatccggcaatatttcgccgtcttttcgggcgtcaaggcgtaccgcgagcggatcgtcgagcaggcgcgccgcgacggttacgtgacgaccctgctcggtcgcaggcgctatttgccggacatcaacgcgtcgaattacaactggcgctcgttcgcggagcggacggcgatgaatacgccgatccagggcacggccgccgacatcatcaagaccgcgatggtgcgtctgacgcggcggatgcgcgacgtcggactgaagagccgcatgctgctgcaggttcacgacgagctcgtgtttgaagtgccgccggacgagctcgacgcgatgcgggagcttgtgacggacgtcatggagtcggcggtcccgctcgacgtgccgctgaaggtcgacgtcagctggggcgccgactggtacgcggcgaagtgagggaagcgggatcc

SEQ ID NO: 1262 - DNA, 2792 bp, Artificial Sequence
  Description of Artificial Sequence: Synthetic Caldibacillus cellulovorans CompA.2 DNA Polymerase L832Y
atgaaatacctgctgccgaccgctgctgctggtctgctgctcctcgctgcccagccggcgatggccatgggcaaactgattctggtcgacggaaacagcgtcgccaaccgggcgttttacgccgtccggctgctcagcacgcgcggcggcctgcacacaaacgcggtgtacggattcgccaacatgttgctcaagctgatcgaggaggaacggccgacgcattttctcgtcgcgttcgacgcgggcaaggcgacgttccgtcatcgcgaatacgaggcctacaaggcgggtcgcctgcagacgccgcccgagctgtccgagcagtttccgtacatccgggagctcgtccgggcgttcggcgtcgcgtccggcgagctggaggaatacgaggcggacgacatgatcggtacgctggcgaaacgggcggaggccgagggcgtcgacacgctggtcgtcaccggcgaccgcgatttgctccagctcgtatcggaccgcgtgaccgtcgcgctgacgcgcaagggcatcacggaaacggagcggtacgacccggcgcgcatccgcgaggaatacggcttcgatcccgaccgcatccgcgacctcaaagggctgatgggcgacgcgtctgacaatcttcccggcgttcccggcgtcggtgagaaaaccgcactgaaactgctcaggcagtacggttcgctggagagcgtcctggaacacgcgtcggaaatcgccggaaagctcggtgaaaatctgcgggcgcacgccgacgccgcccgattgagcaagcggctggcgacgatcgactgcgcggtaccgttgcagtcgggatgggactggctgcgcctcggcgaaccggaccgcgccgcgctcgcctcgctgttgcggcagctcgaattcaagtcgctgttgaaacggctcggactcgacggcacgtccgccgatgccgacgtcgacggcgtccgttcctccgcgcggccggcggacgagaaacggccgagggccgtcgccgtcgctgaggagggcgtcgacgtccgctgtccggatcgcccggaagaagtcgaagaagcgctgtcgcggctggaagccgcccagtcggtcgtcgtcgaggtgacgggcgacaacccgcacgacggcgaagtgcgcggcgtcgcatggtgggacggacatacggcgtatttcattccgtttgaacggctggtgcagtccgacatgcggccgctggccgactggctcgccgacgcgcgtcggccgaagcgtacgcacgactcccatcgcgctgaagtggcgctgttctggcacggccttgcgtttcgcggcacgtcgttctgcacgcatatcgccgcctatttgctcgaccccacggaatcgcgccatacgctggcggacctgtcgcgccgctacggtctgccgccggtaccggaagccgaggacgtttacggcaagggcgcgaagttcaaggttcccgatcgcgacacgctggcgcgttacgtcggccgcaaggccgccctagtcgcgcggctcgttccgctgctcgaggcggatttggcggcctgcggcatgcgttcgcttttttacgacctggagctgccgctttcatccgaactcgccgtcatggagacggtcggcgtccgcgtcgacgcggcggcgctcgccgcctacggcgaggaattgcgcgaggcggcggcgaaagtcgagcgggagatttacgagctggccgggacgacgttcaacatcggatcgacgaaacagctcggcgaaattttgttcgataagctggggctgcccgtcgtcaagaaaacgaaaaccggctattccaccgacgcagacgtgctggaggaactggcgccgtaccatccgatcgtcgaaaagattttgcattaccgccaactgacgaaattgcagtcgacctacatcgaggggcttttgaaagaaatccgtccgcaaaccggtaaaatccatacgtattatcagcagacgatcgcggcgacggggcggctgagcagtcagtttcccaatcttcagaacattccgatccgtctcgaagaggggcggaaaatccgcaaggcgttcgttccgtcagaaccgggatggctgatgctcgccgccgactattcgcagatcgaactgcgcgtgctcgcgcacgtttccggcgacgaacggctgaaggaagcgtttcggacaggcatggacatccacacgaagaccgcgatggacgtgttcggcgtttccgaagaccgcgtcgacgcgcgcatgcggcggcaggcgaaggcggtcaatttcggcatcatctacggcatcagcgatttcggactggcgcaaaacctgaacatttcccgcaaggaggcggcggagttcatccggcaatatttcgccgtcttttcgggcgtcaaggcgtaccgcgagcggatcgtcgagcaggcgcgccgcgacggttacgtgacgaccctgctcggtcgcaggcgctatttgccggacatcaacgcgtcgaattacaactatcgctcgttcgcggagcggacggcgatgaatacgccgatccagggcacggccgccgacatcatcaagaccgcgatggtgcgtctgacgcggcggatgcgcgacgtcggactgaagagccgcatgctgctgcaggttcacgacgagctcgtgtttgaagtgccgccggacgagctcgacgcgatgcgggagcttgtgacggacgtcatggagtcggcggtcccgctcgacgtgccgctgaaggtcgacgtcagctggggcgccgactggtacgcggcgaagtgagggaagcgggatcc

SEQ ID NO: 1263 - DNA, 2792 bp, Artificial Sequence
  Description of Artificial Sequence: Synthetic Caldibacillus cellulovorans CompA.2 DNA Polymerase L832V
atgaaatacctgctgccgaccgctgctgctggtctgctgctcctcgctgcccagccggcgatggccatgggcaaactgattctggtcgacggaaacagcgtcgccaaccgggcgttttacgccgtccggctgctcagcacgcgcggcggcctgcacacaaacgcggtgtacggattcgccaacatgttgctcaagctgatcgaggaggaacggccgacgcattttctcgtcgcgttcgacgcgggcaaggcgacgttccgtcatcgcgaatacgaggcctacaaggcgggtcgcctgcagacgccgcccgagctgtccgagcagtttccgtacatccgggagctcgtccgggcgttcggcgtcgcgtccggcgagctggaggaatacgaggcggacgacatgatcggtacgctggcgaaacgggcggaggccgagggcgtcgacacgctggtcgtcaccggcgaccgcgatttgctccagctcgtatcggaccgcgtgaccgtcgcgctgacgcgcaagggcatcacggaaacggagcggtacgacccggcgcgcatccgcgaggaatacggcttcgatcccgaccgcatccgcgacctcaaagggctgatgggcgacgcgtctgacaatcttcccggcgttcccggcgtcggtgagaaaaccgcactgaaactgctcaggcagtacggttcgctggagagcgtcctggaacacgcgtcggaaatcgccggaaagctcggtgaaaatctgcgggcgcacgccgacgccgcccgattgagcaagcggctggcgacgatcgactgcgcggtaccgttgcagtcgggatgggactggctgcgcctcggcgaaccggaccgcgccgcgctcgcctcgctgttgcggcagctcgaattcaagtcgctgttgaaacggctcggactcgacggcacgtccgccgatgccgacgtcgacggcgtccgttcctccgcgcggccggcggacgagaaacggccgagggccgtcgccgtcgctgaggagggcgtcgacgtccgctgtccggatcgcccggaagaagtcgaagaagcgctgtcgcggctggaagccgcccagtcggtcgtcgtcgaggtgacgggcgacaacccgcacgacggcgaagtgcgcggcgtcgcatggtgggacggacatacggcgtatttcattccgtttgaacggctggtgcagtccgacatgcggccgctggccgactggctcgccgacgcgcgtcggccgaagcgtacgcacgactcccatcgcgctgaagtggcgctgttctggcacggccttgcgtttcgcggcacgtcgttctgcacgcatatcgccgcctatttgctcgaccccacggaatcgcgccatacgctggcggacctgtcgcgccgctacggtctgccgccggtaccggaagccgaggacgtttacggcaagggcgcgaagttcaaggttcccgatcgcgacacgctggcgcgttacgtcggccgcaaggccgccctagtcgcgcggctcgttccgctgctcgaggcggatttggcggcctgcggcatgcgttcgcttttttacgacctggagctgccgctttcatccgaactcgccgtcatggagacggtcggcgtccgcgtcgacgcggcggcgctcgccgcctacggcgaggaattgcgcgaggcggcggcgaaagtcgagcgggagatttacgagctggccgggacgacgttcaacatcggatcgacgaaacagctcggcgaaattttgttcgataagctggggctgcccgtcgtcaagaaaacgaaaaccggctattccaccgacgcagacgtgctggaggaactggcgccgtaccatccgatcgtcgaaaagattttgcattaccgccaactgacgaaattgcagtcgacctacatcgaggggcttttgaaagaaatccgtccgcaaaccggtaaaatccatacgtattatcagcagacgatcgcggcgacggggcggctgagcagtcagtttcccaatcttcagaacattccgatccgtctcgaagaggggcggaaaatccgcaaggcgttcgttccgtcagaaccgggatggctgatgctcgccgccgactattcgcagatcgaactgcgcgtgctcgcgcacgtttccggcgacgaacggctgaaggaagcgtttcggacaggcatggacatccacacgaagaccgcgatggacgtgttcggcgtttccgaagaccgcgtcgacgcgcgcatgcggcggcaggcgaaggcggtcaatttcggcatcatctacggcatcagcgatttcggactggcgcaaaacctgaacatttcccgcaaggaggcggcggagttcatccggcaatatttcgccgtcttttcgggcgtcaaggcgtaccgcgagcggatcgtcgagcaggcgcgccgcgacggttacgtgacgaccctgctcggtcgcaggcgctatttgccggacatcaacgcgtcgaattacaacgttcgctcgttcgcggagcggacggcgatgaatacgccgatccagggcacggccgccgacatcatcaagaccgcgatggtgcgtctgacgcggcggatgcgcgacgtcggactgaagagccgcatgctgctgcaggttcacgacgagctcgtgtttgaagtgccgccggacgagctcgacgcgatgcgggagcttgtgacggacgtcatggagtcggcggtcccgctcgacgtgccgctgaaggtcgacgtcagctggggcgccgactggtacgcggcgaagtgagggaagcgggatcc

SEQ ID NO: 1264 - DNA, 2792 bp, Artificial Sequence
  Description of Artificial Sequence: Synthetic Caldibacillus cellulovorans CompA.2 DNA Polymerase R833A
atgaaatacctgctgccgaccgctgctgctggtctgctgctcctcgctgcccagccggcgatggccatgggcaaactgattctggtcgacggaaacagcgtcgccaaccgggcgttttacgccgtccggctgctcagcacgcgcggcggcctgcacacaaacgcggtgtacggattcgccaacatgttgctcaagctgatcgaggaggaacggccgacgcattttctcgtcgcgttcgacgcgggcaaggcgacgttccgtcatcgcgaatacgaggcctacaaggcgggtcgcctgcagacgccgcccgagctgtccgagcagtttccgtacatccgggagctcgtccgggcgttcggcgtcgcgtccggcgagctggaggaatacgaggcggacgacatgatcggtacgctggcgaaacgggcggaggccgagggcgtcgacacgctggtcgtcaccggcgaccgcgatttgctccagctcgtatcggaccgcgtgaccgtcgcgctgacgcgcaagggcatcacggaaacggagcggtacgacccggcgcgcatccgcgaggaatacggcttcgatcccgaccgcatccgcgacctcaaagggctgatgggcgacgcgtctgacaatcttcccggcgttcccggcgtcggtgagaaaaccgcactgaaactgctcaggcagtacggttcgctggagagcgtcctggaacacgcgtcggaaatcgccggaaagctcggtgaaaatctgcgggcgcacgccgacgccgcccgattgagcaagcggctggcgacgatcgactgcgcggtaccgttgcagtcgggatgggactggctgcgcctcggcgaaccggaccgcgccgcgctcgcctcgctgttgcggcagctcgaattcaagtcgctgttgaaacggctcggactcgacggcacgtccgccgatgccgacgtcgacggcgtccgttcctccgcgcggccggcggacgagaaacggccgagggccgtcgccgtcgctgaggagggcgtcgacgtccgctgtccggatcgcccggaagaagtcgaagaagcgctgtcgcggctggaagccgcccagtcggtcgtcgtcgaggtgacgggcgacaacccgcacgacggcgaagtgcgcggcgtcgcatggtgggacggacatacggcgtatttcattccgtttgaacggctggtgcagtccgacatgcggccgctggccgactggctcgccgacgcgcgtcggccgaagcgtacgcacgactcccatcgcgctgaagtggcgctgttctggcacggccttgcgtttcgcggcacgtcgttctgcacgcatatcgccgcctatttgctcgaccccacggaatcgcgccatacgctggcggacctgtcgcgccgctacggtctgccgccggtaccggaagccgaggacgtttacggcaagggcgcgaagttcaaggttcccgatcgcgacacgctggcgcgttacgtcggccgcaaggccgccctagtcgcgcggctcgttccgctgctcgaggcggatttggcggcctgcggcatgcgttcgcttttttacgacctggagctgccgctttcatccgaactcgccgtcatggagacggtcggcgtccgcgtcgacgcggcggcgctcgccgcctacggcgaggaattgcgcgaggcggcggcgaaagtcgagcgggagatttacgagctggccgggacgacgttcaacatcggatcgacgaaacagctcggcgaaattttgttcgataagctggggctgcccgtcgtcaagaaaacgaaaaccggctattccaccgacgcagacgtgctggaggaactggcgccgtaccatccgatcgtcgaaaagattttgcattaccgccaactgacgaaattgcagtcgacctacatcgaggggcttttgaaagaaatccgtccgcaaaccggtaaaatccatacgtattatcagcagacgatcgcggcgacggggcggctgagcagtcagtttcccaatcttcagaacattccgatccgtctcgaagaggggcggaaaatccgcaaggcgttcgttccgtcagaaccgggatggctgatgctcgccgccgactattcgcagatcgaactgcgcgtgctcgcgcacgtttccggcgacgaacggctgaaggaagcgtttcggacaggcatggacatccacacgaagaccgcgatggacgtgttcggcgtttccgaagaccgcgtcgacgcgcgcatgcggcggcaggcgaaggcggtcaatttcggcatcatctacggcatcagcgatttcggactggcgcaaaacctgaacatttcccgcaaggaggcggcggagttcatccggcaatatttcgccgtcttttcgggcgtcaaggcgtaccgcgagcggatcgtcgagcaggcgcgccgcgacggttacgtgacgaccctgctcggtcgcaggcgctatttgccggacatcaacgcgtcgaattacaacctcgcttcgttcgcggagcggacggcgatgaatacgccgatccagggcacggccgccgacatcatcaagaccgcgatggtgcgtctgacgcggcggatgcgcgacgtcggactgaagagccgcatgctgctgcaggttcacgacgagctcgtgtttgaagtgccgccggacgagctcgacgcgatgcgggagcttgtgacggacgtcatggagtcggcggtcccgctcgacgtgccgctgaaggtcgacgtcagctggggcgccgactggtacgcggcgaagtgagggaagcgggatcc

SEQ ID NO: 1265 - DNA, 2792 bp, Artificial Sequence
  Description of Artificial Sequence: Synthetic Caldibacillus cellulovorans CompA.2 DNA Polymerase R833N
atgaaatacctgctgccgaccgctgctgctggtctgctgctcctcgctgcccagccggcgatggccatgggcaaactgattctggtcgacggaaacagcgtcgccaaccgggcgttttacgccgtccggctgctcagcacgcgcggcggcctgcacacaaacgcggtgtacggattcgccaacatgttgctcaagctgatcgaggaggaacggccgacgcattttctcgtcgcgttcgacgcgggcaaggcgacgttccgtcatcgcgaatacgaggcctacaaggcgggtcgcctgcagacgccgcccgagctgtccgagcagtttccgtacatccgggagctcgtccgggcgttcggcgtcgcgtccggcgagctggaggaatacgaggcggacgacatgatcggtacgctggcgaaacgggcggaggccgagggcgtcgacacgctggtcgtcaccggcgaccgcgatttgctccagctcgtatcggaccgcgtgaccgtcgcgctgacgcgcaagggcatcacggaaacggagcggtacgacccggcgcgcatccgcgaggaatacggcttcgatcccgaccgcatccgcgacctcaaagggctgatgggcgacgcgtctgacaatcttcccggcgttcccggcgtcggtgagaaaaccgcactgaaactgctcaggcagtacggttcgctggagagcgtcctggaacacgcgtcggaaatcgccggaaagctcggtgaaaatctgcgggcgcacgccgacgccgcccgattgagcaagcggctggcgacgatcgactgcgcggtaccgttgcagtcgggatgggactggctgcgcctcggcgaaccggaccgcgccgcgctcgcctcgctgttgcggcagctcgaattcaagtcgctgttgaaacggctcggactcgacggcacgtccgccgatgccgacgtcgacggcgtccgttcctccgcgcggccggcggacgagaaacggccgagggccgtcgccgtcgctgaggagggcgtcgacgtccgctgtccggatcgcccggaagaagtcgaagaagcgctgtcgcggctggaagccgcccagtcggtcgtcgtcgaggtgacgggcgacaacccgcacgacggcgaagtgcgcggcgtcgcatggtgggacggacatacggcgtatttcattccgtttgaacggctggtgcagtccgacatgcggccgctggccgactggctcgccgacgcgcgtcggccgaagcgtacgcacgactcccatcgcgctgaagtggcgctgttctggcacggccttgcgtttcgcggcacgtcgttctgcacgcatatcgccgcctatttgctcgaccccacggaatcgcgccatacgctggcggacctgtcgcgccgctacggtctgccgccggtaccggaagccgaggacgtttacggcaagggcgcgaagttcaaggttcccgatcgcgacacgctggcgcgttacgtcggccgcaaggccgccctagtcgcgcggctcgttccgctgctcgaggcggatttggcggcctgcggcatgcgttcgcttttttacgacctggagctgccgctttcatccgaactcgccgtcatggagacggtcggcgtccgcgtcgacgcggcggcgctcgccgcctacggcgaggaattgcgcgaggcggcggcgaaagtcgagcgggagatttacgagctggccgggacgacgttcaacatcggatcgacgaaacagctcggcgaaattttgttcgataagctggggctgcccgtcgtcaagaaaacgaaaaccggctattccaccgacgcagacgtgctggaggaactggcgccgtaccatccgatcgtcgaaaagattttgcattaccgccaactgacgaaattgcagtcgacctacatcgaggggcttttgaaagaaatccgtccgcaaaccggtaaaatccatacgtattatcagcagacgatcgcggcgacggggcggctgagcagtcagtttcccaatcttcagaacattccgatccgtctcgaagaggggcggaaaatccgcaaggcgttcgttccgtcagaaccgggatggctgatgctcgccgccgactattcgcagatcgaactgcgcgtgctcgcgcacgtttccggcgacgaacggctgaaggaagcgtttcggacaggcatggacatccacacgaagaccgcgatggacgtgttcggcgtttccgaagaccgcgtcgacgcgcgcatgcggcggcaggcgaaggcggtcaatttcggcatcatctacggcatcagcgatttcggactggcgcaaaacctgaacatttcccgcaaggaggcggcggagttcatccggcaatatttcgccgtcttttcgggcgtcaaggcgtaccgcgagcggatcgtcgagcaggcgcgccgcgacggttacgtgacgaccctgctcggtcgcaggcgctatttgccggacatcaacgcgtcgaattacaacctcaattcgttcgcggagcggacggcgatgaatacgccgatccagggcacggccgccgacatcatcaagaccgcgatggtgcgtctgacgcggcggatgcgcgacgtcggactgaagagccgcatgctgctgcaggttcacgacgagctcgtgtttgaagtgccgccggacgagctcgacgcgatgcgggagcttgtgacggacgtcatggagtcggcggtcccgctcgacgtgccgctgaaggtcgacgtcagctggggcgccgactggtacgcggcgaagtgagggaagcgggatcc

SEQ ID NO: 1266 - DNA, 2792 bp, Artificial Sequence
  Description of Artificial Sequence: Synthetic Caldibacillus cellulovorans CompA.2 DNA Polymerase R833D
atgaaatacctgctgccgaccgctgctgctggtctgctgctcctcgctgcccagccggcgatggccatgggcaaactgattctggtcgacggaaacagcgtcgccaaccgggcgttttacgccgtccggctgctcagcacgcgcggcggcctgcacacaaacgcggtgtacggattcgccaacatgttgctcaagctgatcgaggaggaacggccgacgcattttctcgtcgcgttcgacgcgggcaaggcgacgttccgtcatcgcgaatacgaggcctacaaggcgggtcgcctgcagacgccgcccgagctgtccgagcagtttccgtacatccgggagctcgtccgggcgttcggcgtcgcgtccggcgagctggaggaatacgaggcggacgacatgatcggtacgctggcgaaacgggcggaggccgagggcgtcgacacgctggtcgtcaccggcgaccgcgatttgctccagctcgtatcggaccgcgtgaccgtcgcgctgacgcgcaagggcatcacggaaacggagcggtacgacccggcgcgcatccgcgaggaatacggcttcgatcccgaccgcatccgcgacctcaaagggctgatgggcgacgcgtctgacaatcttcccggcgttcccggcgtcggtgagaaaaccgcactgaaactgctcaggcagtacggttcgctggagagcgtcctggaacacgcgtcggaaatcgccggaaagctcggtgaaaatctgcgggcgcacgccgacgccgcccgattgagcaagcggctggcgacgatcgactgcgcggtaccgttgcagtcgggatgggactggctgcgcctcggcgaaccggaccgcgccgcgctcgcctcgctgttgcggcagctcgaattcaagtcgctgttgaaacggctcggactcgacggcacgtccgccgatgccgacgtcgacggcgtccgttcctccgcgcggccggcggacgagaaacggccgagggccgtcgccgtcgctgaggagggcgtcgacgtccgctgtccggatcgcccggaagaagtcgaagaagcgctgtcgcggctggaagccgcccagtcggtcgtcgtcgaggtgacgggcgacaacccgcacgacggcgaagtgcgcggcgtcgcatggtgggacggacatacggcgtatttcattccgtttgaacggctggtgcagtccgacatgcggccgctggccgactggctcgccgacgcgcgtcggccgaagcgtacgcacgactcccatcgcgctgaagtggcgctgttctggcacggccttgcgtttcgcggcacgtcgttctgcacgcatatcgccgcctatttgctcgaccccacggaatcgcgccatacgctggcggacctgtcgcgccgctacggtctgccgccggtaccggaagccgaggacgtttacggcaagggcgcgaagttcaaggttcccgatcgcgacacgctggcgcgttacgtcggccgcaaggccgccctagtcgcgcggctcgttccgctgctcgaggcggatttggcggcctgcggcatgcgttcgcttttttacgacctggagctgccgctttcatccgaactcgccgtcatggagacggtcggcgtccgcgtcgacgcggcggcgctcgccgcctacggcgaggaattgcgcgaggcggcggcgaaagtcgagcgggagatttacgagctggccgggacgacgttcaacatcggatcgacgaaacagctcggcgaaattttgttcgataagctggggctgcccgtcgtcaagaaaacgaaaaccggctattccaccgacgcagacgtgctggaggaactggcgccgtaccatccgatcgtcgaaaagattttgcattaccgccaactgacgaaattgcagtcgacctacatcgaggggcttttgaaagaaatccgtccgcaaaccggtaaaatccatacgtattatcagcagacgatcgcggcgacggggcggctgagcagtcagtttcccaatcttcagaacattccgatccgtctcgaagaggggcggaaaatccgcaaggcgttcgttccgtcagaaccgggatggctgatgctcgccgccgactattcgcagatcgaactgcgcgtgctcgcgcacgtttccggcgacgaacggctgaaggaagcgtttcggacaggcatggacatccacacgaagaccgcgatggacgtgttcggcgtttccgaagaccgcgtcgacgcgcgcatgcggcggcaggcgaaggcggtcaatttcggcatcatctacggcatcagcgatttcggactggcgcaaaacctgaacatttcccgcaaggaggcggcggagttcatccggcaatatttcgccgtcttttcgggcgtcaaggcgtaccgcgagcggatcgtcgagcaggcgcgccgcgacggttacgtgacgaccctgctcggtcgcaggcgctatttgccggacatcaacgcgtcgaattacaacctcgattcgttcgcggagcggacggcgatgaatacgccgatccagggcacggccgccgacatcatcaagaccgcgatggtgcgtctgacgcggcggatgcgcgacgtcggactgaagagccgcatgctgctgcaggttcacgacgagctcgtgtttgaagtgccgccggacgagctcgacgcgatgcgggagcttgtgacggacgtcatggagtcggcggtcccgctcgacgtgccgctgaaggtcgacgtcagctggggcgccgactggtacgcggcgaagtgagggaagcgggatcc

SEQ ID NO: 1267 - DNA, 2792 bp, Artificial Sequence
  Description of Artificial Sequence: Synthetic Caldibacillus cellulovorans CompA.2 DNA Polymerase R833C
atgaaatacctgctgccgaccgctgctgctggtctgctgctcctcgctgcccagccggcgatggccatgggcaaactgattctggtcgacggaaacagcgtcgccaaccgggcgttttacgccgtccggctgctcagcacgcgcggcggcctgcacacaaacgcggtgtacggattcgccaacatgttgctcaagctgatcgaggaggaacggccgacgcattttctcgtcgcgttcgacgcgggcaaggcgacgttccgtcatcgcgaatacgaggcctacaaggcgggtcgcctgcagacgccgcccgagctgtccgagcagtttccgtacatccgggagctcgtccgggcgttcggcgtcgcgtccggcgagctggaggaatacgaggcggacgacatgatcggtacgctggcgaaacgggcggaggccgagggcgtcgacacgctggtcgtcaccggcgaccgcgatttgctccagctcgtatcggaccgcgtgaccgtcgcgctgacgcgcaagggcatcacggaaacggagcggtacgacccggcgcgcatccgcgaggaatacggcttcgatcccgaccgcatccgcgacctcaaagggctgatgggcgacgcgtctgacaatcttcccggcgttcccggcgtcggtgagaaaaccgcactgaaactgctcaggcagtacggttcgctggagagcgtcctggaacacgcgtcggaaatcgccggaaagctcggtgaaaatctgcgggcgcacgccgacgccgcccgattgagcaagcggctggcgacgatcgactgcgcggtaccgttgcagtcgggatgggactggctgcgcctcggcgaaccggaccgcgccgcgctcgcctcgctgttgcggcagctcgaattcaagtcgctgttgaaacggctcggactcgacggcacgtccgccgatgccgacgtcgacggcgtccgttcctccgcgcggccggcggacgagaaacggccgagggccgtcgccgtcgctgaggagggcgtcgacgtccgctgtccggatcgcccggaagaagtcgaagaagcgctgtcgcggctggaagccgcccagtcggtcgtcgtcgaggtgacgggcgacaacccgcacgacggcgaagtgcgcggcgtcgcatggtgggacggacatacggcgtatttcattccgtttgaacggctggtgcagtccgacatgcggccgctggccgactggctcgccgacgcgcgtcggccgaagcgtacgcacgactcccatcgcgctgaagtggcgctgttctggcacggccttgcgtttcgcggcacgtcgttctgcacgcatatcgccgcctatttgctcgaccccacggaatcgcgccatacgctggcggacctgtcgcgccgctacggtctgccgccggtaccggaagccgaggacgtttacggcaagggcgcgaagttcaaggttcccgatcgcgacacgctggcgcgttacgtcggccgcaaggccgccctagtcgcgcggctcgttccgctgctcgaggcggatttggcggcctgcggcatgcgttcgcttttttacgacctggagctgccgctttcatccgaactcgccgtcatggagacggtcggcgtccgcgtcgacgcggcggcgctcgccgcctacggcgaggaattgcgcgaggcggcggcgaaagtcgagcgggagatttacgagctggccgggacgacgttcaacatcggatcgacgaaacagctcggcgaaattttgttcgataagctggggctgcccgtcgtcaagaaaacgaaaaccggctattccaccgacgcagacgtgctggaggaactggcgccgtaccatccgatcgtcgaaaagattttgcattaccgccaactgacgaaattgcagtcgacctacatcgaggggcttttgaaagaaatccgtccgcaaaccggtaaaatccatacgtattatcagcagacgatcgcggcgacggggcggctgagcagtcagtttcccaatcttcagaacattccgatccgtctcgaagaggggcggaaaatccgcaaggcgttcgttccgtcagaaccgggatggctgatgctcgccgccgactattcgcagatcgaactgcgcgtgctcgcgcacgtttccggcgacgaacggctgaaggaagcgtttcggacaggcatggacatccacacgaagaccgcgatggacgtgttcggcgtttccgaagaccgcgtcgacgcgcgcatgcggcggcaggcgaaggcggtcaatttcggcatcatctacggcatcagcgatttcggactggcgcaaaacctgaacatttcccgcaaggaggcggcggagttcatccggcaatatttcgccgtcttttcgggcgtcaaggcgtaccgcgagcggatcgtcgagcaggcgcgccgcgacggttacgtgacgaccctgctcggtcgcaggcgctatttgccggacatcaacgcgtcgaattacaacctctgttcgttcgcggagcggacggcgatgaatacgccgatccagggcacggccgccgacatcatcaagaccgcgatggtgcgtctgacgcggcggatgcgcgacgtcggactgaagagccgcatgctgctgcaggttcacgacgagctcgtgtttgaagtgccgccggacgagctcgacgcgatgcgggagcttgtgacggacgtcatggagtcggcggtcccgctcgacgtgccgctgaaggtcgacgtcagctggggcgccgactggtacgcggcgaagtgagggaagcgggatcc

SEQ ID NO: 1268 - DNA, 2792 bp, Artificial Sequence
  Description of Artificial Sequence: Synthetic Caldibacillus cellulovorans CompA.2 DNA Polymerase R833E
atgaaatacctgctgccgaccgctgctgctggtctgctgctcctcgctgcccagccggcgatggccatgggcaaactgattctggtcgacggaaacagcgtcgccaaccgggcgttttacgccgtccggctgctcagcacgcgcggcggcctgcacacaaacgcggtgtacggattcgccaacatgttgctcaagctgatcgaggaggaacggccgacgcattttctcgtcgcgttcgacgcgggcaaggcgacgttccgtcatcgcgaatacgaggcctacaaggcgggtcgcctgcagacgccgcccgagctgtccgagcagtttccgtacatccgggagctcgtccgggcgttcggcgtcgcgtccggcgagctggaggaatacgaggcggacgacatgatcggtacgctggcgaaacgggcggaggccgagggcgtcgacacgctggtcgtcaccggcgaccgcgatttgctccagctcgtatcggaccgcgtgaccgtcgcgctgacgcgcaagggcatcacggaaacggagcggtacgacccggcgcgcatccgcgaggaatacggcttcgatcccgaccgcatccgcgacctcaaagggctgatgggcgacgcgtctgacaatcttcccggcgttcccggcgtcggtgagaaaaccgcactgaaactgctcaggcagtacggttcgctggagagcgtcctggaacacgcgtcggaaatcgccggaaagctcggtgaaaatctgcgggcgcacgccgacgccgcccgattgagcaagcggctggcgacgatcgactgcgcggtaccgttgcagtcgggatgggactggctgcgcctcggcgaaccggaccgcgccgcgctcgcctcgctgttgcggcagctcgaattcaagtcgctgttgaaacggctcggactcgacggcacgtccgccgatgccgacgtcgacggcgtccgttcctccgcgcggccggcggacgagaaacggccgagggccgtcgccgtcgctgaggagggcgtcgacgtccgctgtccggatcgcccggaagaagtcgaagaagcgctgtcgcggctggaagccgcccagtcggtcgtcgtcgaggtgacgggcgacaacccgcacgacggcgaagtgcgcggcgtcgcatggtgggacggacatacggcgtatttcattccgtttgaacggctggtgcagtccgacatgcggccgctggccgactggctcgccgacgcgcgtcggccgaagcgtacgcacgactcccatcgcgctgaagtggcgctgttctggcacggccttgcgtttcgcggcacgtcgttctgcacgcatatcgccgcctatttgctcgaccccacggaatcgcgccatacgctggcggacctgtcgcgccgctacggtctgccgccggtaccggaagccgaggacgtttacggcaagggcgcgaagttcaaggttcccgatcgcgacacgctggcgcgttacgtcggccgcaaggccgccctagtcgcgcggctcgttccgctgctcgaggcggatttggcggcctgcggcatgcgttcgcttttttacgacctggagctgccgctttcatccgaactcgccgtcatggagacggtcggcgtccgcgtcgacgcggcggcgctcgccgcctacggcgaggaattgcgcgaggcggcggcgaaagtcgagcgggagatttacgagctggccgggacgacgttcaacatcggatcgacgaaacagctcggcgaaattttgttcgataagctggggctgcccgtcgtcaagaaaacgaaaaccggctattccaccgacgcagacgtgctggaggaactggcgccgtaccatccgatcgtcgaaaagattttgcattaccgccaactgacgaaattgcagtcgacctacatcgaggggcttttgaaagaaatccgtccgcaaaccggtaaaatccatacgtattatcagcagacgatcgcggcgacggggcggctgagcagtcagtttcccaatcttcagaacattccgatccgtctcgaagaggggcggaaaatccgcaaggcgttcgttccgtcagaaccgggatggctgatgctcgccgccgactattcgcagatcgaactgcgcgtgctcgcgcacgtttccggcgacgaacggctgaaggaagcgtttcggacaggcatggacatccacacgaagaccgcgatggacgtgttcggcgtttccgaagaccgcgtcgacgcgcgcatgcggcggcaggcgaaggcggtcaatttcggcatcatctacggcatcagcgatttcggactggcgcaaaacctgaacatttcccgcaaggaggcggcggagttcatccggcaatatttcgccgtcttttcgggcgtcaaggcgtaccgcgagcggatcgtcgagcaggcgcgccgcgacggttacgtgacgaccctgctcggtcgcaggcgctatttgccggacatcaacgcgtcgaattacaacctcgaatcgttcgcggagcggacggcgatgaatacgccgatccagggcacggccgccgacatcatcaagaccgcgatggtgcgtctgacgcggcggatgcgcgacgtcggactgaagagccgcatgctgctgcaggttcacgacgagctcgtgtttgaagtgccgccggacgagctcgacgcgatgcgggagcttgtgacggacgtcatggagtcggcggtcccgctcgacgtgccgctgaaggtcgacgtcagctggggcgccgactggtacgcggcgaagtgagggaagcgggatcc

SEQ ID NO: 1269 - DNA, 2792 bp, Artificial Sequence
  Description of Artificial Sequence: Synthetic Caldibacillus cellulovorans CompA.2 DNA Polymerase R833Q
atgaaatacctgctgccgaccgctgctgctggtctgctgctcctcgctgcccagccggcgatggccatgggcaaactgattctggtcgacggaaacagcgtcgccaaccgggcgttttacgccgtccggctgctcagcacgcgcggcggcctgcacacaaacgcggtgtacggattcgccaacatgttgctcaagctgatcgaggaggaacggccgacgcattttctcgtcgcgttcgacgcgggcaaggcgacgttccgtcatcgcgaatacgaggcctacaaggcgggtcgcctgcagacgccgcccgagctgtccgagcagtttccgtacatccgggagctcgtccgggcgttcggcgtcgcgtccggcgagctggaggaatacgaggcggacgacatgatcggtacgctggcgaaacgggcggaggccgagggcgtcgacacgctggtcgtcaccggcgaccgcgatttgctccagctcgtatcggaccgcgtgaccgtcgcgctgacgcgcaagggcatcacggaaacggagcggtacgacccggcgcgcatccgcgaggaatacggcttcgatcccgaccgcatccgcgacctcaaagggctgatgggcgacgcgtctgacaatcttcccggcgttcccggcgtcggtgagaaaaccgcactgaaactgctcaggcagtacggttcgctggagagcgtcctggaacacgcgtcggaaatcgccggaaagctcggtgaaaatctgcgggcgcacgccgacgccgcccgattgagcaagcggctggcgacgatcgactgcgcggtaccgttgcagtcgggatgggactggctgcgcctcggcgaaccggaccgcgccgcgctcgcctcgctgttgcggcagctcgaattcaagtcgctgttgaaacggctcggactcgacggcacgtccgccgatgccgacgtcgacggcgtccgttcctccgcgcggccggcggacgagaaacggccgagggccgtcgccgtcgctgaggagggcgtcgacgtccgctgtccggatcgcccggaagaagtcgaagaagcgctgtcgcggctggaagccgcccagtcggtcgtcgtcgaggtgacgggcgacaacccgcacgacggcgaagtgcgcggcgtcgcatggtgggacggacatacggcgtatttcattccgtttgaacggctggtgcagtccgacatgcggccgctggccgactggctcgccgacgcgcgtcggccgaagcgtacgcacgactcccatcgcgctgaagtggcgctgttctggcacggccttgcgtttcgcggcacgtcgttctgcacgcatatcgccgcctatttgctcgaccccacggaatcgcgccatacgctggcggacctgtcgcgccgctacggtctgccgccggtaccggaagccgaggacgtttacggcaagggcgcgaagttcaaggttcccgatcgcgacacgctggcgcgttacgtcggccgcaaggccgccctagtcgcgcggctcgttccgctgctcgaggcggatttggcggcctgcggcatgcgttcgcttttttacgacctggagctgccgctttcatccgaactcgccgtcatggagacggtcggcgtccgcgtcgacgcggcggcgctcgccgcctacggcgaggaattgcgcgaggcggcggcgaaagtcgagcgggagatttacgagctggccgggacgacgttcaacatcggatcgacgaaacagctcggcgaaattttgttcgataagctggggctgcccgtcgtcaagaaaacgaaaaccggctattccaccgacgcagacgtgctggaggaactggcgccgtaccatccgatcgtcgaaaagattttgcattaccgccaactgacgaaattgcagtcgacctacatcgaggggcttttgaaagaaatccgtccgcaaaccggtaaaatccatacgtattatcagcagacgatcgcggcgacggggcggctgagcagtcagtttcccaatcttcagaacattccgatccgtctcgaagaggggcggaaaatccgcaaggcgttcgttccgtcagaaccgggatggctgatgctcgccgccgactattcgcagatcgaactgcgcgtgctcgcgcacgtttccggcgacgaacggctgaaggaagcgtttcggacaggcatggacatccacacgaagaccgcgatggacgtgttcggcgtttccgaagaccgcgtcgacgcgcgcatgcggcggcaggcgaaggcggtcaatttcggcatcatctacggcatcagcgatttcggactggcgcaaaacctgaacatttcccgcaaggaggcggcggagttcatccggcaatatttcgccgtcttttcgggcgtcaaggcgtaccgcgagcggatcgtcgagcaggcgcgccgcgacggttacgtgacgaccctgctcggtcgcaggcgctatttgccggacatcaacgcgtcgaattacaacctccaatcgttcgcggagcggacggcgatgaatacgccgatccagggcacggccgccgacatcatcaagaccgcgatggtgcgtctgacgcggcggatgcgcgacgtcggactgaagagccgcatgctgctgcaggttcacgacgagctcgtgtttgaagtgccgccggacgagctcgacgcgatgcgggagcttgtgacggacgtcatggagtcggcggtcccgctcgacgtgccgctgaaggtcgacgtcagctggggcgccgactggtacgcggcgaagtgagggaagcgggatcc

SEQ ID NO: 1270 - DNA, 2792 bp, Artificial Sequence
  Description of Artificial Sequence: Synthetic Caldibacillus cellulovorans CompA.2 DNA Polymerase R833G
atgaaatacctgctgccgaccgctgctgctggtctgctgctcctcgctgcccagccggcgatggccatgggcaaactgattctggtcgacggaaacagcgtcgccaaccgggcgttttacgccgtccggctgctcagcacgcgcggcggcctgcacacaaacgcggtgtacggattcgccaacatgttgctcaagctgatcgaggaggaacggccgacgcattttctcgtcgcgttcgacgcgggcaaggcgacgttccgtcatcgcgaatacgaggcctacaaggcgggtcgcctgcagacgccgcccgagctgtccgagcagtttccgtacatccgggagctcgtccgggcgttcggcgtcgcgtccggcgagctggaggaatacgaggcggacgacatgatcggtacgctggcgaaacgggcggaggccgagggcgtcgacacgctggtcgtcaccggcgaccgcgatttgctccagctcgtatcggaccgcgtgaccgtcgcgctgacgcgcaagggcatcacggaaacggagcggtacgacccggcgcgcatccgcgaggaatacggcttcgatcccgaccgcatccgcgacctcaaagggctgatgggcgacgcgtctgacaatcttcccggcgttcccggcgtcggtgagaaaaccgcactgaaactgctcaggcagtacggttcgctggagagcgtcctggaacacgcgtcggaaatcgccggaaagctcggtgaaaatctgcgggcgcacgccgacgccgcccgattgagcaagcggctggcgacgatcgactgcgcggtaccgttgcagtcgggatgggactggctgcgcctcggcgaaccggaccgcgccgcgctcgcctcgctgttgcggcagctcgaattcaagtcgctgttgaaacggctcggactcgacggcacgtccgccgatgccgacgtcgacggcgtccgttcctccgcgcggccggcggacgagaaacggccgagggccgtcgccgtcgctgaggagggcgtcgacgtccgctgtccggatcgcccggaagaagtcgaagaagcgctgtcgcggctggaagccgcccagtcggtcgtcgtcgaggtgacgggcgacaacccgcacgacggcgaagtgcgcggcgtcgcatggtgggacggacatacggcgtatttcattccgtttgaacggctggtgcagtccgacatgcggccgctggccgactggctcgccgacgcgcgtcggccgaagcgtacgcacgactcccatcgcgctgaagtggcgctgttctggcacggccttgcgtttcgcggcacgtcgttctgcacgcatatcgccgcctatttgctcgaccccacggaatcgcgccatacgctggcggacctgtcgcgccgctacggtctgccgccggtaccggaagccgaggacgtttacggcaagggcgcgaagttcaaggttcccgatcgcgacacgctggcgcgttacgtcggccgcaaggccgccctagtcgcgcggctcgttccgctgctcgaggcggatttggcggcctgcggcatgcgttcgcttttttacgacctggagctgccgctttcatccgaactcgccgtcatggagacggtcggcgtccgcgtcgacgcggcggcgctcgccgcctacggcgaggaattgcgcgaggcggcggcgaaagtcgagcgggagatttacgagctggccgggacgacgttcaacatcggatcgacgaaacagctcggcgaaattttgttcgataagctggggctgcccgtcgtcaagaaaacgaaaaccggctattccaccgacgcagacgtgctggaggaactggcgccgtaccatccgatcgtcgaaaagattttgcattaccgccaactgacgaaattgcagtcgacctacatcgaggggcttttgaaagaaatccgtccgcaaaccggtaaaatccatacgtattatcagcagacgatcgcggcgacggggcggctgagcagtcagtttcccaatcttcagaacattccgatccgtctcgaagaggggcggaaaatccgcaaggcgttcgttccgtcagaaccgggatggctgatgctcgccgccgactattcgcagatcgaactgcgcgtgctcgcgcacgtttccggcgacgaacggctgaaggaagcgtttcggacaggcatggacatccacacgaagaccgcgatggacgtgttcggcgtttccgaagaccgcgtcgacgcgcgcatgcggcggcaggcgaaggcggtcaatttcggcatcatctacggcatcagcgatttcggactggcgcaaaacctgaacatttcccgcaaggaggcggcggagttcatccggcaatatttcgccgtcttttcgggcgtcaaggcgtaccgcgagcggatcgtcgagcaggcgcgccgcgacggttacgtgacgaccctgctcggtcgcaggcgctatttgccggacatcaacgcgtcgaattacaacctcggttcgttcgcggagcggacggcgatgaatacgccgatccagggcacggccgccgacatcatcaagaccgcgatggtgcgtctgacgcggcggatgcgcgacgtcggactgaagagccgcatgctgctgcaggttcacgacgagctcgtgtttgaagtgccgccggacgagctcgacgcgatgcgggagcttgtgacggacgtcatggagtcggcggtcccgctcgacgtgccgctgaaggtcgacgtcagctggggcgccgactggtacgcggcgaagtgagggaagcgggatcc

SEQ ID NO: 1271 - DNA, 2792 bp, Artificial Sequence
  Description of Artificial Sequence: Synthetic Caldibacillus cellulovorans CompA.2 DNA Polymerase R833H
atgaaatacctgctgccgaccgctgctgctggtctgctgctcctcgctgcccagccggcgatggccatgggcaaactgattctggtcgacggaaacagcgtcgccaaccgggcgttttacgccgtccggctgctcagcacgcgcggcggcctgcacacaaacgcggtgtacggattcgccaacatgttgctcaagctgatcgaggaggaacggccgacgcattttctcgtcgcgttcgacgcgggcaaggcgacgttccgtcatcgcgaatacgaggcctacaaggcgggtcgcctgcagacgccgcccgagctgtccgagcagtttccgtacatccgggagctcgtccgggcgttcggcgtcgcgtccggcgagctggaggaatacgaggcggacgacatgatcggtacgctggcgaaacgggcggaggccgagggcgtcgacacgctggtcgtcaccggcgaccgcgatttgctccagctcgtatcggaccgcgtgaccgtcgcgctgacgcgcaagggcatcacggaaacggagcggtacgacccggcgcgcatccgcgaggaatacggcttcgatcccgaccgcatccgcgacctcaaagggctgatgggcgacgcgtctgacaatcttcccggcgttcccggcgtcggtgagaaaaccgcactgaaactgctcaggcagtacggttcgctggagagcgtcctggaacacgcgtcggaaatcgccggaaagctcggtgaaaatctgcgggcgcacgccgacgccgcccgattgagcaagcggctggcgacgatcgactgcgcggtaccgttgcagtcgggatgggactggctgcgcctcggcgaaccggaccgcgccgcgctcgcctcgctgttgcggcagctcgaattcaagtcgctgttgaaacggctcggactcgacggcacgtccgccgatgccgacgtcgacggcgtccgttcctccgcgcggccggcggacgagaaacggccgagggccgtcgccgtcgctgaggagggcgtcgacgtccgctgtccggatcgcccggaagaagtcgaagaagcgctgtcgcggctggaagccgcccagtcggtcgtcgtcgaggtgacgggcgacaacccgcacgacggcgaagtgcgcggcgtcgcatggtgggacggacatacggcgtatttcattccgtttgaacggctggtgcagtccgacatgcggccgctggccgactggctcgccgacgcgcgtcggccgaagcgtacgcacgactcccatcgcgctgaagtggcgctgttctggcacggccttgcgtttcgcggcacgtcgttctgcacgcatatcgccgcctatttgctcgaccccacggaatcgcgccatacgctggcggacctgtcgcgccgctacggtctgccgccggtaccggaagccgaggacgtttacggcaagggcgcgaagttcaaggttcccgatcgcgacacgctggcgcgttacgtcggccgcaaggccgccctagtcgcgcggctcgttccgctgctcgaggcggatttggcggcctgcggcatgcgttcgcttttttacgacctggagctgccgctttcatccgaactcgccgtcatggagacggtcggcgtccgcgtcgacgcggcggcgctcgccgcctacggcgaggaattgcgcgaggcggcggcgaaagtcgagcgggagatttacgagctggccgggacgacgttcaacatcggatcgacgaaacagctcggcgaaattttgttcgataagctggggctgcccgtcgtcaagaaaacgaaaaccggctattccaccgacgcagacgtgctggaggaactggcgccgtaccatccgatcgtcgaaaagattttgcattaccgccaactgacgaaattgcagtcgacctacatcgaggggcttttgaaagaaatccgtccgcaaaccggtaaaatccatacgtattatcagcagacgatcgcggcgacggggcggctgagcagtcagtttcccaatcttcagaacattccgatccgtctcgaagaggggcggaaaatccgcaaggcgttcgttccgtcagaaccgggatggctgatgctcgccgccgactattcgcagatcgaactgcgcgtgctcgcgcacgtttccggcgacgaacggctgaaggaagcgtttcggacaggcatggacatccacacgaagaccgcgatggacgtgttcggcgtttccgaagaccgcgtcgacgcgcgcatgcggcggcaggcgaaggcggtcaatttcggcatcatctacggcatcagcgatttcggactggcgcaaaacctgaacatttcccgcaaggaggcggcggagttcatccggcaatatttcgccgtcttttcgggcgtcaaggcgtaccgcgagcggatcgtcgagcaggcgcgccgcgacggttacgtgacgaccctgctcggtcgcaggcgctatttgccggacatcaacgcgtcgaattacaacctccattcgttcgcggagcggacggcgatgaatacgccgatccagggcacggccgccgacatcatcaagaccgcgatggtgcgtctgacgcggcggatgcgcgacgtcggactgaagagccgcatgctgctgcaggttcacgacgagctcgtgtttgaagtgccgccggacgagctcgacgcgatgcgggagcttgtgacggacgtcatggagtcggcggtcccgctcgacgtgccgctgaaggtcgacgtcagctggggcgccgactggtacgcggcgaagtgagggaagcgggatcc

SEQ ID NO: 1272 - DNA, 2792 bp, Artificial Sequence
  Description of Artificial Sequence: Synthetic Caldibacillus cellulovorans CompA.2 DNA Polymerase R833I
atgaaatacctgctgccgaccgctgctgctggtctgctgctcctcgctgcccagccggcgatggccatgggcaaactgattctggtcgacggaaacagcgtcgccaaccgggcgttttacgccgtccggctgctcagcacgcgcggcggcctgcacacaaacgcggtgtacggattcgccaacatgttgctcaagctgatcgaggaggaacggccgacgcattttctcgtcgcgttcgacgcgggcaaggcgacgttccgtcatcgcgaatacgaggcctacaaggcgggtcgcctgcagacgccgcccgagctgtccgagcagtttccgtacatccgggagctcgtccgggcgttcggcgtcgcgtccggcgagctggaggaatacgaggcggacgacatgatcggtacgctggcgaaacgggcggaggccgagggcgtcgacacgctggtcgtcaccggcgaccgcgatttgctccagctcgtatcggaccgcgtgaccgtcgcgctgacgcgcaagggcatcacggaaacggagcggtacgacccggcgcgcatccgcgaggaatacggcttcgatcccgaccgcatccgcgacctcaaagggctgatgggcgacgcgtctgacaatcttcccggcgttcccggcgtcggtgagaaaaccgcactgaaactgctcaggcagtacggttcgctggagagcgtcctggaacacgcgtcggaaatcgccggaaagctcggtgaaaatctgcgggcgcacgccgacgccgcccgattgagcaagcggctggcgacgatcgactgcgcggtaccgttgcagtcgggatgggactggctgcgcctcggcgaaccggaccgcgccgcgctcgcctcgctgttgcggcagctcgaattcaagtcgctgttgaaacggctcggactcgacggcacgtccgccgatgccgacgtcgacggcgtccgttcctccgcgcggccggcggacgagaaacggccgagggccgtcgccgtcgctgaggagggcgtcgacgtccgctgtccggatcgcccggaagaagtcgaagaagcgctgtcgcggctggaagccgcccagtcggtcgtcgtcgaggtgacgggcgacaacccgcacgacggcgaagtgcgcggcgtcgcatggtgggacggacatacggcgtatttcattccgtttgaacggctggtgcagtccgacatgcggccgctggccgactggctcgccgacgcgcgtcggccgaagcgtacgcacgactcccatcgcgctgaagtggcgctgttctggcacggccttgcgtttcgcggcacgtcgttctgcacgcatatcgccgcctatttgctcgaccccacggaatcgcgccatacgctggcggacctgtcgcgccgctacggtctgccgccggtaccggaagccgaggacgtttacggcaagggcgcgaagttcaaggttcccgatcgcgacacgctggcgcgttacgtcggccgcaaggccgccctagtcgcgcggctcgttccgctgctcgaggcggatttggcggcctgcggcatgcgttcgcttttttacgacctggagctgccgctttcatccgaactcgccgtcatggagacggtcggcgtccgcgtcgacgcggcggcgctcgccgcctacggcgaggaattgcgcgaggcggcggcgaaagtcgagcgggagatttacgagctggccgggacgacgttcaacatcggatcgacgaaacagctcggcgaaattttgttcgataagctggggctgcccgtcgtcaagaaaacgaaaaccggctattccaccgacgcagacgtgctggaggaactggcgccgtaccatccgatcgtcgaaaagattttgcattaccgccaactgacgaaattgcagtcgacctacatcgaggggcttttgaaagaaatccgtccgcaaaccggtaaaatccatacgtattatcagcagacgatcgcggcgacggggcggctgagcagtcagtttcccaatcttcagaacattccgatccgtctcgaagaggggcggaaaatccgcaaggcgttcgttccgtcagaaccgggatggctgatgctcgccgccgactattcgcagatcgaactgcgcgtgctcgcgcacgtttccggcgacgaacggctgaaggaagcgtttcggacaggcatggacatccacacgaagaccgcgatggacgtgttcggcgtttccgaagaccgcgtcgacgcgcgcatgcggcggcaggcgaaggcggtcaatttcggcatcatctacggcatcagcgatttcggactggcgcaaaacctgaacatttcccgcaaggaggcggcggagttcatccggcaatatttcgccgtcttttcgggcgtcaaggcgtaccgcgagcggatcgtcgagcaggcgcgccgcgacggttacgtgacgaccctgctcggtcgcaggcgctatttgccggacatcaacgcgtcgaattacaacctcatttcgttcgcggagcggacggcgatgaatacgccgatccagggcacggccgccgacatcatcaagaccgcgatggtgcgtctgacgcggcggatgcgcgacgtcggactgaagagccgcatgctgctgcaggttcacgacgagctcgtgtttgaagtgccgccggacgagctcgacgcgatgcgggagcttgtgacggacgtcatggagtcggcggtcccgctcgacgtgccgctgaaggtcgacgtcagctggggcgccgactggtacgcggcgaagtgagggaagcgggatcc

SEQ ID NO: 1273 - DNA, 2792 bp, Artificial Sequence
  Description of Artificial Sequence: Synthetic Caldibacillus cellulovorans CompA.2 DNA Polymerase R833L
atgaaatacctgctgccgaccgctgctgctggtctgctgctcctcgctgcccagccggcgatggccatgggcaaactgattctggtcgacggaaacagcgtcgccaaccgggcgttttacgccgtccggctgctcagcacgcgcggcggcctgcacacaaacgcggtgtacggattcgccaacatgttgctcaagctgatcgaggaggaacggccgacgcattttctcgtcgcgttcgacgcgggcaaggcgacgttccgtcatcgcgaatacgaggcctacaaggcgggtcgcctgcagacgccgcccgagctgtccgagcagtttccgtacatccgggagctcgtccgggcgttcggcgtcgcgtccggcgagctggaggaatacgaggcggacgacatgatcggtacgctggcgaaacgggcggaggccgagggcgtcgacacgctggtcgtcaccggcgaccgcgatttgctccagctcgtatcggaccgcgtgaccgtcgcgctgacgcgcaagggcatcacggaaacggagcggtacgacccggcgcgcatccgcgaggaatacggcttcgatcccgaccgcatccgcgacctcaaagggctgatgggcgacgcgtctgacaatcttcccggcgttcccggcgtcggtgagaaaaccgcactgaaactgctcaggcagtacggttcgctggagagcgtcctggaacacgcgtcggaaatcgccggaaagctcggtgaaaatctgcgggcgcacgccgacgccgcccgattgagcaagcggctggcgacgatcgactgcgcggtaccgttgcagtcgggatgggactggctgcgcctcggcgaaccggaccgcgccgcgctcgcctcgctgttgcggcagctcgaattcaagtcgctgttgaaacggctcggactcgacggcacgtccgccgatgccgacgtcgacggcgtccgttcctccgcgcggccggcggacgagaaacggccgagggccgtcgccgtcgctgaggagggcgtcgacgtccgctgtccggatcgcccggaagaagtcgaagaagcgctgtcgcggctggaagccgcccagtcggtcgtcgtcgaggtgacgggcgacaacccgcacgacggcgaagtgcgcggcgtcgcatggtgggacggacatacggcgtatttcattccgtttgaacggctggtgcagtccgacatgcggccgctggccgactggctcgccgacgcgcgtcggccgaagcgtacgcacgactcccatcgcgctgaagtggcgctgttctggcacggccttgcgtttcgcggcacgtcgttctgcacgcatatcgccgcctatttgctcgaccccacggaatcgcgccatacgctggcggacctgtcgcgccgctacggtctgccgccggtaccggaagccgaggacgtttacggcaagggcgcgaagttcaaggttcccgatcgcgacacgctggcgcgttacgtcggccgcaaggccgccctagtcgcgcggctcgttccgctgctcgaggcggatttggcggcctgcggcatgcgttcgcttttttacgacctggagctgccgctttcatccgaactcgccgtcatggagacggtcggcgtccgcgtcgacgcggcggcgctcgccgcctacggcgaggaattgcgcgaggcggcggcgaaagtcgagcgggagatttacgagctggccgggacgacgttcaacatcggatcgacgaaacagctcggcgaaattttgttcgataagctggggctgcccgtcgtcaagaaaacgaaaaccggctattccaccgacgcagacgtgctggaggaactggcgccgtaccatccgatcgtcgaaaagattttgcattaccgccaactgacgaaattgcagtcgacctacatcgaggggcttttgaaagaaatccgtccgcaaaccggtaaaatccatacgtattatcagcagacgatcgcggcgacggggcggctgagcagtcagtttcccaatcttcagaacattccgatccgtctcgaagaggggcggaaaatccgcaaggcgttcgttccgtcagaaccgggatggctgatgctcgccgccgactattcgcagatcgaactgcgcgtgctcgcgcacgtttccggcgacgaacggctgaaggaagcgtttcggacaggcatggacatccacacgaagaccgcgatggacgtgttcggcgtttccgaagaccgcgtcgacgcgcgcatgcggcggcaggcgaaggcggtcaatttcggcatcatctacggcatcagcgatttcggactggcgcaaaacctgaacatttcccgcaaggaggcggcggagttcatccggcaatatttcgccgtcttttcgggcgtcaaggcgtaccgcgagcggatcgtcgagcaggcgcgccgcgacggttacgtgacgaccctgctcggtcgcaggcgctatttgccggacatcaacgcgtcgaattacaacctcctttcgttcgcggagcggacggcgatgaatacgccgatccagggcacggccgccgacatcatcaagaccgcgatggtgcgtctgacgcggcggatgcgcgacgtcggactgaagagccgcatgctgctgcaggttcacgacgagctcgtgtttgaagtgccgccggacgagctcgacgcgatgcgggagcttgtgacggacgtcatggagtcggcggtcccgctcgacgtgccgctgaaggtcgacgtcagctggggcgccgactggtacgcggcgaagtgagggaagcgggatcc

SEQ ID NO: 1274 - DNA, 2792 bp, Artificial Sequence
  Description of Artificial Sequence: Synthetic Caldibacillus cellulovorans CompA.2 DNA Polymerase R833K
atgaaatacctgctgccgaccgctgctgctggtctgctgctcctcgctgcccagccggcgatggccatgggcaaactgattctggtcgacggaaacagcgtcgccaaccgggcgttttacgccgtccggctgctcagcacgcgcggcggcctgcacacaaacgcggtgtacggattcgccaacatgttgctcaagctgatcgaggaggaacggccgacgcattttctcgtcgcgttcgacgcgggcaaggcgacgttccgtcatcgcgaatacgaggcctacaaggcgggtcgcctgcagacgccgcccgagctgtccgagcagtttccgtacatccgggagctcgtccgggcgttcggcgtcgcgtccggcgagctggaggaatacgaggcggacgacatgatcggtacgctggcgaaacgggcggaggccgagggcgtcgacacgctggtcgtcaccggcgaccgcgatttgctccagctcgtatcggaccgcgtgaccgtcgcgctgacgcgcaagggcatcacggaaacggagcggtacgacccggcgcgcatccgcgaggaatacggcttcgatcccgaccgcatccgcgacctcaaagggctgatgggcgacgcgtctgacaatcttcccggcgttcccggcgtcggtgagaaaaccgcactgaaactgctcaggcagtacggttcgctggagagcgtcctggaacacgcgtcggaaatcgccggaaagctcggtgaaaatctgcgggcgcacgccgacgccgcccgattgagcaagcggctggcgacgatcgactgcgcggtaccgttgcagtcgggatgggactggctgcgcctcggcgaaccggaccgcgccgcgctcgcctcgctgttgcggcagctcgaattcaagtcgctgttgaaacggctcggactcgacggcacgtccgccgatgccgacgtcgacggcgtccgttcctccgcgcggccggcggacgagaaacggccgagggccgtcgccgtcgctgaggagggcgtcgacgtccgctgtccggatcgcccggaagaagtcgaagaagcgctgtcgcggctggaagccgcccagtcggtcgtcgtcgaggtgacgggcgacaacccgcacgacggcgaagtgcgcggcgtcgcatggtgggacggacatacggcgtatttcattccgtttgaacggctggtgcagtccgacatgcggccgctggccgactggctcgccgacgcgcgtcggccgaagcgtacgcacgactcccatcgcgctgaagtggcgctgttctggcacggccttgcgtttcgcggcacgtcgttctgcacgcatatcgccgcctatttgctcgaccccacggaatcgcgccatacgctggcggacctgtcgcgccgctacggtctgccgccggtaccggaagccgaggacgtttacggcaagggcgcgaagttcaaggttcccgatcgcgacacgctggcgcgttacgtcggccgcaaggccgccctagtcgcgcggctcgttccgctgctcgaggcggatttggcggcctgcggcatgcgttcgcttttttacgacctggagctgccgctttcatccgaactcgccgtcatggagacggtcggcgtccgcgtcgacgcggcggcgctcgccgcctacggcgaggaattgcgcgaggcggcggcgaaagtcgagcgggagatttacgagctggccgggacgacgttcaacatcggatcgacgaaacagctcggcgaaattttgttcgataagctggggctgcccgtcgtcaagaaaacgaaaaccggctattccaccgacgcagacgtgctggaggaactggcgccgtaccatccgatcgtcgaaaagattttgcattaccgccaactgacgaaattgcagtcgacctacatcgaggggcttttgaaagaaatccgtccgcaaaccggtaaaatccatacgtattatcagcagacgatcgcggcgacggggcggctgagcagtcagtttcccaatcttcagaacattccgatccgtctcgaagaggggcggaaaatccgcaaggcgttcgttccgtcagaaccgggatggctgatgctcgccgccgactattcgcagatcgaactgcgcgtgctcgcgcacgtttccggcgacgaacggctgaaggaagcgtttcggacaggcatggacatccacacgaagaccgcgatggacgtgttcggcgtttccgaagaccgcgtcgacgcgcgcatgcggcggcaggcgaaggcggtcaatttcggcatcatctacggcatcagcgatttcggactggcgcaaaacctgaacatttcccgcaaggaggcggcggagttcatccggcaatatttcgccgtcttttcgggcgtcaaggcgtaccgcgagcggatcgtcgagcaggcgcgccgcgacggttacgtgacgaccctgctcggtcgcaggcgctatttgccggacatcaacgcgtcgaattacaacctcaaatcgttcgcggagcggacggcgatgaatacgccgatccagggcacggccgccgacatcatcaagaccgcgatggtgcgtctgacgcggcggatgcgcgacgtcggactgaagagccgcatgctgctgcaggttcacgacgagctcgtgtttgaagtgccgccggacgagctcgacgcgatgcgggagcttgtgacggacgtcatggagtcggcggtcccgctcgacgtgccgctgaaggtcgacgtcagctggggcgccgactggtacgcggcgaagtgagggaagcgggatcc

SEQ ID NO: 1275 - DNA, 2792 bp, Artificial Sequence
  Description of Artificial Sequence: Synthetic Caldibacillus cellulovorans CompA.2 DNA Polymerase R833M
atgaaatacctgctgccgaccgctgctgctggtctgctgctcctcgctgcccagccggcgatggccatgggcaaactgattctggtcgacggaaacagcgtcgccaaccgggcgttttacgccgtccggctgctcagcacgcgcggcggcctgcacacaaacgcggtgtacggattcgccaacatgttgctcaagctgatcgaggaggaacggccgacgcattttctcgtcgcgttcgacgcgggcaaggcgacgttccgtcatcgcgaatacgaggcctacaaggcgggtcgcctgcagacgccgcccgagctgtccgagcagtttccgtacatccgggagctcgtccgggcgttcggcgtcgcgtccggcgagctggaggaatacgaggcggacgacatgatcggtacgctggcgaaacgggcggaggccgagggcgtcgacacgctggtcgtcaccggcgaccgcgatttgctccagctcgtatcggaccgcgtgaccgtcgcgctgacgcgcaagggcatcacggaaacggagcggtacgacccggcgcgcatccgcgaggaatacggcttcgatcccgaccgcatccgcgacctcaaagggctgatgggcgacgcgtctgacaatcttcccggcgttcccggcgtcggtgagaaaaccgcactgaaactgctcaggcagtacggttcgctggagagcgtcctggaacacgcgtcggaaatcgccggaaagctcggtgaaaatctgcgggcgcacgccgacgccgcccgattgagcaagcggctggcgacgatcgactgcgcggtaccgttgcagtcgggatgggactggctgcgcctcggcgaaccggaccgcgccgcgctcgcctcgctgttgcggcagctcgaattcaagtcgctgttgaaacggctcggactcgacggcacgtccgccgatgccgacgtcgacggcgtccgttcctccgcgcggccggcggacgagaaacggccgagggccgtcgccgtcgctgaggagggcgtcgacgtccgctgtccggatcgcccggaagaagtcgaagaagcgctgtcgcggctggaagccgcccagtcggtcgtcgtcgaggtgacgggcgacaacccgcacgacggcgaagtgcgcggcgtcgcatggtgggacggacatacggcgtatttcattccgtttgaacggctggtgcagtccgacatgcggccgctggccgactggctcgccgacgcgcgtcggccgaagcgtacgcacgactcccatcgcgctgaagtggcgctgttctggcacggccttgcgtttcgcggcacgtcgttctgcacgcatatcgccgcctatttgctcgaccccacggaatcgcgccatacgctggcggacctgtcgcgccgctacggtctgccgccggtaccggaagccgaggacgtttacggcaagggcgcgaagttcaaggttcccgatcgcgacacgctggcgcgttacgtcggccgcaaggccgccctagtcgcgcggctcgttccgctgctcgaggcggatttggcggcctgcggcatgcgttcgcttttttacgacctggagctgccgctttcatccgaactcgccgtcatggagacggtcggcgtccgcgtcgacgcggcggcgctcgccgcctacggcgaggaattgcgcgaggcggcggcgaaagtcgagcgggagatttacgagctggccgggacgacgttcaacatcggatcgacgaaacagctcggcgaaattttgttcgataagctggggctgcccgtcgtcaagaaaacgaaaaccggctattccaccgacgcagacgtgctggaggaactggcgccgtaccatccgatcgtcgaaaagattttgcattaccgccaactgacgaaattgcagtcgacctacatcgaggggcttttgaaagaaatccgtccgcaaaccggtaaaatccatacgtattatcagcagacgatcgcggcgacggggcggctgagcagtcagtttcccaatcttcagaacattccgatccgtctcgaagaggggcggaaaatccgcaaggcgttcgttccgtcagaaccgggatggctgatgctcgccgccgactattcgcagatcgaactgcgcgtgctcgcgcacgtttccggcgacgaacggctgaaggaagcgtttcggacaggcatggacatccacacgaagaccgcgatggacgtgttcggcgtttccgaagaccgcgtcgacgcgcgcatgcggcggcaggcgaaggcggtcaatttcggcatcatctacggcatcagcgatttcggactggcgcaaaacctgaacatttcccgcaaggaggcggcggagttcatccggcaatatttcgccgtcttttcgggcgtcaaggcgtaccgcgagcggatcgtcgagcaggcgcgccgcgacggttacgtgacgaccctgctcggtcgcaggcgctatttgccggacatcaacgcgtcgaattacaacctcatgtcgttcgcggagcggacggcgatgaatacgccgatccagggcacggccgccgacatcatcaagaccgcgatggtgcgtctgacgcggcggatgcgcgacgtcggactgaagagccgcatgctgctgcaggttcacgacgagctcgtgtttgaagtgccgccggacgagctcgacgcgatgcgggagcttgtgacggacgtcatggagtcggcggtcccgctcgacgtgccgctgaaggtcgacgtcagctggggcgccgactggtacgcggcgaagtgagggaagcgggatcc

SEQ ID NO: 1276 - DNA, 2792 bp, Artificial Sequence
  Description of Artificial Sequence: Synthetic Caldibacillus cellulovorans CompA.2 DNA Polymerase R833F
atgaaatacctgctgccgaccgctgctgctggtctgctgctcctcgctgcccagccggcgatggccatgggcaaactgattctggtcgacggaaacagcgtcgccaaccgggcgttttacgccgtccggctgctcagcacgcgcggcggcctgcacacaaacgcggtgtacggattcgccaacatgttgctcaagctgatcgaggaggaacggccgacgcattttctcgtcgcgttcgacgcgggcaaggcgacgttccgtcatcgcgaatacgaggcctacaaggcgggtcgcctgcagacgccgcccgagctgtccgagcagtttccgtacatccgggagctcgtccgggcgttcggcgtcgcgtccggcgagctggaggaatacgaggcggacgacatgatcggtacgctggcgaaacgggcggaggccgagggcgtcgacacgctggtcgtcaccggcgaccgcgatttgctccagctcgtatcggaccgcgtgaccgtcgcgctgacgcgcaagggcatcacggaaacggagcggtacgacccggcgcgcatccgcgaggaatacggcttcgatcccgaccgcatccgcgacctcaaagggctgatgggcgacgcgtctgacaatcttcccggcgttcccggcgtcggtgagaaaaccgcactgaaactgctcaggcagtacggttcgctggagagcgtcctggaacacgcgtcggaaatcgccggaaagctcggtgaaaatctgcgggcgcacgccgacgccgcccgattgagcaagcggctggcgacgatcgactgcgcggtaccgttgcagtcgggatgggactggctgcgcctcggcgaaccggaccgcgccgcgctcgcctcgctgttgcggcagctcgaattcaagtcgctgttgaaacggctcggactcgacggcacgtccgccgatgccgacgtcgacggcgtccgttcctccgcgcggccggcggacgagaaacggccgagggccgtcgccgtcgctgaggagggcgtcgacgtccgctgtccggatcgcccggaagaagtcgaagaagcgctgtcgcggctggaagccgcccagtcggtcgtcgtcgaggtgacgggcgacaacccgcacgacggcgaagtgcgcggcgtcgcatggtgggacggacatacggcgtatttcattccgtttgaacggctggtgcagtccgacatgcggccgctggccgactggctcgccgacgcgcgtcggccgaagcgtacgcacgactcccatcgcgctgaagtggcgctgttctggcacggccttgcgtttcgcggcacgtcgttctgcacgcatatcgccgcctatttgctcgaccccacggaatcgcgccatacgctggcggacctgtcgcgccgctacggtctgccgccggtaccggaagccgaggacgtttacggcaagggcgcgaagttcaaggttcccgatcgcgacacgctggcgcgttacgtcggccgcaaggccgccctagtcgcgcggctcgttccgctgctcgaggcggatttggcggcctgcggcatgcgttcgcttttttacgacctggagctgccgctttcatccgaactcgccgtcatggagacggtcggcgtccgcgtcgacgcggcggcgctcgccgcctacggcgaggaattgcgcgaggcggcggcgaaagtcgagcgggagatttacgagctggccgggacgacgttcaacatcggatcgacgaaacagctcggcgaaattttgttcgataagctggggctgcccgtcgtcaagaaaacgaaaaccggctattccaccgacgcagacgtgctggaggaactggcgccgtaccatccgatcgtcgaaaagattttgcattaccgccaactgacgaaattgcagtcgacctacatcgaggggcttttgaaagaaatccgtccgcaaaccggtaaaatccatacgtattatcagcagacgatcgcggcgacggggcggctgagcagtcagtttcccaatcttcagaacattccgatccgtctcgaagaggggcggaaaatccgcaaggcgttcgttccgtcagaaccgggatggctgatgctcgccgccgactattcgcagatcgaactgcgcgtgctcgcgcacgtttccggcgacgaacggctgaaggaagcgtttcggacaggcatggacatccacacgaagaccgcgatggacgtgttcggcgtttccgaagaccgcgtcgacgcgcgcatgcggcggcaggcgaaggcggtcaatttcggcatcatctacggcatcagcgatttcggactggcgcaaaacctgaacatttcccgcaaggaggcggcggagttcatccggcaatatttcgccgtcttttcgggcgtcaaggcgtaccgcgagcggatcgtcgagcaggcgcgccgcgacggttacgtgacgaccctgctcggtcgcaggcgctatttgccggacatcaacgcgtcgaattacaacctcttttcgttcgcggagcggacggcgatgaatacgccgatccagggcacggccgccgacatcatcaagaccgcgatggtgcgtctgacgcggcggatgcgcgacgtcggactgaagagccgcatgctgctgcaggttcacgacgagctcgtgtttgaagtgccgccggacgagctcgacgcgatgcgggagcttgtgacggacgtcatggagtcggcggtcccgctcgacgtgccgctgaaggtcgacgtcagctggggcgccgactggtacgcggcgaagtgagggaagcgggatcc

SEQ ID NO: 1277 - DNA, 2792 bp, Artificial Sequence
  Description of Artificial Sequence: Synthetic Caldibacillus cellulovorans CompA.2 DNA Polymerase R833P
atgaaatacctgctgccgaccgctgctgctggtctgctgctcctcgctgcccagccggcgatggccatgggcaaactgattctggtcgacggaaacagcgtcgccaaccgggcgttttacgccgtccggctgctcagcacgcgcggcggcctgcacacaaacgcggtgtacggattcgccaacatgttgctcaagctgatcgaggaggaacggccgacgcattttctcgtcgcgttcgacgcgggcaaggcgacgttccgtcatcgcgaatacgaggcctacaaggcgggtcgcctgcagacgccgcccgagctgtccgagcagtttccgtacatccgggagctcgtccgggcgttcggcgtcgcgtccggcgagctggaggaatacgaggcggacgacatgatcggtacgctggcgaaacgggcggaggccgagggcgtcgacacgctggtcgtcaccggcgaccgcgatttgctccagctcgtatcggaccgcgtgaccgtcgcgctgacgcgcaagggcatcacggaaacggagcggtacgacccggcgcgcatccgcgaggaatacggcttcgatcccgaccgcatccgcgacctcaaagggctgatgggcgacgcgtctgacaatcttcccggcgttcccggcgtcggtgagaaaaccgcactgaaactgctcaggcagtacggttcgctggagagcgtcctggaacacgcgtcggaaatcgccggaaagctcggtgaaaatctgcgggcgcacgccgacgccgcccgattgagcaagcggctggcgacgatcgactgcgcggtaccgttgcagtcgggatgggactggctgcgcctcggcgaaccggaccgcgccgcgctcgcctcgctgttgcggcagctcgaattcaagtcgctgttgaaacggctcggactcgacggcacgtccgccgatgccgacgtcgacggcgtccgttcctccgcgcggccggcggacgagaaacggccgagggccgtcgccgtcgctgaggagggcgtcgacgtccgctgtccggatcgcccggaagaagtcgaagaagcgctgtcgcggctggaagccgcccagtcggtcgtcgtcgaggtgacgggcgacaacccgcacgacggcgaagtgcgcggcgtcgcatggtgggacggacatacggcgtatttcattccgtttgaacggctggtgcagtccgacatgcggccgctggccgactggctcgccgacgcgcgtcggccgaagcgtacgcacgactcccatcgcgctgaagtggcgctgttctggcacggccttgcgtttcgcggcacgtcgttctgcacgcatatcgccgcctatttgctcgaccccacggaatcgcgccatacgctggcggacctgtcgcgccgctacggtctgccgccggtaccggaagccgaggacgtttacggcaagggcgcgaagttcaaggttcccgatcgcgacacgctggcgcgttacgtcggccgcaaggccgccctagtcgcgcggctcgttccgctgctcgaggcggatttggcggcctgcggcatgcgttcgcttttttacgacctggagctgccgctttcatccgaactcgccgtcatggagacggtcggcgtccgcgtcgacgcggcggcgctcgccgcctacggcgaggaattgcgcgaggcggcggcgaaagtcgagcgggagatttacgagctggccgggacgacgttcaacatcggatcgacgaaacagctcggcgaaattttgttcgataagctggggctgcccgtcgtcaagaaaacgaaaaccggctattccaccgacgcagacgtgctggaggaactggcgccgtaccatccgatcgtcgaaaagattttgcattaccgccaactgacgaaattgcagtcgacctacatcgaggggcttttgaaagaaatccgtccgcaaaccggtaaaatccatacgtattatcagcagacgatcgcggcgacggggcggctgagcagtcagtttcccaatcttcagaacattccgatccgtctcgaagaggggcggaaaatccgcaaggcgttcgttccgtcagaaccgggatggctgatgctcgccgccgactattcgcagatcgaactgcgcgtgctcgcgcacgtttccggcgacgaacggctgaaggaagcgtttcggacaggcatggacatccacacgaagaccgcgatggacgtgttcggcgtttccgaagaccgcgtcgacgcgcgcatgcggcggcaggcgaaggcggtcaatttcggcatcatctacggcatcagcgatttcggactggcgcaaaacctgaacatttcccgcaaggaggcggcggagttcatccggcaatatttcgccgtcttttcgggcgtcaaggcgtaccgcgagcggatcgtcgagcaggcgcgccgcgacggttacgtgacgaccctgctcggtcgcaggcgctatttgccggacatcaacgcgtcgaattacaacctcccttcgttcgcggagcggacggcgatgaatacgccgatccagggcacggccgccgacatcatcaagaccgcgatggtgcgtctgacgcggcggatgcgcgacgtcggactgaagagccgcatgctgctgcaggttcacgacgagctcgtgtttgaagtgccgccggacgagctcgacgcgatgcgggagcttgtgacggacgtcatggagtcggcggtcccgctcgacgtgccgctgaaggtcgacgtcagctggggcgccgactggtacgcggcgaagtgagggaagcgggatcc

SEQ ID NO: 1278 - DNA, 2792 bp, Artificial Sequence
  Description of Artificial Sequence: Synthetic Caldibacillus cellulovorans CompA.2 DNA Polymerase R833S
atgaaatacctgctgccgaccgctgctgctggtctgctgctcctcgctgcccagccggcgatggccatgggcaaactgattctggtcgacggaaacagcgtcgccaaccgggcgttttacgccgtccggctgctcagcacgcgcggcggcctgcacacaaacgcggtgtacggattcgccaacatgttgctcaagctgatcgaggaggaacggccgacgcattttctcgtcgcgttcgacgcgggcaaggcgacgttccgtcatcgcgaatacgaggcctacaaggcgggtcgcctgcagacgccgcccgagctgtccgagcagtttccgtacatccgggagctcgtccgggcgttcggcgtcgcgtccggcgagctggaggaatacgaggcggacgacatgatcggtacgctggcgaaacgggcggaggccgagggcgtcgacacgctggtcgtcaccggcgaccgcgatttgctccagctcgtatcggaccgcgtgaccgtcgcgctgacgcgcaagggcatcacggaaacggagcggtacgacccggcgcgcatccgcgaggaatacggcttcgatcccgaccgcatccgcgacctcaaagggctgatgggcgacgcgtctgacaatcttcccggcgttcccggcgtcggtgagaaaaccgcactgaaactgctcaggcagtacggttcgctggagagcgtcctggaacacgcgtcggaaatcgccggaaagctcggtgaaaatctgcgggcgcacgccgacgccgcccgattgagcaagcggctggcgacgatcgactgcgcggtaccgttgcagtcgggatgggactggctgcgcctcggcgaaccggaccgcgccgcgctcgcctcgctgttgcggcagctcgaattcaagtcgctgttgaaacggctcggactcgacggcacgtccgccgatgccgacgtcgacggcgtccgttcctccgcgcggccggcggacgagaaacggccgagggccgtcgccgtcgctgaggagggcgtcgacgtccgctgtccggatcgcccggaagaagtcgaagaagcgctgtcgcggctggaagccgcccagtcggtcgtcgtcgaggtgacgggcgacaacccgcacgacggcgaagtgcgcggcgtcgcatggtgggacggacatacggcgtatttcattccgtttgaacggctggtgcagtccgacatgcggccgctggccgactggctcgccgacgcgcgtcggccgaagcgtacgcacgactcccatcgcgctgaagtggcgctgttctggcacggccttgcgtttcgcggcacgtcgttctgcacgcatatcgccgcctatttgctcgaccccacggaatcgcgccatacgctggcggacctgtcgcgccgctacggtctgccgccggtaccggaagccgaggacgtttacggcaagggcgcgaagttcaaggttcccgatcgcgacacgctggcgcgttacgtcggccgcaaggccgccctagtcgcgcggctcgttccgctgctcgaggcggatttggcggcctgcggcatgcgttcgcttttttacgacctggagctgccgctttcatccgaactcgccgtcatggagacggtcggcgtccgcgtcgacgcggcggcgctcgccgcctacggcgaggaattgcgcgaggcggcggcgaaagtcgagcgggagatttacgagctggccgggacgacgttcaacatcggatcgacgaaacagctcggcgaaattttgttcgataagctggggctgcccgtcgtcaagaaaacgaaaaccggctattccaccgacgcagacgtgctggaggaactggcgccgtaccatccgatcgtcgaaaagattttgcattaccgccaactgacgaaattgcagtcgacctacatcgaggggcttttgaaagaaatccgtccgcaaaccggtaaaatccatacgtattatcagcagacgatcgcggcgacggggcggctgagcagtcagtttcccaatcttcagaacattccgatccgtctcgaagaggggcggaaaatccgcaaggcgttcgttccgtcagaaccgggatggctgatgctcgccgccgactattcgcagatcgaactgcgcgtgctcgcgcacgtttccggcgacgaacggctgaaggaagcgtttcggacaggcatggacatccacacgaagaccgcgatggacgtgttcggcgtttccgaagaccgcgtcgacgcgcgcatgcggcggcaggcgaaggcggtcaatttcggcatcatctacggcatcagcgatttcggactggcgcaaaacctgaacatttcccgcaaggaggcggcggagttcatccggcaatatttcgccgtcttttcgggcgtcaaggcgtaccgcgagcggatcgtcgagcaggcgcgccgcgacggttacgtgacgaccctgctcggtcgcaggcgctatttgccggacatcaacgcgtcgaattacaacctctcttcgttcgcggagcggacggcgatgaatacgccgatccagggcacggccgccgacatcatcaagaccgcgatggtgcgtctgacgcggcggatgcgcgacgtcggactgaagagccgcatgctgctgcaggttcacgacgagctcgtgtttgaagtgccgccggacgagctcgacgcgatgcgggagcttgtgacggacgtcatggagtcggcggtcccgctcgacgtgccgctgaaggtcgacgtcagctggggcgccgactggtacgcggcgaagtgagggaagcgggatcc

SEQ ID NO: 1279 - DNA, 2792 bp, Artificial Sequence
  Description of Artificial Sequence: Synthetic Caldibacillus cellulovorans CompA.2 DNA Polymerase R833T
atgaaatacctgctgccgaccgctgctgctggtctgctgctcctcgctgcccagccggcgatggccatgggcaaactgattctggtcgacggaaacagcgtcgccaaccgggcgttttacgccgtccggctgctcagcacgcgcggcggcctgcacacaaacgcggtgtacggattcgccaacatgttgctcaagctgatcgaggaggaacggccgacgcattttctcgtcgcgttcgacgcgggcaaggcgacgttccgtcatcgcgaatacgaggcctacaaggcgggtcgcctgcagacgccgcccgagctgtccgagcagtttccgtacatccgggagctcgtccgggcgttcggcgtcgcgtccggcgagctggaggaatacgaggcggacgacatgatcggtacgctggcgaaacgggcggaggccgagggcgtcgacacgctggtcgtcaccggcgaccgcgatttgctccagctcgtatcggaccgcgtgaccgtcgcgctgacgcgcaagggcatcacggaaacggagcggtacgacccggcgcgcatccgcgaggaatacggcttcgatcccgaccgcatccgcgacctcaaagggctgatgggcgacgcgtctgacaatcttcccggcgttcccggcgtcggtgagaaaaccgcactgaaactgctcaggcagtacggttcgctggagagcgtcctggaacacgcgtcggaaatcgccggaaagctcggtgaaaatctgcgggcgcacgccgacgccgcccgattgagcaagcggctggcgacgatcgactgcgcggtaccgttgcagtcgggatgggactggctgcgcctcggcgaaccggaccgcgccgcgctcgcctcgctgttgcggcagctcgaattcaagtcgctgttgaaacggctcggactcgacggcacgtccgccgatgccgacgtcgacggcgtccgttcctccgcgcggccggcggacgagaaacggccgagggccgtcgccgtcgctgaggagggcgtcgacgtccgctgtccggatcgcccggaagaagtcgaagaagcgctgtcgcggctggaagccgcccagtcggtcgtcgtcgaggtgacgggcgacaacccgcacgacggcgaagtgcgcggcgtcgcatggtgggacggacatacggcgtatttcattccgtttgaacggctggtgcagtccgacatgcggccgctggccgactggctcgccgacgcgcgtcggccgaagcgtacgcacgactcccatcgcgctgaagtggcgctgttctggcacggccttgcgtttcgcggcacgtcgttctgcacgcatatcgccgcctatttgctcgaccccacggaatcgcgccatacgctggcggacctgtcgcgccgctacggtctgccgccggtaccggaagccgaggacgtttacggcaagggcgcgaagttcaaggttcccgatcgcgacacgctggcgcgttacgtcggccgcaaggccgccctagtcgcgcggctcgttccgctgctcgaggcggatttggcggcctgcggcatgcgttcgcttttttacgacctggagctgccgctttcatccgaactcgccgtcatggagacggtcggcgtccgcgtcgacgcggcggcgctcgccgcctacggcgaggaattgcgcgaggcggcggcgaaagtcgagcgggagatttacgagctggccgggacgacgttcaacatcggatcgacgaaacagctcggcgaaattttgttcgataagctggggctgcccgtcgtcaagaaaacgaaaaccggctattccaccgacgcagacgtgctggaggaactggcgccgtaccatccgatcgtcgaaaagattttgcattaccgccaactgacgaaattgcagtcgacctacatcgaggggcttttgaaagaaatccgtccgcaaaccggtaaaatccatacgtattatcagcagacgatcgcggcgacggggcggctgagcagtcagtttcccaatcttcagaacattccgatccgtctcgaagaggggcggaaaatccgcaaggcgttcgttccgtcagaaccgggatggctgatgctcgccgccgactattcgcagatcgaactgcgcgtgctcgcgcacgtttccggcgacgaacggctgaaggaagcgtttcggacaggcatggacatccacacgaagaccgcgatggacgtgttcggcgtttccgaagaccgcgtcgacgcgcgcatgcggcggcaggcgaaggcggtcaatttcggcatcatctacggcatcagcgatttcggactggcgcaaaacctgaacatttcccgcaaggaggcggcggagttcatccggcaatatttcgccgtcttttcgggcgtcaaggcgtaccgcgagcggatcgtcgagcaggcgcgccgcgacggttacgtgacgaccctgctcggtcgcaggcgctatttgccggacatcaacgcgtcgaattacaacctcacttcgttcgcggagcggacggcgatgaatacgccgatccagggcacggccgccgacatcatcaagaccgcgatggtgcgtctgacgcggcggatgcgcgacgtcggactgaagagccgcatgctgctgcaggttcacgacgagctcgtgtttgaagtgccgccggacgagctcgacgcgatgcgggagcttgtgacggacgtcatggagtcggcggtcccgctcgacgtgccgctgaaggtcgacgtcagctggggcgccgactggtacgcggcgaagtgagggaagcgggatcc

SEQ ID NO: 1280 - DNA, 2792 bp, Artificial Sequence
  Description of Artificial Sequence: Synthetic Caldibacillus cellulovorans CompA.2 DNA Polymerase R833W
atgaaatacctgctgccgaccgctgctgctggtctgctgctcctcgctgcccagccggcgatggccatgggcaaactgattctggtcgacggaaacagcgtcgccaaccgggcgttttacgccgtccggctgctcagcacgcgcggcggcctgcacacaaacgcggtgtacggattcgccaacatgttgctcaagctgatcgaggaggaacggccgacgcattttctcgtcgcgttcgacgcgggcaaggcgacgttccgtcatcgcgaatacgaggcctacaaggcgggtcgcctgcagacgccgcccgagctgtccgagcagtttccgtacatccgggagctcgtccgggcgttcggcgtcgcgtccggcgagctggaggaatacgaggcggacgacatgatcggtacgctggcgaaacgggcggaggccgagggcgtcgacacgctggtcgtcaccggcgaccgcgatttgctccagctcgtatcggaccgcgtgaccgtcgcgctgacgcgcaagggcatcacggaaacggagcggtacgacccggcgcgcatccgcgaggaatacggcttcgatcccgaccgcatccgcgacctcaaagggctgatgggcgacgcgtctgacaatcttcccggcgttcccggcgtcggtgagaaaaccgcactgaaactgctcaggcagtacggttcgctggagagcgtcctggaacacgcgtcggaaatcgccggaaagctcggtgaaaatctgcgggcgcacgccgacgccgcccgattgagcaagcggctggcgacgatcgactgcgcggtaccgttgcagtcgggatgggactggctgcgcctcggcgaaccggaccgcgccgcgctcgcctcgctgttgcggcagctcgaattcaagtcgctgttgaaacggctcggactcgacggcacgtccgccgatgccgacgtcgacggcgtccgttcctccgcgcggccggcggacgagaaacggccgagggccgtcgccgtcgctgaggagggcgtcgacgtccgctgtccggatcgcccggaagaagtcgaagaagcgctgtcgcggctggaagccgcccagtcggtcgtcgtcgaggtgacgggcgacaacccgcacgacggcgaagtgcgcggcgtcgcatggtgggacggacatacggcgtatttcattccgtttgaacggctggtgcagtccgacatgcggccgctggccgactggctcgccgacgcgcgtcggccgaagcgtacgcacgactcccatcgcgctgaagtggcgctgttctggcacggccttgcgtttcgcggcacgtcgttctgcacgcatatcgccgcctatttgctcgaccccacggaatcgcgccatacgctggcggacctgtcgcgccgctacggtctgccgccggtaccggaagccgaggacgtttacggcaagggcgcgaagttcaaggttcccgatcgcgacacgctggcgcgttacgtcggccgcaaggccgccctagtcgcgcggctcgttccgctgctcgaggcggatttggcggcctgcggcatgcgttcgcttttttacgacctggagctgccgctttcatccgaactcgccgtcatggagacggtcggcgtccgcgtcgacgcggcggcgctcgccgcctacggcgaggaattgcgcgaggcggcggcgaaagtcgagcgggagatttacgagctggccgggacgacgttcaacatcggatcgacgaaacagctcggcgaaattttgttcgataagctggggctgcccgtcgtcaagaaaacgaaaaccggctattccaccgacgcagacgtgctggaggaactggcgccgtaccatccgatcgtcgaaaagattttgcattaccgccaactgacgaaattgcagtcgacctacatcgaggggcttttgaaagaaatccgtccgcaaaccggtaaaatccatacgtattatcagcagacgatcgcggcgacggggcggctgagcagtcagtttcccaatcttcagaacattccgatccgtctcgaagaggggcggaaaatccgcaaggcgttcgttccgtcagaaccgggatggctgatgctcgccgccgactattcgcagatcgaactgcgcgtgctcgcgcacgtttccggcgacgaacggctgaaggaagcgtttcggacaggcatggacatccacacgaagaccgcgatggacgtgttcggcgtttccgaagaccgcgtcgacgcgcgcatgcggcggcaggcgaaggcggtcaatttcggcatcatctacggcatcagcgatttcggactggcgcaaaacctgaacatttcccgcaaggaggcggcggagttcatccggcaatatttcgccgtcttttcgggcgtcaaggcgtaccgcgagcggatcgtcgagcaggcgcgccgcgacggttacgtgacgaccctgctcggtcgcaggcgctatttgccggacatcaacgcgtcgaattacaacctctggtcgttcgcggagcggacggcgatgaatacgccgatccagggcacggccgccgacatcatcaagaccgcgatggtgcgtctgacgcggcggatgcgcgacgtcggactgaagagccgcatgctgctgcaggttcacgacgagctcgtgtttgaagtgccgccggacgagctcgacgcgatgcgggagcttgtgacggacgtcatggagtcggcggtcccgctcgacgtgccgctgaaggtcgacgtcagctggggcgccgactggtacgcggcgaagtgagggaagcgggatcc

SEQ ID NO: 1281 - DNA, 2792 bp, Artificial Sequence
  Description of Artificial Sequence: Synthetic Caldibacillus cellulovorans CompA.2 DNA Polymerase R833Y
atgaaatacctgctgccgaccgctgctgctggtctgctgctcctcgctgcccagccggcgatggccatgggcaaactgattctggtcgacggaaacagcgtcgccaaccgggcgttttacgccgtccggctgctcagcacgcgcggcggcctgcacacaaacgcggtgtacggattcgccaacatgttgctcaagctgatcgaggaggaacggccgacgcattttctcgtcgcgttcgacgcgggcaaggcgacgttccgtcatcgcgaatacgaggcctacaaggcgggtcgcctgcagacgccgcccgagctgtccgagcagtttccgtacatccgggagctcgtccgggcgttcggcgtcgcgtccggcgagctggaggaatacgaggcggacgacatgatcggtacgctggcgaaacgggcggaggccgagggcgtcgacacgctggtcgtcaccggcgaccgcgatttgctccagctcgtatcggaccgcgtgaccgtcgcgctgacgcgcaagggcatcacggaaacggagcggtacgacccggcgcgcatccgcgaggaatacggcttcgatcccgaccgcatccgcgacctcaaagggctgatgggcgacgcgtctgacaatcttcccggcgttcccggcgtcggtgagaaaaccgcactgaaactgctcaggcagtacggttcgctggagagcgtcctggaacacgcgtcggaaatcgccggaaagctcggtgaaaatctgcgggcgcacgccgacgccgcccgattgagcaagcggctggcgacgatcgactgcgcggtaccgttgcagtcgggatgggactggctgcgcctcggcgaaccggaccgcgccgcgctcgcctcgctgttgcggcagctcgaattcaagtcgctgttgaaacggctcggactcgacggcacgtccgccgatgccgacgtcgacggcgtccgttcctccgcgcggccggcggacgagaaacggccgagggccgtcgccgtcgctgaggagggcgtcgacgtccgctgtccggatcgcccggaagaagtcgaagaagcgctgtcgcggctggaagccgcccagtcggtcgtcgtcgaggtgacgggcgacaacccgcacgacggcgaagtgcgcggcgtcgcatggtgggacggacatacggcgtatttcattccgtttgaacggctggtgcagtccgacatgcggccgctggccgactggctcgccgacgcgcgtcggccgaagcgtacgcacgactcccatcgcgctgaagtggcgctgttctggcacggccttgcgtttcgcggcacgtcgttctgcacgcatatcgccgcctatttgctcgaccccacggaatcgcgccatacgctggcggacctgtcgcgccgctacggtctgccgccggtaccggaagccgaggacgtttacggcaagggcgcgaagttcaaggttcccgatcgcgacacgctggcgcgttacgtcggccgcaaggccgccctagtcgcgcggctcgttccgctgctcgaggcggatttggcggcctgcggcatgcgttcgcttttttacgacctggagctgccgctttcatccgaactcgccgtcatggagacggtcggcgtccgcgtcgacgcggcggcgctcgccgcctacggcgaggaattgcgcgaggcggcggcgaaagtcgagcgggagatttacgagctggccgggacgacgttcaacatcggatcgacgaaacagctcggcgaaattttgttcgataagctggggctgcccgtcgtcaagaaaacgaaaaccggctattccaccgacgcagacgtgctggaggaactggcgccgtaccatccgatcgtcgaaaagattttgcattaccgccaactgacgaaattgcagtcgacctacatcgaggggcttttgaaagaaatccgtccgcaaaccggtaaaatccatacgtattatcagcagacgatcgcggcgacggggcggctgagcagtcagtttcccaatcttcagaacattccgatccgtctcgaagaggggcggaaaatccgcaaggcgttcgttccgtcagaaccgggatggctgatgctcgccgccgactattcgcagatcgaactgcgcgtgctcgcgcacgtttccggcgacgaacggctgaaggaagcgtttcggacaggcatggacatccacacgaagaccgcgatggacgtgttcggcgtttccgaagaccgcgtcgacgcgcgcatgcggcggcaggcgaaggcggtcaatttcggcatcatctacggcatcagcgatttcggactggcgcaaaacctgaacatttcccgcaaggaggcggcggagttcatccggcaatatttcgccgtcttttcgggcgtcaaggcgtaccgcgagcggatcgtcgagcaggcgcgccgcgacggttacgtgacgaccctgctcggtcgcaggcgctatttgccggacatcaacgcgtcgaattacaacctctattcgttcgcggagcggacggcgatgaatacgccgatccagggcacggccgccgacatcatcaagaccgcgatggtgcgtctgacgcggcggatgcgcgacgtcggactgaagagccgcatgctgctgcaggttcacgacgagctcgtgtttgaagtgccgccggacgagctcgacgcgatgcgggagcttgtgacggacgtcatggagtcggcggtcccgctcgacgtgccgctgaaggtcgacgtcagctggggcgccgactggtacgcggcgaagtgagggaagcgggatcc

SEQ ID NO: 1282 - DNA, 2792 bp, Artificial Sequence
  Description of Artificial Sequence: Synthetic Caldibacillus cellulovorans CompA.2 DNA Polymerase R833V
atgaaatacctgctgccgaccgctgctgctggtctgctgctcctcgctgcccagccggcgatggccatgggcaaactgattctggtcgacggaaacagcgtcgccaaccgggcgttttacgccgtccggctgctcagcacgcgcggcggcctgcacacaaacgcggtgtacggattcgccaacatgttgctcaagctgatcgaggaggaacggccgacgcattttctcgtcgcgttcgacgcgggcaaggcgacgttccgtcatcgcgaatacgaggcctacaaggcgggtcgcctgcagacgccgcccgagctgtccgagcagtttccgtacatccgggagctcgtccgggcgttcggcgtcgcgtccggcgagctggaggaatacgaggcggacgacatgatcggtacgctggcgaaacgggcggaggccgagggcgtcgacacgctggtcgtcaccggcgaccgcgatttgctccagctcgtatcggaccgcgtgaccgtcgcgctgacgcgcaagggcatcacggaaacggagcggtacgacccggcgcgcatccgcgaggaatacggcttcgatcccgaccgcatccgcgacctcaaagggctgatgggcgacgcgtctgacaatcttcccggcgttcccggcgtcggtgagaaaaccgcactgaaactgctcaggcagtacggttcgctggagagcgtcctggaacacgcgtcggaaatcgccggaaagctcggtgaaaatctgcgggcgcacgccgacgccgcccgattgagcaagcggctggcgacgatcgactgcgcggtaccgttgcagtcgggatgggactggctgcgcctcggcgaaccggaccgcgccgcgctcgcctcgctgttgcggcagctcgaattcaagtcgctgttgaaacggctcggactcgacggcacgtccgccgatgccgacgtcgacggcgtccgttcctccgcgcggccggcggacgagaaacggccgagggccgtcgccgtcgctgaggagggcgtcgacgtccgctgtccggatcgcccggaagaagtcgaagaagcgctgtcgcggctggaagccgcccagtcggtcgtcgtcgaggtgacgggcgacaacccgcacgacggcgaagtgcgcggcgtcgcatggtgggacggacatacggcgtatttcattccgtttgaacggctggtgcagtccgacatgcggccgctggccgactggctcgccgacgcgcgtcggccgaagcgtacgcacgactcccatcgcgctgaagtggcgctgttctggcacggccttgcgtttcgcggcacgtcgttctgcacgcatatcgccgcctatttgctcgaccccacggaatcgcgccatacgctggcggacctgtcgcgccgctacggtctgccgccggtaccggaagccgaggacgtttacggcaagggcgcgaagttcaaggttcccgatcgcgacacgctggcgcgttacgtcggccgcaaggccgccctagtcgcgcggctcgttccgctgctcgaggcggatttggcggcctgcggcatgcgttcgcttttttacgacctggagctgccgctttcatccgaactcgccgtcatggagacggtcggcgtccgcgtcgacgcggcggcgctcgccgcctacggcgaggaattgcgcgaggcggcggcgaaagtcgagcgggagatttacgagctggccgggacgacgttcaacatcggatcgacgaaacagctcggcgaaattttgttcgataagctggggctgcccgtcgtcaagaaaacgaaaaccggctattccaccgacgcagacgtgctggaggaactggcgccgtaccatccgatcgtcgaaaagattttgcattaccgccaactgacgaaattgcagtcgacctacatcgaggggcttttgaaagaaatccgtccgcaaaccggtaaaatccatacgtattatcagcagacgatcgcggcgacggggcggctgagcagtcagtttcccaatcttcagaacattccgatccgtctcgaagaggggcggaaaatccgcaaggcgttcgttccgtcagaaccgggatggctgatgctcgccgccgactattcgcagatcgaactgcgcgtgctcgcgcacgtttccggcgacgaacggctgaaggaagcgtttcggacaggcatggacatccacacgaagaccgcgatggacgtgttcggcgtttccgaagaccgcgtcgacgcgcgcatgcggcggcaggcgaaggcggtcaatttcggcatcatctacggcatcagcgatttcggactggcgcaaaacctgaacatttcccgcaaggaggcggcggagttcatccggcaatatttcgccgtcttttcgggcgtcaaggcgtaccgcgagcggatcgtcgagcaggcgcgccgcgacggttacgtgacgaccctgctcggtcgcaggcgctatttgccggacatcaacgcgtcgaattacaacctcgtttcgttcgcggagcggacggcgatgaatacgccgatccagggcacggccgccgacatcatcaagaccgcgatggtgcgtctgacgcggcggatgcgcgacgtcggactgaagagccgcatgctgctgcaggttcacgacgagctcgtgtttgaagtgccgccggacgagctcgacgcgatgcgggagcttgtgacggacgtcatggagtcggcggtcccgctcgacgtgccgctgaaggtcgacgtcagctggggcgccgactggtacgcggcgaagtgagggaagcgggatcc

SEQ ID NO: 1283 - DNA, 2792 bp, Artificial Sequence
  Description of Artificial Sequence: Synthetic Caldibacillus cellulovorans CompA.2 DNA Polymerase S834A
atgaaatacctgctgccgaccgctgctgctggtctgctgctcctcgctgcccagccggcgatggccatgggcaaactgattctggtcgacggaaacagcgtcgccaaccgggcgttttacgccgtccggctgctcagcacgcgcggcggcctgcacacaaacgcggtgtacggattcgccaacatgttgctcaagctgatcgaggaggaacggccgacgcattttctcgtcgcgttcgacgcgggcaaggcgacgttccgtcatcgcgaatacgaggcctacaaggcgggtcgcctgcagacgccgcccgagctgtccgagcagtttccgtacatccgggagctcgtccgggcgttcggcgtcgcgtccggcgagctggaggaatacgaggcggacgacatgatcggtacgctggcgaaacgggcggaggccgagggcgtcgacacgctggtcgtcaccggcgaccgcgatttgctccagctcgtatcggaccgcgtgaccgtcgcgctgacgcgcaagggcatcacggaaacggagcggtacgacccggcgcgcatccgcgaggaatacggcttcgatcccgaccgcatccgcgacctcaaagggctgatgggcgacgcgtctgacaatcttcccggcgttcccggcgtcggtgagaaaaccgcactgaaactgctcaggcagtacggttcgctggagagcgtcctggaacacgcgtcggaaatcgccggaaagctcggtgaaaatctgcgggcgcacgccgacgccgcccgattgagcaagcggctggcgacgatcgactgcgcggtaccgttgcagtcgggatgggactggctgcgcctcggcgaaccggaccgcgccgcgctcgcctcgctgttgcggcagctcgaattcaagtcgctgttgaaacggctcggactcgacggcacgtccgccgatgccgacgtcgacggcgtccgttcctccgcgcggccggcggacgagaaacggccgagggccgtcgccgtcgctgaggagggcgtcgacgtccgctgtccggatcgcccggaagaagtcgaagaagcgctgtcgcggctggaagccgcccagtcggtcgtcgtcgaggtgacgggcgacaacccgcacgacggcgaagtgcgcggcgtcgcatggtgggacggacatacggcgtatttcattccgtttgaacggctggtgcagtccgacatgcggccgctggccgactggctcgccgacgcgcgtcggccgaagcgtacgcacgactcccatcgcgctgaagtggcgctgttctggcacggccttgcgtttcgcggcacgtcgttctgcacgcatatcgccgcctatttgctcgaccccacggaatcgcgccatacgctggcggacctgtcgcgccgctacggtctgccgccggtaccggaagccgaggacgtttacggcaagggcgcgaagttcaaggttcccgatcgcgacacgctggcgcgttacgtcggccgcaaggccgccctagtcgcgcggctcgttccgctgctcgaggcggatttggcggcctgcggcatgcgttcgcttttttacgacctggagctgccgctttcatccgaactcgccgtcatggagacggtcggcgtccgcgtcgacgcggcggcgctcgccgcctacggcgaggaattgcgcgaggcggcggcgaaagtcgagcgggagatttacgagctggccgggacgacgttcaacatcggatcgacgaaacagctcggcgaaattttgttcgataagctggggctgcccgtcgtcaagaaaacgaaaaccggctattccaccgacgcagacgtgctggaggaactggcgccgtaccatccgatcgtcgaaaagattttgcattaccgccaactgacgaaattgcagtcgacctacatcgaggggcttttgaaagaaatccgtccgcaaaccggtaaaatccatacgtattatcagcagacgatcgcggcgacggggcggctgagcagtcagtttcccaatcttcagaacattccgatccgtctcgaagaggggcggaaaatccgcaaggcgttcgttccgtcagaaccgggatggctgatgctcgccgccgactattcgcagatcgaactgcgcgtgctcgcgcacgtttccggcgacgaacggctgaaggaagcgtttcggacaggcatggacatccacacgaagaccgcgatggacgtgttcggcgtttccgaagaccgcgtcgacgcgcgcatgcggcggcaggcgaaggcggtcaatttcggcatcatctacggcatcagcgatttcggactggcgcaaaacctgaacatttcccgcaaggaggcggcggagttcatccggcaatatttcgccgtcttttcgggcgtcaaggcgtaccgcgagcggatcgtcgagcaggcgcgccgcgacggttacgtgacgaccctgctcggtcgcaggcgctatttgccggacatcaacgcgtcgaattacaacctccgcgctttcgcggagcggacggcgatgaatacgccgatccagggcacggccgccgacatcatcaagaccgcgatggtgcgtctgacgcggcggatgcgcgacgtcggactgaagagccgcatgctgctgcaggttcacgacgagctcgtgtttgaagtgccgccggacgagctcgacgcgatgcgggagcttgtgacggacgtcatggagtcggcggtcccgctcgacgtgccgctgaaggtcgacgtcagctggggcgccgactggtacgcggcgaagtgagggaagcgggatcc

SEQ ID NO: 1284 - DNA, 2792 bp, Artificial Sequence
  Description of Artificial Sequence: Synthetic Caldibacillus cellulovorans CompA.2 DNA Polymerase S834R
atgaaatacctgctgccgaccgctgctgctggtctgctgctcctcgctgcccagccggcgatggccatgggcaaactgattctggtcgacggaaacagcgtcgccaaccgggcgttttacgccgtccggctgctcagcacgcgcggcggcctgcacacaaacgcggtgtacggattcgccaacatgttgctcaagctgatcgaggaggaacggccgacgcattttctcgtcgcgttcgacgcgggcaaggcgacgttccgtcatcgcgaatacgaggcctacaaggcgggtcgcctgcagacgccgcccgagctgtccgagcagtttccgtacatccgggagctcgtccgggcgttcggcgtcgcgtccggcgagctggaggaatacgaggcggacgacatgatcggtacgctggcgaaacgggcggaggccgagggcgtcgacacgctggtcgtcaccggcgaccgcgatttgctccagctcgtatcggaccgcgtgaccgtcgcgctgacgcgcaagggcatcacggaaacggagcggtacgacccggcgcgcatccgcgaggaatacggcttcgatcccgaccgcatccgcgacctcaaagggctgatgggcgacgcgtctgacaatcttcccggcgttcccggcgtcggtgagaaaaccgcactgaaactgctcaggcagtacggttcgctggagagcgtcctggaacacgcgtcggaaatcgccggaaagctcggtgaaaatctgcgggcgcacgccgacgccgcccgattgagcaagcggctggcgacgatcgactgcgcggtaccgttgcagtcgggatgggactggctgcgcctcggcgaaccggaccgcgccgcgctcgcctcgctgttgcggcagctcgaattcaagtcgctgttgaaacggctcggactcgacggcacgtccgccgatgccgacgtcgacggcgtccgttcctccgcgcggccggcggacgagaaacggccgagggccgtcgccgtcgctgaggagggcgtcgacgtccgctgtccggatcgcccggaagaagtcgaagaagcgctgtcgcggctggaagccgcccagtcggtcgtcgtcgaggtgacgggcgacaacccgcacgacggcgaagtgcgcggcgtcgcatggtgggacggacatacggcgtatttcattccgtttgaacggctggtgcagtccgacatgcggccgctggccgactggctcgccgacgcgcgtcggccgaagcgtacgcacgactcccatcgcgctgaagtggcgctgttctggcacggccttgcgtttcgcggcacgtcgttctgcacgcatatcgccgcctatttgctcgaccccacggaatcgcgccatacgctggcggacctgtcgcgccgctacggtctgccgccggtaccggaagccgaggacgtttacggcaagggcgcgaagttcaaggttcccgatcgcgacacgctggcgcgttacgtcggccgcaaggccgccctagtcgcgcggctcgttccgctgctcgaggcggatttggcggcctgcggcatgcgttcgcttttttacgacctggagctgccgctttcatccgaactcgccgtcatggagacggtcggcgtccgcgtcgacgcggcggcgctcgccgcctacggcgaggaattgcgcgaggcggcggcgaaagtcgagcgggagatttacgagctggccgggacgacgttcaacatcggatcgacgaaacagctcggcgaaattttgttcgataagctggggctgcccgtcgtcaagaaaacgaaaaccggctattccaccgacgcagacgtgctggaggaactggcgccgtaccatccgatcgtcgaaaagattttgcattaccgccaactgacgaaattgcagtcgacctacatcgaggggcttttgaaagaaatccgtccgcaaaccggtaaaatccatacgtattatcagcagacgatcgcggcgacggggcggctgagcagtcagtttcccaatcttcagaacattccgatccgtctcgaagaggggcggaaaatccgcaaggcgttcgttccgtcagaaccgggatggctgatgctcgccgccgactattcgcagatcgaactgcgcgtgctcgcgcacgtttccggcgacgaacggctgaaggaagcgtttcggacaggcatggacatccacacgaagaccgcgatggacgtgttcggcgtttccgaagaccgcgtcgacgcgcgcatgcggcggcaggcgaaggcggtcaatttcggcatcatctacggcatcagcgatttcggactggcgcaaaacctgaacatttcccgcaaggaggcggcggagttcatccggcaatatttcgccgtcttttcgggcgtcaaggcgtaccgcgagcggatcgtcgagcaggcgcgccgcgacggttacgtgacgaccctgctcggtcgcaggcgctatttgccggacatcaacgcgtcgaattacaacctccgccgtttcgcggagcggacggcgatgaatacgccgatccagggcacggccgccgacatcatcaagaccgcgatggtgcgtctgacgcggcggatgcgcgacgtcggactgaagagccgcatgctgctgcaggttcacgacgagctcgtgtttgaagtgccgccggacgagctcgacgcgatgcgggagcttgtgacggacgtcatggagtcggcggtcccgctcgacgtgccgctgaaggtcgacgtcagctggggcgccgactggtacgcggcgaagtgagggaagcgggatcc

SEQ ID NO: 1285 - DNA, 2792 bp, Artificial Sequence
  Description of Artificial Sequence: Synthetic Caldibacillus cellulovorans CompA.2 DNA Polymerase S834N
atgaaatacctgctgccgaccgctgctgctggtctgctgctcctcgctgcccagccggcgatggccatgggcaaactgattctggtcgacggaaacagcgtcgccaaccgggcgttttacgccgtccggctgctcagcacgcgcggcggcctgcacacaaacgcggtgtacggattcgccaacatgttgctcaagctgatcgaggaggaacggccgacgcattttctcgtcgcgttcgacgcgggcaaggcgacgttccgtcatcgcgaatacgaggcctacaaggcgggtcgcctgcagacgccgcccgagctgtccgagcagtttccgtacatccgggagctcgtccgggcgttcggcgtcgcgtccggcgagctggaggaatacgaggcggacgacatgatcggtacgctggcgaaacgggcggaggccgagggcgtcgacacgctggtcgtcaccggcgaccgcgatttgctccagctcgtatcggaccgcgtgaccgtcgcgctgacgcgcaagggcatcacggaaacggagcggtacgacccggcgcgcatccgcgaggaatacggcttcgatcccgaccgcatccgcgacctcaaagggctgatgggcgacgcgtctgacaatcttcccggcgttcccggcgtcggtgagaaaaccgcactgaaactgctcaggcagtacggttcgctggagagcgtcctggaacacgcgtcggaaatcgccggaaagctcggtgaaaatctgcgggcgcacgccgacgccgcccgattgagcaagcggctggcgacgatcgactgcgcggtaccgttgcagtcgggatgggactggctgcgcctcggcgaaccggaccgcgccgcgctcgcctcgctgttgcggcagctcgaattcaagtcgctgttgaaacggctcggactcgacggcacgtccgccgatgccgacgtcgacggcgtccgttcctccgcgcggccggcggacgagaaacggccgagggccgtcgccgtcgctgaggagggcgtcgacgtccgctgtccggatcgcccggaagaagtcgaagaagcgctgtcgcggctggaagccgcccagtcggtcgtcgtcgaggtgacgggcgacaacccgcacgacggcgaagtgcgcggcgtcgcatggtgggacggacatacggcgtatttcattccgtttgaacggctggtgcagtccgacatgcggccgctggccgactggctcgccgacgcgcgtcggccgaagcgtacgcacgactcccatcgcgctgaagtggcgctgttctggcacggccttgcgtttcgcggcacgtcgttctgcacgcatatcgccgcctatttgctcgaccccacggaatcgcgccatacgctggcggacctgtcgcgccgctacggtctgccgccggtaccggaagccgaggacgtttacggcaagggcgcgaagttcaaggttcccgatcgcgacacgctggcgcgttacgtcggccgcaaggccgccctagtcgcgcggctcgttccgctgctcgaggcggatttggcggcctgcggcatgcgttcgcttttttacgacctggagctgccgctttcatccgaactcgccgtcatggagacggtcggcgtccgcgtcgacgcggcggcgctcgccgcctacggcgaggaattgcgcgaggcggcggcgaaagtcgagcgggagatttacgagctggccgggacgacgttcaacatcggatcgacgaaacagctcggcgaaattttgttcgataagctggggctgcccgtcgtcaagaaaacgaaaaccggctattccaccgacgcagacgtgctggaggaactggcgccgtaccatccgatcgtcgaaaagattttgcattaccgccaactgacgaaattgcagtcgacctacatcgaggggcttttgaaagaaatccgtccgcaaaccggtaaaatccatacgtattatcagcagacgatcgcggcgacggggcggctgagcagtcagtttcccaatcttcagaacattccgatccgtctcgaagaggggcggaaaatccgcaaggcgttcgttccgtcagaaccgggatggctgatgctcgccgccgactattcgcagatcgaactgcgcgtgctcgcgcacgtttccggcgacgaacggctgaaggaagcgtttcggacaggcatggacatccacacgaagaccgcgatggacgtgttcggcgtttccgaagaccgcgtcgacgcgcgcatgcggcggcaggcgaaggcggtcaatttcggcatcatctacggcatcagcgatttcggactggcgcaaaacctgaacatttcccgcaaggaggcggcggagttcatccggcaatatttcgccgtcttttcgggcgtcaaggcgtaccgcgagcggatcgtcgagcaggcgcgccgcgacggttacgtgacgaccctgctcggtcgcaggcgctatttgccggacatcaacgcgtcgaattacaacctccgcaatttcgcggagcggacggcgatgaatacgccgatccagggcacggccgccgacatcatcaagaccgcgatggtgcgtctgacgcggcggatgcgcgacgtcggactgaagagccgcatgctgctgcaggttcacgacgagctcgtgtttgaagtgccgccggacgagctcgacgcgatgcgggagcttgtgacggacgtcatggagtcggcggtcccgctcgacgtgccgctgaaggtcgacgtcagctggggcgccgactggtacgcggcgaagtgagggaagcgggatcc

SEQ ID NO: 1286 - DNA, 2792 bp, Artificial Sequence
  Description of Artificial Sequence: Synthetic Caldibacillus cellulovorans CompA.2 DNA Polymerase S834D
atgaaatacctgctgccgaccgctgctgctggtctgctgctcctcgctgcccagccggcgatggccatgggcaaactgattctggtcgacggaaacagcgtcgccaaccgggcgttttacgccgtccggctgctcagcacgcgcggcggcctgcacacaaacgcggtgtacggattcgccaacatgttgctcaagctgatcgaggaggaacggccgacgcattttctcgtcgcgttcgacgcgggcaaggcgacgttccgtcatcgcgaatacgaggcctacaaggcgggtcgcctgcagacgccgcccgagctgtccgagcagtttccgtacatccgggagctcgtccgggcgttcggcgtcgcgtccggcgagctggaggaatacgaggcggacgacatgatcggtacgctggcgaaacgggcggaggccgagggcgtcgacacgctggtcgtcaccggcgaccgcgatttgctccagctcgtatcggaccgcgtgaccgtcgcgctgacgcgcaagggcatcacggaaacggagcggtacgacccggcgcgcatccgcgaggaatacggcttcgatcccgaccgcatccgcgacctcaaagggctgatgggcgacgcgtctgacaatcttcccggcgttcccggcgtcggtgagaaaaccgcactgaaactgctcaggcagtacggttcgctggagagcgtcctggaacacgcgtcggaaatcgccggaaagctcggtgaaaatctgcgggcgcacgccgacgccgcccgattgagcaagcggctggcgacgatcgactgcgcggtaccgttgcagtcgggatgggactggctgcgcctcggcgaaccggaccgcgccgcgctcgcctcgctgttgcggcagctcgaattcaagtcgctgttgaaacggctcggactcgacggcacgtccgccgatgccgacgtcgacggcgtccgttcctccgcgcggccggcggacgagaaacggccgagggccgtcgccgtcgctgaggagggcgtcgacgtccgctgtccggatcgcccggaagaagtcgaagaagcgctgtcgcggctggaagccgcccagtcggtcgtcgtcgaggtgacgggcgacaacccgcacgacggcgaagtgcgcggcgtcgcatggtgggacggacatacggcgtatttcattccgtttgaacggctggtgcagtccgacatgcggccgctggccgactggctcgccgacgcgcgtcggccgaagcgtacgcacgactcccatcgcgctgaagtggcgctgttctggcacggccttgcgtttcgcggcacgtcgttctgcacgcatatcgccgcctatttgctcgaccccacggaatcgcgccatacgctggcggacctgtcgcgccgctacggtctgccgccggtaccggaagccgaggacgtttacggcaagggcgcgaagttcaaggttcccgatcgcgacacgctggcgcgttacgtcggccgcaaggccgccctagtcgcgcggctcgttccgctgctcgaggcggatttggcggcctgcggcatgcgttcgcttttttacgacctggagctgccgctttcatccgaactcgccgtcatggagacggtcggcgtccgcgtcgacgcggcggcgctcgccgcctacggcgaggaattgcgcgaggcggcggcgaaagtcgagcgggagatttacgagctggccgggacgacgttcaacatcggatcgacgaaacagctcggcgaaattttgttcgataagctggggctgcccgtcgtcaagaaaacgaaaaccggctattccaccgacgcagacgtgctggaggaactggcgccgtaccatccgatcgtcgaaaagattttgcattaccgccaactgacgaaattgcagtcgacctacatcgaggggcttttgaaagaaatccgtccgcaaaccggtaaaatccatacgtattatcagcagacgatcgcggcgacggggcggctgagcagtcagtttcccaatcttcagaacattccgatccgtctcgaagaggggcggaaaatccgcaaggcgttcgttccgtcagaaccgggatggctgatgctcgccgccgactattcgcagatcgaactgcgcgtgctcgcgcacgtttccggcgacgaacggctgaaggaagcgtttcggacaggcatggacatccacacgaagaccgcgatggacgtgttcggcgtttccgaagaccgcgtcgacgcgcgcatgcggcggcaggcgaaggcggtcaatttcggcatcatctacggcatcagcgatttcggactggcgcaaaacctgaacatttcccgcaaggaggcggcggagttcatccggcaatatttcgccgtcttttcgggcgtcaaggcgtaccgcgagcggatcgtcgagcaggcgcgccgcgacggttacgtgacgaccctgctcggtcgcaggcgctatttgccggacatcaacgcgtcgaattacaacctccgcgatttcgcggagcggacggcgatgaatacgccgatccagggcacggccgccgacatcatcaagaccgcgatggtgcgtctgacgcggcggatgcgcgacgtcggactgaagagccgcatgctgctgcaggttcacgacgagctcgtgtttgaagtgccgccggacgagctcgacgcgatgcgggagcttgtgacggacgtcatggagtcggcggtcccgctcgacgtgccgctgaaggtcgacgtcagctggggcgccgactggtacgcggcgaagtgagggaagcgggatcc

SEQ ID NO: 1287 - DNA, 2792 bp, Artificial Sequence
  Description of Artificial Sequence: Synthetic Caldibacillus cellulovorans CompA.2 DNA Polymerase S834C
atgaaatacctgctgccgaccgctgctgctggtctgctgctcctcgctgcccagccggcgatggccatgggcaaactgattctggtcgacggaaacagcgtcgccaaccgggcgttttacgccgtccggctgctcagcacgcgcggcggcctgcacacaaacgcggtgtacggattcgccaacatgttgctcaagctgatcgaggaggaacggccgacgcattttctcgtcgcgttcgacgcgggcaaggcgacgttccgtcatcgcgaatacgaggcctacaaggcgggtcgcctgcagacgccgcccgagctgtccgagcagtttccgtacatccgggagctcgtccgggcgttcggcgtcgcgtccggcgagctggaggaatacgaggcggacgacatgatcggtacgctggcgaaacgggcggaggccgagggcgtcgacacgctggtcgtcaccggcgaccgcgatttgctccagctcgtatcggaccgcgtgaccgtcgcgctgacgcgcaagggcatcacggaaacggagcggtacgacccggcgcgcatccgcgaggaatacggcttcgatcccgaccgcatccgcgacctcaaagggctgatgggcgacgcgtctgacaatcttcccggcgttcccggcgtcggtgagaaaaccgcactgaaactgctcaggcagtacggttcgctggagagcgtcctggaacacgcgtcggaaatcgccggaaagctcggtgaaaatctgcgggcgcacgccgacgccgcccgattgagcaagcggctggcgacgatcgactgcgcggtaccgttgcagtcgggatgggactggctgcgcctcggcgaaccggaccgcgccgcgctcgcctcgctgttgcggcagctcgaattcaagtcgctgttgaaacggctcggactcgacggcacgtccgccgatgccgacgtcgacggcgtccgttcctccgcgcggccggcggacgagaaacggccgagggccgtcgccgtcgctgaggagggcgtcgacgtccgctgtccggatcgcccggaagaagtcgaagaagcgctgtcgcggctggaagccgcccagtcggtcgtcgtcgaggtgacgggcgacaacccgcacgacggcgaagtgcgcggcgtcgcatggtgggacggacatacggcgtatttcattccgtttgaacggctggtgcagtccgacatgcggccgctggccgactggctcgccgacgcgcgtcggccgaagcgtacgcacgactcccatcgcgctgaagtggcgctgttctggcacggccttgcgtttcgcggcacgtcgttctgcacgcatatcgccgcctatttgctcgaccccacggaatcgcgccatacgctggcggacctgtcgcgccgctacggtctgccgccggtaccggaagccgaggacgtttacggcaagggcgcgaagttcaaggttcccgatcgcgacacgctggcgcgttacgtcggccgcaaggccgccctagtcgcgcggctcgttccgctgctcgaggcggatttggcggcctgcggcatgcgttcgcttttttacgacctggagctgccgctttcatccgaactcgccgtcatggagacggtcggcgtccgcgtcgacgcggcggcgctcgccgcctacggcgaggaattgcgcgaggcggcggcgaaagtcgagcgggagatttacgagctggccgggacgacgttcaacatcggatcgacgaaacagctcggcgaaattttgttcgataagctggggctgcccgtcgtcaagaaaacgaaaaccggctattccaccgacgcagacgtgctggaggaactggcgccgtaccatccgatcgtcgaaaagattttgcattaccgccaactgacgaaattgcagtcgacctacatcgaggggcttttgaaagaaatccgtccgcaaaccggtaaaatccatacgtattatcagcagacgatcgcggcgacggggcggctgagcagtcagtttcccaatcttcagaacattccgatccgtctcgaagaggggcggaaaatccgcaaggcgttcgttccgtcagaaccgggatggctgatgctcgccgccgactattcgcagatcgaactgcgcgtgctcgcgcacgtttccggcgacgaacggctgaaggaagcgtttcggacaggcatggacatccacacgaagaccgcgatggacgtgttcggcgtttccgaagaccgcgtcgacgcgcgcatgcggcggcaggcgaaggcggtcaatttcggcatcatctacggcatcagcgatttcggactggcgcaaaacctgaacatttcccgcaaggaggcggcggagttcatccggcaatatttcgccgtcttttcgggcgtcaaggcgtaccgcgagcggatcgtcgagcaggcgcgccgcgacggttacgtgacgaccctgctcggtcgcaggcgctatttgccggacatcaacgcgtcgaattacaacctccgctgtttcgcggagcggacggcgatgaatacgccgatccagggcacggccgccgacatcatcaagaccgcgatggtgcgtctgacgcggcggatgcgcgacgtcggactgaagagccgcatgctgctgcaggttcacgacgagctcgtgtttgaagtgccgccggacgagctcgacgcgatgcgggagcttgtgacggacgtcatggagtcggcggtcccgctcgacgtgccgctgaaggtcgacgtcagctggggcgccgactggtacgcggcgaagtgagggaagcgggatcc

SEQ ID NO: 1288 - DNA, 2792 bp, Artificial Sequence
  Description of Artificial Sequence: Synthetic Caldibacillus cellulovorans CompA.2 DNA Polymerase S834E
atgaaatacctgctgccgaccgctgctgctggtctgctgctcctcgctgcccagccggcgatggccatgggcaaactgattctggtcgacggaaacagcgtcgccaaccgggcgttttacgccgtccggctgctcagcacgcgcggcggcctgcacacaaacgcggtgtacggattcgccaacatgttgctcaagctgatcgaggaggaacggccgacgcattttctcgtcgcgttcgacgcgggcaaggcgacgttccgtcatcgcgaatacgaggcctacaaggcgggtcgcctgcagacgccgcccgagctgtccgagcagtttccgtacatccgggagctcgtccgggcgttcggcgtcgcgtccggcgagctggaggaatacgaggcggacgacatgatcggtacgctggcgaaacgggcggaggccgagggcgtcgacacgctggtcgtcaccggcgaccgcgatttgctccagctcgtatcggaccgcgtgaccgtcgcgctgacgcgcaagggcatcacggaaacggagcggtacgacccggcgcgcatccgcgaggaatacggcttcgatcccgaccgcatccgcgacctcaaagggctgatgggcgacgcgtctgacaatcttcccggcgttcccggcgtcggtgagaaaaccgcactgaaactgctcaggcagtacggttcgctggagagcgtcctggaacacgcgtcggaaatcgccggaaagctcggtgaaaatctgcgggcgcacgccgacgccgcccgattgagcaagcggctggcgacgatcgactgcgcggtaccgttgcagtcgggatgggactggctgcgcctcggcgaaccggaccgcgccgcgctcgcctcgctgttgcggcagctcgaattcaagtcgctgttgaaacggctcggactcgacggcacgtccgccgatgccgacgtcgacggcgtccgttcctccgcgcggccggcggacgagaaacggccgagggccgtcgccgtcgctgaggagggcgtcgacgtccgctgtccggatcgcccggaagaagtcgaagaagcgctgtcgcggctggaagccgcccagtcggtcgtcgtcgaggtgacgggcgacaacccgcacgacggcgaagtgcgcggcgtcgcatggtgggacggacatacggcgtatttcattccgtttgaacggctggtgcagtccgacatgcggccgctggccgactggctcgccgacgcgcgtcggccgaagcgtacgcacgactcccatcgcgctgaagtggcgctgttctggcacggccttgcgtttcgcggcacgtcgttctgcacgcatatcgccgcctatttgctcgaccccacggaatcgcgccatacgctggcggacctgtcgcgccgctacggtctgccgccggtaccggaagccgaggacgtttacggcaagggcgcgaagttcaaggttcccgatcgcgacacgctggcgcgttacgtcggccgcaaggccgccctagtcgcgcggctcgttccgctgctcgaggcggatttggcggcctgcggcatgcgttcgcttttttacgacctggagctgccgctttcatccgaactcgccgtcatggagacggtcggcgtccgcgtcgacgcggcggcgctcgccgcctacggcgaggaattgcgcgaggcggcggcgaaagtcgagcgggagatttacgagctggccgggacgacgttcaacatcggatcgacgaaacagctcggcgaaattttgttcgataagctggggctgcccgtcgtcaagaaaacgaaaaccggctattccaccgacgcagacgtgctggaggaactggcgccgtaccatccgatcgtcgaaaagattttgcattaccgccaactgacgaaattgcagtcgacctacatcgaggggcttttgaaagaaatccgtccgcaaaccggtaaaatccatacgtattatcagcagacgatcgcggcgacggggcggctgagcagtcagtttcccaatcttcagaacattccgatccgtctcgaagaggggcggaaaatccgcaaggcgttcgttccgtcagaaccgggatggctgatgctcgccgccgactattcgcagatcgaactgcgcgtgctcgcgcacgtttccggcgacgaacggctgaaggaagcgtttcggacaggcatggacatccacacgaagaccgcgatggacgtgttcggcgtttccgaagaccgcgtcgacgcgcgcatgcggcggcaggcgaaggcggtcaatttcggcatcatctacggcatcagcgatttcggactggcgcaaaacctgaacatttcccgcaaggaggcggcggagttcatccggcaatatttcgccgtcttttcgggcgtcaaggcgtaccgcgagcggatcgtcgagcaggcgcgccgcgacggttacgtgacgaccctgctcggtcgcaggcgctatttgccggacatcaacgcgtcgaattacaacctccgcgaattcgcggagcggacggcgatgaatacgccgatccagggcacggccgccgacatcatcaagaccgcgatggtgcgtctgacgcggcggatgcgcgacgtcggactgaagagccgcatgctgctgcaggttcacgacgagctcgtgtttgaagtgccgccggacgagctcgacgcgatgcgggagcttgtgacggacgtcatggagtcggcggtcccgctcgacgtgccgctgaaggtcgacgtcagctggggcgccgactggtacgcggcgaagtgagggaagcgggatcc

SEQ ID NO: 1289 - DNA, 2792 bp, Artificial Sequence
  Description of Artificial Sequence: Synthetic Caldibacillus cellulovorans CompA.2 DNA Polymerase S834Q
atgaaatacctgctgccgaccgctgctgctggtctgctgctcctcgctgcccagccggcgatggccatgggcaaactgattctggtcgacggaaacagcgtcgccaaccgggcgttttacgccgtccggctgctcagcacgcgcggcggcctgcacacaaacgcggtgtacggattcgccaacatgttgctcaagctgatcgaggaggaacggccgacgcattttctcgtcgcgttcgacgcgggcaaggcgacgttccgtcatcgcgaatacgaggcctacaaggcgggtcgcctgcagacgccgcccgagctgtccgagcagtttccgtacatccgggagctcgtccgggcgttcggcgtcgcgtccggcgagctggaggaatacgaggcggacgacatgatcggtacgctggcgaaacgggcggaggccgagggcgtcgacacgctggtcgtcaccggcgaccgcgatttgctccagctcgtatcggaccgcgtgaccgtcgcgctgacgcgcaagggcatcacggaaacggagcggtacgacccggcgcgcatccgcgaggaatacggcttcgatcccgaccgcatccgcgacctcaaagggctgatgggcgacgcgtctgacaatcttcccggcgttcccggcgtcggtgagaaaaccgcactgaaactgctcaggcagtacggttcgctggagagcgtcctggaacacgcgtcggaaatcgccggaaagctcggtgaaaatctgcgggcgcacgccgacgccgcccgattgagcaagcggctggcgacgatcgactgcgcggtaccgttgcagtcgggatgggactggctgcgcctcggcgaaccggaccgcgccgcgctcgcctcgctgttgcggcagctcgaattcaagtcgctgttgaaacggctcggactcgacggcacgtccgccgatgccgacgtcgacggcgtccgttcctccgcgcggccggcggacgagaaacggccgagggccgtcgccgtcgctgaggagggcgtcgacgtccgctgtccggatcgcccggaagaagtcgaagaagcgctgtcgcggctggaagccgcccagtcggtcgtcgtcgaggtgacgggcgacaacccgcacgacggcgaagtgcgcggcgtcgcatggtgggacggacatacggcgtatttcattccgtttgaacggctggtgcagtccgacatgcggccgctggccgactggctcgccgacgcgcgtcggccgaagcgtacgcacgactcccatcgcgctgaagtggcgctgttctggcacggccttgcgtttcgcggcacgtcgttctgcacgcatatcgccgcctatttgctcgaccccacggaatcgcgccatacgctggcggacctgtcgcgccgctacggtctgccgccggtaccggaagccgaggacgtttacggcaagggcgcgaagttcaaggttcccgatcgcgacacgctggcgcgttacgtcggccgcaaggccgccctagtcgcgcggctcgttccgctgctcgaggcggatttggcggcctgcggcatgcgttcgcttttttacgacctggagctgccgctttcatccgaactcgccgtcatggagacggtcggcgtccgcgtcgacgcggcggcgctcgccgcctacggcgaggaattgcgcgaggcggcggcgaaagtcgagcgggagatttacgagctggccgggacgacgttcaacatcggatcgacgaaacagctcggcgaaattttgttcgataagctggggctgcccgtcgtcaagaaaacgaaaaccggctattccaccgacgcagacgtgctggaggaactggcgccgtaccatccgatcgtcgaaaagattttgcattaccgccaactgacgaaattgcagtcgacctacatcgaggggcttttgaaagaaatccgtccgcaaaccggtaaaatccatacgtattatcagcagacgatcgcggcgacggggcggctgagcagtcagtttcccaatcttcagaacattccgatccgtctcgaagaggggcggaaaatccgcaaggcgttcgttccgtcagaaccgggatggctgatgctcgccgccgactattcgcagatcgaactgcgcgtgctcgcgcacgtttccggcgacgaacggctgaaggaagcgtttcggacaggcatggacatccacacgaagaccgcgatggacgtgttcggcgtttccgaagaccgcgtcgacgcgcgcatgcggcggcaggcgaaggcggtcaatttcggcatcatctacggcatcagcgatttcggactggcgcaaaacctgaacatttcccgcaaggaggcggcggagttcatccggcaatatttcgccgtcttttcgggcgtcaaggcgtaccgcgagcggatcgtcgagcaggcgcgccgcgacggttacgtgacgaccctgctcggtcgcaggcgctatttgccggacatcaacgcgtcgaattacaacctccgccaattcgcggagcggacggcgatgaatacgccgatccagggcacggccgccgacatcatcaagaccgcgatggtgcgtctgacgcggcggatgcgcgacgtcggactgaagagccgcatgctgctgcaggttcacgacgagctcgtgtttgaagtgccgccggacgagctcgacgcgatgcgggagcttgtgacggacgtcatggagtcggcggtcccgctcgacgtgccgctgaaggtcgacgtcagctggggcgccgactggtacgcggcgaagtgagggaagcgggatcc

SEQ ID NO: 1290 - DNA, 2792 bp, Artificial Sequence
  Description of Artificial Sequence: Synthetic Caldibacillus cellulovorans CompA.2 DNA Polymerase S834G
atgaaatacctgctgccgaccgctgctgctggtctgctgctcctcgctgcccagccggcgatggccatgggcaaactgattctggtcgacggaaacagcgtcgccaaccgggcgttttacgccgtccggctgctcagcacgcgcggcggcctgcacacaaacgcggtgtacggattcgccaacatgttgctcaagctgatcgaggaggaacggccgacgcattttctcgtcgcgttcgacgcgggcaaggcgacgttccgtcatcgcgaatacgaggcctacaaggcgggtcgcctgcagacgccgcccgagctgtccgagcagtttccgtacatccgggagctcgtccgggcgttcggcgtcgcgtccggcgagctggaggaatacgaggcggacgacatgatcggtacgctggcgaaacgggcggaggccgagggcgtcgacacgctggtcgtcaccggcgaccgcgatttgctccagctcgtatcggaccgcgtgaccgtcgcgctgacgcgcaagggcatcacggaaacggagcggtacgacccggcgcgcatccgcgaggaatacggcttcgatcccgaccgcatccgcgacctcaaagggctgatgggcgacgcgtctgacaatcttcccggcgttcccggcgtcggtgagaaaaccgcactgaaactgctcaggcagtacggttcgctggagagcgtcctggaacacgcgtcggaaatcgccggaaagctcggtgaaaatctgcgggcgcacgccgacgccgcccgattgagcaagcggctggcgacgatcgactgcgcggtaccgttgcagtcgggatgggactggctgcgcctcggcgaaccggaccgcgccgcgctcgcctcgctgttgcggcagctcgaattcaagtcgctgttgaaacggctcggactcgacggcacgtccgccgatgccgacgtcgacggcgtccgttcctccgcgcggccggcggacgagaaacggccgagggccgtcgccgtcgctgaggagggcgtcgacgtccgctgtccggatcgcccggaagaagtcgaagaagcgctgtcgcggctggaagccgcccagtcggtcgtcgtcgaggtgacgggcgacaacccgcacgacggcgaagtgcgcggcgtcgcatggtgggacggacatacggcgtatttcattccgtttgaacggctggtgcagtccgacatgcggccgctggccgactggctcgccgacgcgcgtcggccgaagcgtacgcacgactcccatcgcgctgaagtggcgctgttctggcacggccttgcgtttcgcggcacgtcgttctgcacgcatatcgccgcctatttgctcgaccccacggaatcgcgccatacgctggcggacctgtcgcgccgctacggtctgccgccggtaccggaagccgaggacgtttacggcaagggcgcgaagttcaaggttcccgatcgcgacacgctggcgcgttacgtcggccgcaaggccgccctagtcgcgcggctcgttccgctgctcgaggcggatttggcggcctgcggcatgcgttcgcttttttacgacctggagctgccgctttcatccgaactcgccgtcatggagacggtcggcgtccgcgtcgacgcggcggcgctcgccgcctacggcgaggaattgcgcgaggcggcggcgaaagtcgagcgggagatttacgagctggccgggacgacgttcaacatcggatcgacgaaacagctcggcgaaattttgttcgataagctggggctgcccgtcgtcaagaaaacgaaaaccggctattccaccgacgcagacgtgctggaggaactggcgccgtaccatccgatcgtcgaaaagattttgcattaccgccaactgacgaaattgcagtcgacctacatcgaggggcttttgaaagaaatccgtccgcaaaccggtaaaatccatacgtattatcagcagacgatcgcggcgacggggcggctgagcagtcagtttcccaatcttcagaacattccgatccgtctcgaagaggggcggaaaatccgcaaggcgttcgttccgtcagaaccgggatggctgatgctcgccgccgactattcgcagatcgaactgcgcgtgctcgcgcacgtttccggcgacgaacggctgaaggaagcgtttcggacaggcatggacatccacacgaagaccgcgatggacgtgttcggcgtttccgaagaccgcgtcgacgcgcgcatgcggcggcaggcgaaggcggtcaatttcggcatcatctacggcatcagcgatttcggactggcgcaaaacctgaacatttcccgcaaggaggcggcggagttcatccggcaatatttcgccgtcttttcgggcgtcaaggcgtaccgcgagcggatcgtcgagcaggcgcgccgcgacggttacgtgacgaccctgctcggtcgcaggcgctatttgccggacatcaacgcgtcgaattacaacctccgcggtttcgcggagcggacggcgatgaatacgccgatccagggcacggccgccgacatcatcaagaccgcgatggtgcgtctgacgcggcggatgcgcgacgtcggactgaagagccgcatgctgctgcaggttcacgacgagctcgtgtttgaagtgccgccggacgagctcgacgcgatgcgggagcttgtgacggacgtcatggagtcggcggtcccgctcgacgtgccgctgaaggtcgacgtcagctggggcgccgactggtacgcggcgaagtgagggaagcgggatcc

SEQ ID NO: 1291 - DNA, 2792 bp, Artificial Sequence
  Description of Artificial Sequence: Synthetic Caldibacillus cellulovorans CompA.2 DNA Polymerase S834H
atgaaatacctgctgccgaccgctgctgctggtctgctgctcctcgctgcccagccggcgatggccatgggcaaactgattctggtcgacggaaacagcgtcgccaaccgggcgttttacgccgtccggctgctcagcacgcgcggcggcctgcacacaaacgcggtgtacggattcgccaacatgttgctcaagctgatcgaggaggaacggccgacgcattttctcgtcgcgttcgacgcgggcaaggcgacgttccgtcatcgcgaatacgaggcctacaaggcgggtcgcctgcagacgccgcccgagctgtccgagcagtttccgtacatccgggagctcgtccgggcgttcggcgtcgcgtccggcgagctggaggaatacgaggcggacgacatgatcggtacgctggcgaaacgggcggaggccgagggcgtcgacacgctggtcgtcaccggcgaccgcgatttgctccagctcgtatcggaccgcgtgaccgtcgcgctgacgcgcaagggcatcacggaaacggagcggtacgacccggcgcgcatccgcgaggaatacggcttcgatcccgaccgcatccgcgacctcaaagggctgatgggcgacgcgtctgacaatcttcccggcgttcccggcgtcggtgagaaaaccgcactgaaactgctcaggcagtacggttcgctggagagcgtcctggaacacgcgtcggaaatcgccggaaagctcggtgaaaatctgcgggcgcacgccgacgccgcccgattgagcaagcggctggcgacgatcgactgcgcggtaccgttgcagtcgggatgggactggctgcgcctcggcgaaccggaccgcgccgcgctcgcctcgctgttgcggcagctcgaattcaagtcgctgttgaaacggctcggactcgacggcacgtccgccgatgccgacgtcgacggcgtccgttcctccgcgcggccggcggacgagaaacggccgagggccgtcgccgtcgctgaggagggcgtcgacgtccgctgtccggatcgcccggaagaagtcgaagaagcgctgtcgcggctggaagccgcccagtcggtcgtcgtcgaggtgacgggcgacaacccgcacgacggcgaagtgcgcggcgtcgcatggtgggacggacatacggcgtatttcattccgtttgaacggctggtgcagtccgacatgcggccgctggccgactggctcgccgacgcgcgtcggccgaagcgtacgcacgactcccatcgcgctgaagtggcgctgttctggcacggccttgcgtttcgcggcacgtcgttctgcacgcatatcgccgcctatttgctcgaccccacggaatcgcgccatacgctggcggacctgtcgcgccgctacggtctgccgccggtaccggaagccgaggacgtttacggcaagggcgcgaagttcaaggttcccgatcgcgacacgctggcgcgttacgtcggccgcaaggccgccctagtcgcgcggctcgttccgctgctcgaggcggatttggcggcctgcggcatgcgttcgcttttttacgacctggagctgccgctttcatccgaactcgccgtcatggagacggtcggcgtccgcgtcgacgcggcggcgctcgccgcctacggcgaggaattgcgcgaggcggcggcgaaagtcgagcgggagatttacgagctggccgggacgacgttcaacatcggatcgacgaaacagctcggcgaaattttgttcgataagctggggctgcccgtcgtcaagaaaacgaaaaccggctattccaccgacgcagacgtgctggaggaactggcgccgtaccatccgatcgtcgaaaagattttgcattaccgccaactgacgaaattgcagtcgacctacatcgaggggcttttgaaagaaatccgtccgcaaaccggtaaaatccatacgtattatcagcagacgatcgcggcgacggggcggctgagcagtcagtttcccaatcttcagaacattccgatccgtctcgaagaggggcggaaaatccgcaaggcgttcgttccgtcagaaccgggatggctgatgctcgccgccgactattcgcagatcgaactgcgcgtgctcgcgcacgtttccggcgacgaacggctgaaggaagcgtttcggacaggcatggacatccacacgaagaccgcgatggacgtgttcggcgtttccgaagaccgcgtcgacgcgcgcatgcggcggcaggcgaaggcggtcaatttcggcatcatctacggcatcagcgatttcggactggcgcaaaacctgaacatttcccgcaaggaggcggcggagttcatccggcaatatttcgccgtcttttcgggcgtcaaggcgtaccgcgagcggatcgtcgagcaggcgcgccgcgacggttacgtgacgaccctgctcggtcgcaggcgctatttgccggacatcaacgcgtcgaattacaacctccgccatttcgcggagcggacggcgatgaatacgccgatccagggcacggccgccgacatcatcaagaccgcgatggtgcgtctgacgcggcggatgcgcgacgtcggactgaagagccgcatgctgctgcaggttcacgacgagctcgtgtttgaagtgccgccggacgagctcgacgcgatgcgggagcttgtgacggacgtcatggagtcggcggtcccgctcgacgtgccgctgaaggtcgacgtcagctggggcgccgactggtacgcggcgaagtgagggaagcgggatcc

SEQ ID NO: 1292 - DNA, 2792 bp, Artificial Sequence
  Description of Artificial Sequence: Synthetic Caldibacillus cellulovorans CompA.2 DNA Polymerase S834I
atgaaatacctgctgccgaccgctgctgctggtctgctgctcctcgctgcccagccggcgatggccatgggcaaactgattctggtcgacggaaacagcgtcgccaaccgggcgttttacgccgtccggctgctcagcacgcgcggcggcctgcacacaaacgcggtgtacggattcgccaacatgttgctcaagctgatcgaggaggaacggccgacgcattttctcgtcgcgttcgacgcgggcaaggcgacgttccgtcatcgcgaatacgaggcctacaaggcgggtcgcctgcagacgccgcccgagctgtccgagcagtttccgtacatccgggagctcgtccgggcgttcggcgtcgcgtccggcgagctggaggaatacgaggcggacgacatgatcggtacgctggcgaaacgggcggaggccgagggcgtcgacacgctggtcgtcaccggcgaccgcgatttgctccagctcgtatcggaccgcgtgaccgtcgcgctgacgcgcaagggcatcacggaaacggagcggtacgacccggcgcgcatccgcgaggaatacggcttcgatcccgaccgcatccgcgacctcaaagggctgatgggcgacgcgtctgacaatcttcccggcgttcccggcgtcggtgagaaaaccgcactgaaactgctcaggcagtacggttcgctggagagcgtcctggaacacgcgtcggaaatcgccggaaagctcggtgaaaatctgcgggcgcacgccgacgccgcccgattgagcaagcggctggcgacgatcgactgcgcggtaccgttgcagtcgggatgggactggctgcgcctcggcgaaccggaccgcgccgcgctcgcctcgctgttgcggcagctcgaattcaagtcgctgttgaaacggctcggactcgacggcacgtccgccgatgccgacgtcgacggcgtccgttcctccgcgcggccggcggacgagaaacggccgagggccgtcgccgtcgctgaggagggcgtcgacgtccgctgtccggatcgcccggaagaagtcgaagaagcgctgtcgcggctggaagccgcccagtcggtcgtcgtcgaggtgacgggcgacaacccgcacgacggcgaagtgcgcggcgtcgcatggtgggacggacatacggcgtatttcattccgtttgaacggctggtgcagtccgacatgcggccgctggccgactggctcgccgacgcgcgtcggccgaagcgtacgcacgactcccatcgcgctgaagtggcgctgttctggcacggccttgcgtttcgcggcacgtcgttctgcacgcatatcgccgcctatttgctcgaccccacggaatcgcgccatacgctggcggacctgtcgcgccgctacggtctgccgccggtaccggaagccgaggacgtttacggcaagggcgcgaagttcaaggttcccgatcgcgacacgctggcgcgttacgtcggccgcaaggccgccctagtcgcgcggctcgttccgctgctcgaggcggatttggcggcctgcggcatgcgttcgcttttttacgacctggagctgccgctttcatccgaactcgccgtcatggagacggtcggcgtccgcgtcgacgcggcggcgctcgccgcctacggcgaggaattgcgcgaggcggcggcgaaagtcgagcgggagatttacgagctggccgggacgacgttcaacatcggatcgacgaaacagctcggcgaaattttgttcgataagctggggctgcccgtcgtcaagaaaacgaaaaccggctattccaccgacgcagacgtgctggaggaactggcgccgtaccatccgatcgtcgaaaagattttgcattaccgccaactgacgaaattgcagtcgacctacatcgaggggcttttgaaagaaatccgtccgcaaaccggtaaaatccatacgtattatcagcagacgatcgcggcgacggggcggctgagcagtcagtttcccaatcttcagaacattccgatccgtctcgaagaggggcggaaaatccgcaaggcgttcgttccgtcagaaccgggatggctgatgctcgccgccgactattcgcagatcgaactgcgcgtgctcgcgcacgtttccggcgacgaacggctgaaggaagcgtttcggacaggcatggacatccacacgaagaccgcgatggacgtgttcggcgtttccgaagaccgcgtcgacgcgcgcatgcggcggcaggcgaaggcggtcaatttcggcatcatctacggcatcagcgatttcggactggcgcaaaacctgaacatttcccgcaaggaggcggcggagttcatccggcaatatttcgccgtcttttcgggcgtcaaggcgtaccgcgagcggatcgtcgagcaggcgcgccgcgacggttacgtgacgaccctgctcggtcgcaggcgctatttgccggacatcaacgcgtcgaattacaacctccgcattttcgcggagcggacggcgatgaatacgccgatccagggcacggccgccgacatcatcaagaccgcgatggtgcgtctgacgcggcggatgcgcgacgtcggactgaagagccgcatgctgctgcaggttcacgacgagctcgtgtttgaagtgccgccggacgagctcgacgcgatgcgggagcttgtgacggacgtcatggagtcggcggtcccgctcgacgtgccgctgaaggtcgacgtcagctggggcgccgactggtacgcggcgaagtgagggaagcgggatcc

SEQ ID NO: 1293 - DNA, 2792 bp, Artificial Sequence
  Description of Artificial Sequence: Synthetic Caldibacillus cellulovorans CompA.2 DNA Polymerase S834L
atgaaatacctgctgccgaccgctgctgctggtctgctgctcctcgctgcccagccggcgatggccatgggcaaactgattctggtcgacggaaacagcgtcgccaaccgggcgttttacgccgtccggctgctcagcacgcgcggcggcctgcacacaaacgcggtgtacggattcgccaacatgttgctcaagctgatcgaggaggaacggccgacgcattttctcgtcgcgttcgacgcgggcaaggcgacgttccgtcatcgcgaatacgaggcctacaaggcgggtcgcctgcagacgccgcccgagctgtccgagcagtttccgtacatccgggagctcgtccgggcgttcggcgtcgcgtccggcgagctggaggaatacgaggcggacgacatgatcggtacgctggcgaaacgggcggaggccgagggcgtcgacacgctggtcgtcaccggcgaccgcgatttgctccagctcgtatcggaccgcgtgaccgtcgcgctgacgcgcaagggcatcacggaaacggagcggtacgacccggcgcgcatccgcgaggaatacggcttcgatcccgaccgcatccgcgacctcaaagggctgatgggcgacgcgtctgacaatcttcccggcgttcccggcgtcggtgagaaaaccgcactgaaactgctcaggcagtacggttcgctggagagcgtcctggaacacgcgtcggaaatcgccggaaagctcggtgaaaatctgcgggcgcacgccgacgccgcccgattgagcaagcggctggcgacgatcgactgcgcggtaccgttgcagtcgggatgggactggctgcgcctcggcgaaccggaccgcgccgcgctcgcctcgctgttgcggcagctcgaattcaagtcgctgttgaaacggctcggactcgacggcacgtccgccgatgccgacgtcgacggcgtccgttcctccgcgcggccggcggacgagaaacggccgagggccgtcgccgtcgctgaggagggcgtcgacgtccgctgtccggatcgcccggaagaagtcgaagaagcgctgtcgcggctggaagccgcccagtcggtcgtcgtcgaggtgacgggcgacaacccgcacgacggcgaagtgcgcggcgtcgcatggtgggacggacatacggcgtatttcattccgtttgaacggctggtgcagtccgacatgcggccgctggccgactggctcgccgacgcgcgtcggccgaagcgtacgcacgactcccatcgcgctgaagtggcgctgttctggcacggccttgcgtttcgcggcacgtcgttctgcacgcatatcgccgcctatttgctcgaccccacggaatcgcgccatacgctggcggacctgtcgcgccgctacggtctgccgccggtaccggaagccgaggacgtttacggcaagggcgcgaagttcaaggttcccgatcgcgacacgctggcgcgttacgtcggccgcaaggccgccctagtcgcgcggctcgttccgctgctcgaggcggatttggcggcctgcggcatgcgttcgcttttttacgacctggagctgccgctttcatccgaactcgccgtcatggagacggtcggcgtccgcgtcgacgcggcggcgctcgccgcctacggcgaggaattgcgcgaggcggcggcgaaagtcgagcgggagatttacgagctggccgggacgacgttcaacatcggatcgacgaaacagctcggcgaaattttgttcgataagctggggctgcccgtcgtcaagaaaacgaaaaccggctattccaccgacgcagacgtgctggaggaactggcgccgtaccatccgatcgtcgaaaagattttgcattaccgccaactgacgaaattgcagtcgacctacatcgaggggcttttgaaagaaatccgtccgcaaaccggtaaaatccatacgtattatcagcagacgatcgcggcgacggggcggctgagcagtcagtttcccaatcttcagaacattccgatccgtctcgaagaggggcggaaaatccgcaaggcgttcgttccgtcagaaccgggatggctgatgctcgccgccgactattcgcagatcgaactgcgcgtgctcgcgcacgtttccggcgacgaacggctgaaggaagcgtttcggacaggcatggacatccacacgaagaccgcgatggacgtgttcggcgtttccgaagaccgcgtcgacgcgcgcatgcggcggcaggcgaaggcggtcaatttcggcatcatctacggcatcagcgatttcggactggcgcaaaacctgaacatttcccgcaaggaggcggcggagttcatccggcaatatttcgccgtcttttcgggcgtcaaggcgtaccgcgagcggatcgtcgagcaggcgcgccgcgacggttacgtgacgaccctgctcggtcgcaggcgctatttgccggacatcaacgcgtcgaattacaacctccgccttttcgcggagcggacggcgatgaatacgccgatccagggcacggccgccgacatcatcaagaccgcgatggtgcgtctgacgcggcggatgcgcgacgtcggactgaagagccgcatgctgctgcaggttcacgacgagctcgtgtttgaagtgccgccggacgagctcgacgcgatgcgggagcttgtgacggacgtcatggagtcggcggtcccgctcgacgtgccgctgaaggtcgacgtcagctggggcgccgactggtacgcggcgaagtgagggaagcgggatcc

SEQ ID NO: 1294 - DNA, 2792 bp, Artificial Sequence
  Description of Artificial Sequence: Synthetic Caldibacillus cellulovorans CompA.2 DNA Polymerase S834K
atgaaatacctgctgccgaccgctgctgctggtctgctgctcctcgctgcccagccggcgatggccatgggcaaactgattctggtcgacggaaacagcgtcgccaaccgggcgttttacgccgtccggctgctcagcacgcgcggcggcctgcacacaaacgcggtgtacggattcgccaacatgttgctcaagctgatcgaggaggaacggccgacgcattttctcgtcgcgttcgacgcgggcaaggcgacgttccgtcatcgcgaatacgaggcctacaaggcgggtcgcctgcagacgccgcccgagctgtccgagcagtttccgtacatccgggagctcgtccgggcgttcggcgtcgcgtccggcgagctggaggaatacgaggcggacgacatgatcggtacgctggcgaaacgggcggaggccgagggcgtcgacacgctggtcgtcaccggcgaccgcgatttgctccagctcgtatcggaccgcgtgaccgtcgcgctgacgcgcaagggcatcacggaaacggagcggtacgacccggcgcgcatccgcgaggaatacggcttcgatcccgaccgcatccgcgacctcaaagggctgatgggcgacgcgtctgacaatcttcccggcgttcccggcgtcggtgagaaaaccgcactgaaactgctcaggcagtacggttcgctggagagcgtcctggaacacgcgtcggaaatcgccggaaagctcggtgaaaatctgcgggcgcacgccgacgccgcccgattgagcaagcggctggcgacgatcgactgcgcggtaccgttgcagtcgggatgggactggctgcgcctcggcgaaccggaccgcgccgcgctcgcctcgctgttgcggcagctcgaattcaagtcgctgttgaaacggctcggactcgacggcacgtccgccgatgccgacgtcgacggcgtccgttcctccgcgcggccggcggacgagaaacggccgagggccgtcgccgtcgctgaggagggcgtcgacgtccgctgtccggatcgcccggaagaagtcgaagaagcgctgtcgcggctggaagccgcccagtcggtcgtcgtcgaggtgacgggcgacaacccgcacgacggcgaagtgcgcggcgtcgcatggtgggacggacatacggcgtatttcattccgtttgaacggctggtgcagtccgacatgcggccgctggccgactggctcgccgacgcgcgtcggccgaagcgtacgcacgactcccatcgcgctgaagtggcgctgttctggcacggccttgcgtttcgcggcacgtcgttctgcacgcatatcgccgcctatttgctcgaccccacggaatcgcgccatacgctggcggacctgtcgcgccgctacggtctgccgccggtaccggaagccgaggacgtttacggcaagggcgcgaagttcaaggttcccgatcgcgacacgctggcgcgttacgtcggccgcaaggccgccctagtcgcgcggctcgttccgctgctcgaggcggatttggcggcctgcggcatgcgttcgcttttttacgacctggagctgccgctttcatccgaactcgccgtcatggagacggtcggcgtccgcgtcgacgcggcggcgctcgccgcctacggcgaggaattgcgcgaggcggcggcgaaagtcgagcgggagatttacgagctggccgggacgacgttcaacatcggatcgacgaaacagctcggcgaaattttgttcgataagctggggctgcccgtcgtcaagaaaacgaaaaccggctattccaccgacgcagacgtgctggaggaactggcgccgtaccatccgatcgtcgaaaagattttgcattaccgccaactgacgaaattgcagtcgacctacatcgaggggcttttgaaagaaatccgtccgcaaaccggtaaaatccatacgtattatcagcagacgatcgcggcgacggggcggctgagcagtcagtttcccaatcttcagaacattccgatccgtctcgaagaggggcggaaaatccgcaaggcgttcgttccgtcagaaccgggatggctgatgctcgccgccgactattcgcagatcgaactgcgcgtgctcgcgcacgtttccggcgacgaacggctgaaggaagcgtttcggacaggcatggacatccacacgaagaccgcgatggacgtgttcggcgtttccgaagaccgcgtcgacgcgcgcatgcggcggcaggcgaaggcggtcaatttcggcatcatctacggcatcagcgatttcggactggcgcaaaacctgaacatttcccgcaaggaggcggcggagttcatccggcaatatttcgccgtcttttcgggcgtcaaggcgtaccgcgagcggatcgtcgagcaggcgcgccgcgacggttacgtgacgaccctgctcggtcgcaggcgctatttgccggacatcaacgcgtcgaattacaacctccgcaaattcgcggagcggacggcgatgaatacgccgatccagggcacggccgccgacatcatcaagaccgcgatggtgcgtctgacgcggcggatgcgcgacgtcggactgaagagccgcatgctgctgcaggttcacgacgagctcgtgtttgaagtgccgccggacgagctcgacgcgatgcgggagcttgtgacggacgtcatggagtcggcggtcccgctcgacgtgccgctgaaggtcgacgtcagctggggcgccgactggtacgcggcgaagtgagggaagcgggatcc

SEQ ID NO: 1295 - DNA, 2792 bp, Artificial Sequence
  Description of Artificial Sequence: Synthetic Caldibacillus cellulovorans CompA.2 DNA Polymerase S834M
atgaaatacctgctgccgaccgctgctgctggtctgctgctcctcgctgcccagccggcgatggccatgggcaaactgattctggtcgacggaaacagcgtcgccaaccgggcgttttacgccgtccggctgctcagcacgcgcggcggcctgcacacaaacgcggtgtacggattcgccaacatgttgctcaagctgatcgaggaggaacggccgacgcattttctcgtcgcgttcgacgcgggcaaggcgacgttccgtcatcgcgaatacgaggcctacaaggcgggtcgcctgcagacgccgcccgagctgtccgagcagtttccgtacatccgggagctcgtccgggcgttcggcgtcgcgtccggcgagctggaggaatacgaggcggacgacatgatcggtacgctggcgaaacgggcggaggccgagggcgtcgacacgctggtcgtcaccggcgaccgcgatttgctccagctcgtatcggaccgcgtgaccgtcgcgctgacgcgcaagggcatcacggaaacggagcggtacgacccggcgcgcatccgcgaggaatacggcttcgatcccgaccgcatccgcgacctcaaagggctgatgggcgacgcgtctgacaatcttcccggcgttcccggcgtcggtgagaaaaccgcactgaaactgctcaggcagtacggttcgctggagagcgtcctggaacacgcgtcggaaatcgccggaaagctcggtgaaaatctgcgggcgcacgccgacgccgcccgattgagcaagcggctggcgacgatcgactgcgcggtaccgttgcagtcgggatgggactggctgcgcctcggcgaaccggaccgcgccgcgctcgcctcgctgttgcggcagctcgaattcaagtcgctgttgaaacggctcggactcgacggcacgtccgccgatgccgacgtcgacggcgtccgttcctccgcgcggccggcggacgagaaacggccgagggccgtcgccgtcgctgaggagggcgtcgacgtccgctgtccggatcgcccggaagaagtcgaagaagcgctgtcgcggctggaagccgcccagtcggtcgtcgtcgaggtgacgggcgacaacccgcacgacggcgaagtgcgcggcgtcgcatggtgggacggacatacggcgtatttcattccgtttgaacggctggtgcagtccgacatgcggccgctggccgactggctcgccgacgcgcgtcggccgaagcgtacgcacgactcccatcgcgctgaagtggcgctgttctggcacggccttgcgtttcgcggcacgtcgttctgcacgcatatcgccgcctatttgctcgaccccacggaatcgcgccatacgctggcggacctgtcgcgccgctacggtctgccgccggtaccggaagccgaggacgtttacggcaagggcgcgaagttcaaggttcccgatcgcgacacgctggcgcgttacgtcggccgcaaggccgccctagtcgcgcggctcgttccgctgctcgaggcggatttggcggcctgcggcatgcgttcgcttttttacgacctggagctgccgctttcatccgaactcgccgtcatggagacggtcggcgtccgcgtcgacgcggcggcgctcgccgcctacggcgaggaattgcgcgaggcggcggcgaaagtcgagcgggagatttacgagctggccgggacgacgttcaacatcggatcgacgaaacagctcggcgaaattttgttcgataagctggggctgcccgtcgtcaagaaaacgaaaaccggctattccaccgacgcagacgtgctggaggaactggcgccgtaccatccgatcgtcgaaaagattttgcattaccgccaactgacgaaattgcagtcgacctacatcgaggggcttttgaaagaaatccgtccgcaaaccggtaaaatccatacgtattatcagcagacgatcgcggcgacggggcggctgagcagtcagtttcccaatcttcagaacattccgatccgtctcgaagaggggcggaaaatccgcaaggcgttcgttccgtcagaaccgggatggctgatgctcgccgccgactattcgcagatcgaactgcgcgtgctcgcgcacgtttccggcgacgaacggctgaaggaagcgtttcggacaggcatggacatccacacgaagaccgcgatggacgtgttcggcgtttccgaagaccgcgtcgacgcgcgcatgcggcggcaggcgaaggcggtcaatttcggcatcatctacggcatcagcgatttcggactggcgcaaaacctgaacatttcccgcaaggaggcggcggagttcatccggcaatatttcgccgtcttttcgggcgtcaaggcgtaccgcgagcggatcgtcgagcaggcgcgccgcgacggttacgtgacgaccctgctcggtcgcaggcgctatttgccggacatcaacgcgtcgaattacaacctccgcatgttcgcggagcggacggcgatgaatacgccgatccagggcacggccgccgacatcatcaagaccgcgatggtgcgtctgacgcggcggatgcgcgacgtcggactgaagagccgcatgctgctgcaggttcacgacgagctcgtgtttgaagtgccgccggacgagctcgacgcgatgcgggagcttgtgacggacgtcatggagtcggcggtcccgctcgacgtgccgctgaaggtcgacgtcagctggggcgccgactggtacgcggcgaagtgagggaagcgggatcc

SEQ ID NO: 1296 - DNA, 2792 bp, Artificial Sequence
  Description of Artificial Sequence: Synthetic Caldibacillus cellulovorans CompA.2 DNA Polymerase S834F
atgaaatacctgctgccgaccgctgctgctggtctgctgctcctcgctgcccagccggcgatggccatgggcaaactgattctggtcgacggaaacagcgtcgccaaccgggcgttttacgccgtccggctgctcagcacgcgcggcggcctgcacacaaacgcggtgtacggattcgccaacatgttgctcaagctgatcgaggaggaacggccgacgcattttctcgtcgcgttcgacgcgggcaaggcgacgttccgtcatcgcgaatacgaggcctacaaggcgggtcgcctgcagacgccgcccgagctgtccgagcagtttccgtacatccgggagctcgtccgggcgttcggcgtcgcgtccggcgagctggaggaatacgaggcggacgacatgatcggtacgctggcgaaacgggcggaggccgagggcgtcgacacgctggtcgtcaccggcgaccgcgatttgctccagctcgtatcggaccgcgtgaccgtcgcgctgacgcgcaagggcatcacggaaacggagcggtacgacccggcgcgcatccgcgaggaatacggcttcgatcccgaccgcatccgcgacctcaaagggctgatgggcgacgcgtctgacaatcttcccggcgttcccggcgtcggtgagaaaaccgcactgaaactgctcaggcagtacggttcgctggagagcgtcctggaacacgcgtcggaaatcgccggaaagctcggtgaaaatctgcgggcgcacgccgacgccgcccgattgagcaagcggctggcgacgatcgactgcgcggtaccgttgcagtcgggatgggactggctgcgcctcggcgaaccggaccgcgccgcgctcgcctcgctgttgcggcagctcgaattcaagtcgctgttgaaacggctcggactcgacggcacgtccgccgatgccgacgtcgacggcgtccgttcctccgcgcggccggcggacgagaaacggccgagggccgtcgccgtcgctgaggagggcgtcgacgtccgctgtccggatcgcccggaagaagtcgaagaagcgctgtcgcggctggaagccgcccagtcggtcgtcgtcgaggtgacgggcgacaacccgcacgacggcgaagtgcgcggcgtcgcatggtgggacggacatacggcgtatttcattccgtttgaacggctggtgcagtccgacatgcggccgctggccgactggctcgccgacgcgcgtcggccgaagcgtacgcacgactcccatcgcgctgaagtggcgctgttctggcacggccttgcgtttcgcggcacgtcgttctgcacgcatatcgccgcctatttgctcgaccccacggaatcgcgccatacgctggcggacctgtcgcgccgctacggtctgccgccggtaccggaagccgaggacgtttacggcaagggcgcgaagttcaaggttcccgatcgcgacacgctggcgcgttacgtcggccgcaaggccgccctagtcgcgcggctcgttccgctgctcgaggcggatttggcggcctgcggcatgcgttcgcttttttacgacctggagctgccgctttcatccgaactcgccgtcatggagacggtcggcgtccgcgtcgacgcggcggcgctcgccgcctacggcgaggaattgcgcgaggcggcggcgaaagtcgagcgggagatttacgagctggccgggacgacgttcaacatcggatcgacgaaacagctcggcgaaattttgttcgataagctggggctgcccgtcgtcaagaaaacgaaaaccggctattccaccgacgcagacgtgctggaggaactggcgccgtaccatccgatcgtcgaaaagattttgcattaccgccaactgacgaaattgcagtcgacctacatcgaggggcttttgaaagaaatccgtccgcaaaccggtaaaatccatacgtattatcagcagacgatcgcggcgacggggcggctgagcagtcagtttcccaatcttcagaacattccgatccgtctcgaagaggggcggaaaatccgcaaggcgttcgttccgtcagaaccgggatggctgatgctcgccgccgactattcgcagatcgaactgcgcgtgctcgcgcacgtttccggcgacgaacggctgaaggaagcgtttcggacaggcatggacatccacacgaagaccgcgatggacgtgttcggcgtttccgaagaccgcgtcgacgcgcgcatgcggcggcaggcgaaggcggtcaatttcggcatcatctacggcatcagcgatttcggactggcgcaaaacctgaacatttcccgcaaggaggcggcggagttcatccggcaatatttcgccgtcttttcgggcgtcaaggcgtaccgcgagcggatcgtcgagcaggcgcgccgcgacggttacgtgacgaccctgctcggtcgcaggcgctatttgccggacatcaacgcgtcgaattacaacctccgctttttcgcggagcggacggcgatgaatacgccgatccagggcacggccgccgacatcatcaagaccgcgatggtgcgtctgacgcggcggatgcgcgacgtcggactgaagagccgcatgctgctgcaggttcacgacgagctcgtgtttgaagtgccgccggacgagctcgacgcgatgcgggagcttgtgacggacgtcatggagtcggcggtcccgctcgacgtgccgctgaaggtcgacgtcagctggggcgccgactggtacgcggcgaagtgagggaagcgggatcc

SEQ ID NO: 1297 - DNA, 2792 bp, Artificial Sequence
  Description of Artificial Sequence: Synthetic Caldibacillus cellulovorans CompA.2 DNA Polymerase S834P
atgaaatacctgctgccgaccgctgctgctggtctgctgctcctcgctgcccagccggcgatggccatgggcaaactgattctggtcgacggaaacagcgtcgccaaccgggcgttttacgccgtccggctgctcagcacgcgcggcggcctgcacacaaacgcggtgtacggattcgccaacatgttgctcaagctgatcgaggaggaacggccgacgcattttctcgtcgcgttcgacgcgggcaaggcgacgttccgtcatcgcgaatacgaggcctacaaggcgggtcgcctgcagacgccgcccgagctgtccgagcagtttccgtacatccgggagctcgtccgggcgttcggcgtcgcgtccggcgagctggaggaatacgaggcggacgacatgatcggtacgctggcgaaacgggcggaggccgagggcgtcgacacgctggtcgtcaccggcgaccgcgatttgctccagctcgtatcggaccgcgtgaccgtcgcgctgacgcgcaagggcatcacggaaacggagcggtacgacccggcgcgcatccgcgaggaatacggcttcgatcccgaccgcatccgcgacctcaaagggctgatgggcgacgcgtctgacaatcttcccggcgttcccggcgtcggtgagaaaaccgcactgaaactgctcaggcagtacggttcgctggagagcgtcctggaacacgcgtcggaaatcgccggaaagctcggtgaaaatctgcgggcgcacgccgacgccgcccgattgagcaagcggctggcgacgatcgactgcgcggtaccgttgcagtcgggatgggactggctgcgcctcggcgaaccggaccgcgccgcgctcgcctcgctgttgcggcagctcgaattcaagtcgctgttgaaacggctcggactcgacggcacgtccgccgatgccgacgtcgacggcgtccgttcctccgcgcggccggcggacgagaaacggccgagggccgtcgccgtcgctgaggagggcgtcgacgtccgctgtccggatcgcccggaagaagtcgaagaagcgctgtcgcggctggaagccgcccagtcggtcgtcgtcgaggtgacgggcgacaacccgcacgacggcgaagtgcgcggcgtcgcatggtgggacggacatacggcgtatttcattccgtttgaacggctggtgcagtccgacatgcggccgctggccgactggctcgccgacgcgcgtcggccgaagcgtacgcacgactcccatcgcgctgaagtggcgctgttctggcacggccttgcgtttcgcggcacgtcgttctgcacgcatatcgccgcctatttgctcgaccccacggaatcgcgccatacgctggcggacctgtcgcgccgctacggtctgccgccggtaccggaagccgaggacgtttacggcaagggcgcgaagttcaaggttcccgatcgcgacacgctggcgcgttacgtcggccgcaaggccgccctagtcgcgcggctcgttccgctgctcgaggcggatttggcggcctgcggcatgcgttcgcttttttacgacctggagctgccgctttcatccgaactcgccgtcatggagacggtcggcgtccgcgtcgacgcggcggcgctcgccgcctacggcgaggaattgcgcgaggcggcggcgaaagtcgagcgggagatttacgagctggccgggacgacgttcaacatcggatcgacgaaacagctcggcgaaattttgttcgataagctggggctgcccgtcgtcaagaaaacgaaaaccggctattccaccgacgcagacgtgctggaggaactggcgccgtaccatccgatcgtcgaaaagattttgcattaccgccaactgacgaaattgcagtcgacctacatcgaggggcttttgaaagaaatccgtccgcaaaccggtaaaatccatacgtattatcagcagacgatcgcggcgacggggcggctgagcagtcagtttcccaatcttcagaacattccgatccgtctcgaagaggggcggaaaatccgcaaggcgttcgttccgtcagaaccgggatggctgatgctcgccgccgactattcgcagatcgaactgcgcgtgctcgcgcacgtttccggcgacgaacggctgaaggaagcgtttcggacaggcatggacatccacacgaagaccgcgatggacgtgttcggcgtttccgaagaccgcgtcgacgcgcgcatgcggcggcaggcgaaggcggtcaatttcggcatcatctacggcatcagcgatttcggactggcgcaaaacctgaacatttcccgcaaggaggcggcggagttcatccggcaatatttcgccgtcttttcgggcgtcaaggcgtaccgcgagcggatcgtcgagcaggcgcgccgcgacggttacgtgacgaccctgctcggtcgcaggcgctatttgccggacatcaacgcgtcgaattacaacctccgccctttcgcggagcggacggcgatgaatacgccgatccagggcacggccgccgacatcatcaagaccgcgatggtgcgtctgacgcggcggatgcgcgacgtcggactgaagagccgcatgctgctgcaggttcacgacgagctcgtgtttgaagtgccgccggacgagctcgacgcgatgcgggagcttgtgacggacgtcatggagtcggcggtcccgctcgacgtgccgctgaaggtcgacgtcagctggggcgccgactggtacgcggcgaagtgagggaagcgggatcc

SEQ ID NO: 1298 - DNA, 2792 bp, Artificial Sequence
  Description of Artificial Sequence: Synthetic Caldibacillus cellulovorans CompA.2 DNA Polymerase S834T
atgaaatacctgctgccgaccgctgctgctggtctgctgctcctcgctgcccagccggcgatggccatgggcaaactgattctggtcgacggaaacagcgtcgccaaccgggcgttttacgccgtccggctgctcagcacgcgcggcggcctgcacacaaacgcggtgtacggattcgccaacatgttgctcaagctgatcgaggaggaacggccgacgcattttctcgtcgcgttcgacgcgggcaaggcgacgttccgtcatcgcgaatacgaggcctacaaggcgggtcgcctgcagacgccgcccgagctgtccgagcagtttccgtacatccgggagctcgtccgggcgttcggcgtcgcgtccggcgagctggaggaatacgaggcggacgacatgatcggtacgctggcgaaacgggcggaggccgagggcgtcgacacgctggtcgtcaccggcgaccgcgatttgctccagctcgtatcggaccgcgtgaccgtcgcgctgacgcgcaagggcatcacggaaacggagcggtacgacccggcgcgcatccgcgaggaatacggcttcgatcccgaccgcatccgcgacctcaaagggctgatgggcgacgcgtctgacaatcttcccggcgttcccggcgtcggtgagaaaaccgcactgaaactgctcaggcagtacggttcgctggagagcgtcctggaacacgcgtcggaaatcgccggaaagctcggtgaaaatctgcgggcgcacgccgacgccgcccgattgagcaagcggctggcgacgatcgactgcgcggtaccgttgcagtcgggatgggactggctgcgcctcggcgaaccggaccgcgccgcgctcgcctcgctgttgcggcagctcgaattcaagtcgctgttgaaacggctcggactcgacggcacgtccgccgatgccgacgtcgacggcgtccgttcctccgcgcggccggcggacgagaaacggccgagggccgtcgccgtcgctgaggagggcgtcgacgtccgctgtccggatcgcccggaagaagtcgaagaagcgctgtcgcggctggaagccgcccagtcggtcgtcgtcgaggtgacgggcgacaacccgcacgacggcgaagtgcgcggcgtcgcatggtgggacggacatacggcgtatttcattccgtttgaacggctggtgcagtccgacatgcggccgctggccgactggctcgccgacgcgcgtcggccgaagcgtacgcacgactcccatcgcgctgaagtggcgctgttctggcacggccttgcgtttcgcggcacgtcgttctgcacgcatatcgccgcctatttgctcgaccccacggaatcgcgccatacgctggcggacctgtcgcgccgctacggtctgccgccggtaccggaagccgaggacgtttacggcaagggcgcgaagttcaaggttcccgatcgcgacacgctggcgcgttacgtcggccgcaaggccgccctagtcgcgcggctcgttccgctgctcgaggcggatttggcggcctgcggcatgcgttcgcttttttacgacctggagctgccgctttcatccgaactcgccgtcatggagacggtcggcgtccgcgtcgacgcggcggcgctcgccgcctacggcgaggaattgcgcgaggcggcggcgaaagtcgagcgggagatttacgagctggccgggacgacgttcaacatcggatcgacgaaacagctcggcgaaattttgttcgataagctggggctgcccgtcgtcaagaaaacgaaaaccggctattccaccgacgcagacgtgctggaggaactggcgccgtaccatccgatcgtcgaaaagattttgcattaccgccaactgacgaaattgcagtcgacctacatcgaggggcttttgaaagaaatccgtccgcaaaccggtaaaatccatacgtattatcagcagacgatcgcggcgacggggcggctgagcagtcagtttcccaatcttcagaacattccgatccgtctcgaagaggggcggaaaatccgcaaggcgttcgttccgtcagaaccgggatggctgatgctcgccgccgactattcgcagatcgaactgcgcgtgctcgcgcacgtttccggcgacgaacggctgaaggaagcgtttcggacaggcatggacatccacacgaagaccgcgatggacgtgttcggcgtttccgaagaccgcgtcgacgcgcgcatgcggcggcaggcgaaggcggtcaatttcggcatcatctacggcatcagcgatttcggactggcgcaaaacctgaacatttcccgcaaggaggcggcggagttcatccggcaatatttcgccgtcttttcgggcgtcaaggcgtaccgcgagcggatcgtcgagcaggcgcgccgcgacggttacgtgacgaccctgctcggtcgcaggcgctatttgccggacatcaacgcgtcgaattacaacctccgcactttcgcggagcggacggcgatgaatacgccgatccagggcacggccgccgacatcatcaagaccgcgatggtgcgtctgacgcggcggatgcgcgacgtcggactgaagagccgcatgctgctgcaggttcacgacgagctcgtgtttgaagtgccgccggacgagctcgacgcgatgcgggagcttgtgacggacgtcatggagtcggcggtcccgctcgacgtgccgctgaaggtcgacgtcagctggggcgccgactggtacgcggcgaagtgagggaagcgggatcc

SEQ ID NO: 1299 - DNA, 2792 bp, Artificial Sequence
  Description of Artificial Sequence: Synthetic Caldibacillus cellulovorans CompA.2 DNA Polymerase S834W
atgaaatacctgctgccgaccgctgctgctggtctgctgctcctcgctgcccagccggcgatggccatgggcaaactgattctggtcgacggaaacagcgtcgccaaccgggcgttttacgccgtccggctgctcagcacgcgcggcggcctgcacacaaacgcggtgtacggattcgccaacatgttgctcaagctgatcgaggaggaacggccgacgcattttctcgtcgcgttcgacgcgggcaaggcgacgttccgtcatcgcgaatacgaggcctacaaggcgggtcgcctgcagacgccgcccgagctgtccgagcagtttccgtacatccgggagctcgtccgggcgttcggcgtcgcgtccggcgagctggaggaatacgaggcggacgacatgatcggtacgctggcgaaacgggcggaggccgagggcgtcgacacgctggtcgtcaccggcgaccgcgatttgctccagctcgtatcggaccgcgtgaccgtcgcgctgacgcgcaagggcatcacggaaacggagcggtacgacccggcgcgcatccgcgaggaatacggcttcgatcccgaccgcatccgcgacctcaaagggctgatgggcgacgcgtctgacaatcttcccggcgttcccggcgtcggtgagaaaaccgcactgaaactgctcaggcagtacggttcgctggagagcgtcctggaacacgcgtcggaaatcgccggaaagctcggtgaaaatctgcgggcgcacgccgacgccgcccgattgagcaagcggctggcgacgatcgactgcgcggtaccgttgcagtcgggatgggactggctgcgcctcggcgaaccggaccgcgccgcgctcgcctcgctgttgcggcagctcgaattcaagtcgctgttgaaacggctcggactcgacggcacgtccgccgatgccgacgtcgacggcgtccgttcctccgcgcggccggcggacgagaaacggccgagggccgtcgccgtcgctgaggagggcgtcgacgtccgctgtccggatcgcccggaagaagtcgaagaagcgctgtcgcggctggaagccgcccagtcggtcgtcgtcgaggtgacgggcgacaacccgcacgacggcgaagtgcgcggcgtcgcatggtgggacggacatacggcgtatttcattccgtttgaacggctggtgcagtccgacatgcggccgctggccgactggctcgccgacgcgcgtcggccgaagcgtacgcacgactcccatcgcgctgaagtggcgctgttctggcacggccttgcgtttcgcggcacgtcgttctgcacgcatatcgccgcctatttgctcgaccccacggaatcgcgccatacgctggcggacctgtcgcgccgctacggtctgccgccggtaccggaagccgaggacgtttacggcaagggcgcgaagttcaaggttcccgatcgcgacacgctggcgcgttacgtcggccgcaaggccgccctagtcgcgcggctcgttccgctgctcgaggcggatttggcggcctgcggcatgcgttcgcttttttacgacctggagctgccgctttcatccgaactcgccgtcatggagacggtcggcgtccgcgtcgacgcggcggcgctcgccgcctacggcgaggaattgcgcgaggcggcggcgaaagtcgagcgggagatttacgagctggccgggacgacgttcaacatcggatcgacgaaacagctcggcgaaattttgttcgataagctggggctgcccgtcgtcaagaaaacgaaaaccggctattccaccgacgcagacgtgctggaggaactggcgccgtaccatccgatcgtcgaaaagattttgcattaccgccaactgacgaaattgcagtcgacctacatcgaggggcttttgaaagaaatccgtccgcaaaccggtaaaatccatacgtattatcagcagacgatcgcggcgacggggcggctgagcagtcagtttcccaatcttcagaacattccgatccgtctcgaagaggggcggaaaatccgcaaggcgttcgttccgtcagaaccgggatggctgatgctcgccgccgactattcgcagatcgaactgcgcgtgctcgcgcacgtttccggcgacgaacggctgaaggaagcgtttcggacaggcatggacatccacacgaagaccgcgatggacgtgttcggcgtttccgaagaccgcgtcgacgcgcgcatgcggcggcaggcgaaggcggtcaatttcggcatcatctacggcatcagcgatttcggactggcgcaaaacctgaacatttcccgcaaggaggcggcggagttcatccggcaatatttcgccgtcttttcgggcgtcaaggcgtaccgcgagcggatcgtcgagcaggcgcgccgcgacggttacgtgacgaccctgctcggtcgcaggcgctatttgccggacatcaacgcgtcgaattacaacctccgctggttcgcggagcggacggcgatgaatacgccgatccagggcacggccgccgacatcatcaagaccgcgatggtgcgtctgacgcggcggatgcgcgacgtcggactgaagagccgcatgctgctgcaggttcacgacgagctcgtgtttgaagtgccgccggacgagctcgacgcgatgcgggagcttgtgacggacgtcatggagtcggcggtcccgctcgacgtgccgctgaaggtcgacgtcagctggggcgccgactggtacgcggcgaagtgagggaagcgggatcc

SEQ ID NO: 1300 - DNA, 2792 bp, Artificial Sequence
  Description of Artificial Sequence: Synthetic Caldibacillus cellulovorans CompA.2 DNA Polymerase S834Y
atgaaatacctgctgccgaccgctgctgctggtctgctgctcctcgctgcccagccggcgatggccatgggcaaactgattctggtcgacggaaacagcgtcgccaaccgggcgttttacgccgtccggctgctcagcacgcgcggcggcctgcacacaaacgcggtgtacggattcgccaacatgttgctcaagctgatcgaggaggaacggccgacgcattttctcgtcgcgttcgacgcgggcaaggcgacgttccgtcatcgcgaatacgaggcctacaaggcgggtcgcctgcagacgccgcccgagctgtccgagcagtttccgtacatccgggagctcgtccgggcgttcggcgtcgcgtccggcgagctggaggaatacgaggcggacgacatgatcggtacgctggcgaaacgggcggaggccgagggcgtcgacacgctggtcgtcaccggcgaccgcgatttgctccagctcgtatcggaccgcgtgaccgtcgcgctgacgcgcaagggcatcacggaaacggagcggtacgacccggcgcgcatccgcgaggaatacggcttcgatcccgaccgcatccgcgacctcaaagggctgatgggcgacgcgtctgacaatcttcccggcgttcccggcgtcggtgagaaaaccgcactgaaactgctcaggcagtacggttcgctggagagcgtcctggaacacgcgtcggaaatcgccggaaagctcggtgaaaatctgcgggcgcacgccgacgccgcccgattgagcaagcggctggcgacgatcgactgcgcggtaccgttgcagtcgggatgggactggctgcgcctcggcgaaccggaccgcgccgcgctcgcctcgctgttgcggcagctcgaattcaagtcgctgttgaaacggctcggactcgacggcacgtccgccgatgccgacgtcgacggcgtccgttcctccgcgcggccggcggacgagaaacggccgagggccgtcgccgtcgctgaggagggcgtcgacgtccgctgtccggatcgcccggaagaagtcgaagaagcgctgtcgcggctggaagccgcccagtcggtcgtcgtcgaggtgacgggcgacaacccgcacgacggcgaagtgcgcggcgtcgcatggtgggacggacatacggcgtatttcattccgtttgaacggctggtgcagtccgacatgcggccgctggccgactggctcgccgacgcgcgtcggccgaagcgtacgcacgactcccatcgcgctgaagtggcgctgttctggcacggccttgcgtttcgcggcacgtcgttctgcacgcatatcgccgcctatttgctcgaccccacggaatcgcgccatacgctggcggacctgtcgcgccgctacggtctgccgccggtaccggaagccgaggacgtttacggcaagggcgcgaagttcaaggttcccgatcgcgacacgctggcgcgttacgtcggccgcaaggccgccctagtcgcgcggctcgttccgctgctcgaggcggatttggcggcctgcggcatgcgttcgcttttttacgacctggagctgccgctttcatccgaactcgccgtcatggagacggtcggcgtccgcgtcgacgcggcggcgctcgccgcctacggcgaggaattgcgcgaggcggcggcgaaagtcgagcgggagatttacgagctggccgggacgacgttcaacatcggatcgacgaaacagctcggcgaaattttgttcgataagctggggctgcccgtcgtcaagaaaacgaaaaccggctattccaccgacgcagacgtgctggaggaactggcgccgtaccatccgatcgtcgaaaagattttgcattaccgccaactgacgaaattgcagtcgacctacatcgaggggcttttgaaagaaatccgtccgcaaaccggtaaaatccatacgtattatcagcagacgatcgcggcgacggggcggctgagcagtcagtttcccaatcttcagaacattccgatccgtctcgaagaggggcggaaaatccgcaaggcgttcgttccgtcagaaccgggatggctgatgctcgccgccgactattcgcagatcgaactgcgcgtgctcgcgcacgtttccggcgacgaacggctgaaggaagcgtttcggacaggcatggacatccacacgaagaccgcgatggacgtgttcggcgtttccgaagaccgcgtcgacgcgcgcatgcggcggcaggcgaaggcggtcaatttcggcatcatctacggcatcagcgatttcggactggcgcaaaacctgaacatttcccgcaaggaggcggcggagttcatccggcaatatttcgccgtcttttcgggcgtcaaggcgtaccgcgagcggatcgtcgagcaggcgcgccgcgacggttacgtgacgaccctgctcggtcgcaggcgctatttgccggacatcaacgcgtcgaattacaacctccgctatttcgcggagcggacggcgatgaatacgccgatccagggcacggccgccgacatcatcaagaccgcgatggtgcgtctgacgcggcggatgcgcgacgtcggactgaagagccgcatgctgctgcaggttcacgacgagctcgtgtttgaagtgccgccggacgagctcgacgcgatgcgggagcttgtgacggacgtcatggagtcggcggtcccgctcgacgtgccgctgaaggtcgacgtcagctggggcgccgactggtacgcggcgaagtgagggaagcgggatcc

SEQ ID NO: 1301 - DNA, 2792 bp, Artificial Sequence
  Description of Artificial Sequence: Synthetic Caldibacillus cellulovorans CompA.2 DNA Polymerase S834V
atgaaatacctgctgccgaccgctgctgctggtctgctgctcctcgctgcccagccggcgatggccatgggcaaactgattctggtcgacggaaacagcgtcgccaaccgggcgttttacgccgtccggctgctcagcacgcgcggcggcctgcacacaaacgcggtgtacggattcgccaacatgttgctcaagctgatcgaggaggaacggccgacgcattttctcgtcgcgttcgacgcgggcaaggcgacgttccgtcatcgcgaatacgaggcctacaaggcgggtcgcctgcagacgccgcccgagctgtccgagcagtttccgtacatccgggagctcgtccgggcgttcggcgtcgcgtccggcgagctggaggaatacgaggcggacgacatgatcggtacgctggcgaaacgggcggaggccgagggcgtcgacacgctggtcgtcaccggcgaccgcgatttgctccagctcgtatcggaccgcgtgaccgtcgcgctgacgcgcaagggcatcacggaaacggagcggtacgacccggcgcgcatccgcgaggaatacggcttcgatcccgaccgcatccgcgacctcaaagggctgatgggcgacgcgtctgacaatcttcccggcgttcccggcgtcggtgagaaaaccgcactgaaactgctcaggcagtacggttcgctggagagcgtcctggaacacgcgtcggaaatcgccggaaagctcggtgaaaatctgcgggcgcacgccgacgccgcccgattgagcaagcggctggcgacgatcgactgcgcggtaccgttgcagtcgggatgggactggctgcgcctcggcgaaccggaccgcgccgcgctcgcctcgctgttgcggcagctcgaattcaagtcgctgttgaaacggctcggactcgacggcacgtccgccgatgccgacgtcgacggcgtccgttcctccgcgcggccggcggacgagaaacggccgagggccgtcgccgtcgctgaggagggcgtcgacgtccgctgtccggatcgcccggaagaagtcgaagaagcgctgtcgcggctggaagccgcccagtcggtcgtcgtcgaggtgacgggcgacaacccgcacgacggcgaagtgcgcggcgtcgcatggtgggacggacatacggcgtatttcattccgtttgaacggctggtgcagtccgacatgcggccgctggccgactggctcgccgacgcgcgtcggccgaagcgtacgcacgactcccatcgcgctgaagtggcgctgttctggcacggccttgcgtttcgcggcacgtcgttctgcacgcatatcgccgcctatttgctcgaccccacggaatcgcgccatacgctggcggacctgtcgcgccgctacggtctgccgccggtaccggaagccgaggacgtttacggcaagggcgcgaagttcaaggttcccgatcgcgacacgctggcgcgttacgtcggccgcaaggccgccctagtcgcgcggctcgttccgctgctcgaggcggatttggcggcctgcggcatgcgttcgcttttttacgacctggagctgccgctttcatccgaactcgccgtcatggagacggtcggcgtccgcgtcgacgcggcggcgctcgccgcctacggcgaggaattgcgcgaggcggcggcgaaagtcgagcgggagatttacgagctggccgggacgacgttcaacatcggatcgacgaaacagctcggcgaaattttgttcgataagctggggctgcccgtcgtcaagaaaacgaaaaccggctattccaccgacgcagacgtgctggaggaactggcgccgtaccatccgatcgtcgaaaagattttgcattaccgccaactgacgaaattgcagtcgacctacatcgaggggcttttgaaagaaatccgtccgcaaaccggtaaaatccatacgtattatcagcagacgatcgcggcgacggggcggctgagcagtcagtttcccaatcttcagaacattccgatccgtctcgaagaggggcggaaaatccgcaaggcgttcgttccgtcagaaccgggatggctgatgctcgccgccgactattcgcagatcgaactgcgcgtgctcgcgcacgtttccggcgacgaacggctgaaggaagcgtttcggacaggcatggacatccacacgaagaccgcgatggacgtgttcggcgtttccgaagaccgcgtcgacgcgcgcatgcggcggcaggcgaaggcggtcaatttcggcatcatctacggcatcagcgatttcggactggcgcaaaacctgaacatttcccgcaaggaggcggcggagttcatccggcaatatttcgccgtcttttcgggcgtcaaggcgtaccgcgagcggatcgtcgagcaggcgcgccgcgacggttacgtgacgaccctgctcggtcgcaggcgctatttgccggacatcaacgcgtcgaattacaacctccgcgttttcgcggagcggacggcgatgaatacgccgatccagggcacggccgccgacatcatcaagaccgcgatggtgcgtctgacgcggcggatgcgcgacgtcggactgaagagccgcatgctgctgcaggttcacgacgagctcgtgtttgaagtgccgccggacgagctcgacgcgatgcgggagcttgtgacggacgtcatggagtcggcggtcccgctcgacgtgccgctgaaggtcgacgtcagctggggcgccgactggtacgcggcgaagtgagggaagcgggatcc

SEQ ID NO: 1302 - DNA, 2792 bp, Artificial Sequence
  Description of Artificial Sequence: Synthetic Caldibacillus cellulovorans CompA.2 DNA Polymerase F835A
atgaaatacctgctgccgaccgctgctgctggtctgctgctcctcgctgcccagccggcgatggccatgggcaaactgattctggtcgacggaaacagcgtcgccaaccgggcgttttacgccgtccggctgctcagcacgcgcggcggcctgcacacaaacgcggtgtacggattcgccaacatgttgctcaagctgatcgaggaggaacggccgacgcattttctcgtcgcgttcgacgcgggcaaggcgacgttccgtcatcgcgaatacgaggcctacaaggcgggtcgcctgcagacgccgcccgagctgtccgagcagtttccgtacatccgggagctcgtccgggcgttcggcgtcgcgtccggcgagctggaggaatacgaggcggacgacatgatcggtacgctggcgaaacgggcggaggccgagggcgtcgacacgctggtcgtcaccggcgaccgcgatttgctccagctcgtatcggaccgcgtgaccgtcgcgctgacgcgcaagggcatcacggaaacggagcggtacgacccggcgcgcatccgcgaggaatacggcttcgatcccgaccgcatccgcgacctcaaagggctgatgggcgacgcgtctgacaatcttcccggcgttcccggcgtcggtgagaaaaccgcactgaaactgctcaggcagtacggttcgctggagagcgtcctggaacacgcgtcggaaatcgccggaaagctcggtgaaaatctgcgggcgcacgccgacgccgcccgattgagcaagcggctggcgacgatcgactgcgcggtaccgttgcagtcgggatgggactggctgcgcctcggcgaaccggaccgcgccgcgctcgcctcgctgttgcggcagctcgaattcaagtcgctgttgaaacggctcggactcgacggcacgtccgccgatgccgacgtcgacggcgtccgttcctccgcgcggccggcggacgagaaacggccgagggccgtcgccgtcgctgaggagggcgtcgacgtccgctgtccggatcgcccggaagaagtcgaagaagcgctgtcgcggctggaagccgcccagtcggtcgtcgtcgaggtgacgggcgacaacccgcacgacggcgaagtgcgcggcgtcgcatggtgggacggacatacggcgtatttcattccgtttgaacggctggtgcagtccgacatgcggccgctggccgactggctcgccgacgcgcgtcggccgaagcgtacgcacgactcccatcgcgctgaagtggcgctgttctggcacggccttgcgtttcgcggcacgtcgttctgcacgcatatcgccgcctatttgctcgaccccacggaatcgcgccatacgctggcggacctgtcgcgccgctacggtctgccgccggtaccggaagccgaggacgtttacggcaagggcgcgaagttcaaggttcccgatcgcgacacgctggcgcgttacgtcggccgcaaggccgccctagtcgcgcggctcgttccgctgctcgaggcggatttggcggcctgcggcatgcgttcgcttttttacgacctggagctgccgctttcatccgaactcgccgtcatggagacggtcggcgtccgcgtcgacgcggcggcgctcgccgcctacggcgaggaattgcgcgaggcggcggcgaaagtcgagcgggagatttacgagctggccgggacgacgttcaacatcggatcgacgaaacagctcggcgaaattttgttcgataagctggggctgcccgtcgtcaagaaaacgaaaaccggctattccaccgacgcagacgtgctggaggaactggcgccgtaccatccgatcgtcgaaaagattttgcattaccgccaactgacgaaattgcagtcgacctacatcgaggggcttttgaaagaaatccgtccgcaaaccggtaaaatccatacgtattatcagcagacgatcgcggcgacggggcggctgagcagtcagtttcccaatcttcagaacattccgatccgtctcgaagaggggcggaaaatccgcaaggcgttcgttccgtcagaaccgggatggctgatgctcgccgccgactattcgcagatcgaactgcgcgtgctcgcgcacgtttccggcgacgaacggctgaaggaagcgtttcggacaggcatggacatccacacgaagaccgcgatggacgtgttcggcgtttccgaagaccgcgtcgacgcgcgcatgcggcggcaggcgaaggcggtcaatttcggcatcatctacggcatcagcgatttcggactggcgcaaaacctgaacatttcccgcaaggaggcggcggagttcatccggcaatatttcgccgtcttttcgggcgtcaaggcgtaccgcgagcggatcgtcgagcaggcgcgccgcgacggttacgtgacgaccctgctcggtcgcaggcgctatttgccggacatcaacgcgtcgaattacaacctccgctcggctgcggagcggacggcgatgaatacgccgatccagggcacggccgccgacatcatcaagaccgcgatggtgcgtctgacgcggcggatgcgcgacgtcggactgaagagccgcatgctgctgcaggttcacgacgagctcgtgtttgaagtgccgccggacgagctcgacgcgatgcgggagcttgtgacggacgtcatggagtcggcggtcccgctcgacgtgccgctgaaggtcgacgtcagctggggcgccgactggtacgcggcgaagtgagggaagcgggatcc

SEQ ID NO: 1303 - DNA, 2792 bp, Artificial Sequence
  Description of Artificial Sequence: Synthetic Caldibacillus cellulovorans CompA.2 DNA Polymerase F835R
atgaaatacctgctgccgaccgctgctgctggtctgctgctcctcgctgcccagccggcgatggccatgggcaaactgattctggtcgacggaaacagcgtcgccaaccgggcgttttacgccgtccggctgctcagcacgcgcggcggcctgcacacaaacgcggtgtacggattcgccaacatgttgctcaagctgatcgaggaggaacggccgacgcattttctcgtcgcgttcgacgcgggcaaggcgacgttccgtcatcgcgaatacgaggcctacaaggcgggtcgcctgcagacgccgcccgagctgtccgagcagtttccgtacatccgggagctcgtccgggcgttcggcgtcgcgtccggcgagctggaggaatacgaggcggacgacatgatcggtacgctggcgaaacgggcggaggccgagggcgtcgacacgctggtcgtcaccggcgaccgcgatttgctccagctcgtatcggaccgcgtgaccgtcgcgctgacgcgcaagggcatcacggaaacggagcggtacgacccggcgcgcatccgcgaggaatacggcttcgatcccgaccgcatccgcgacctcaaagggctgatgggcgacgcgtctgacaatcttcccggcgttcccggcgtcggtgagaaaaccgcactgaaactgctcaggcagtacggttcgctggagagcgtcctggaacacgcgtcggaaatcgccggaaagctcggtgaaaatctgcgggcgcacgccgacgccgcccgattgagcaagcggctggcgacgatcgactgcgcggtaccgttgcagtcgggatgggactggctgcgcctcggcgaaccggaccgcgccgcgctcgcctcgctgttgcggcagctcgaattcaagtcgctgttgaaacggctcggactcgacggcacgtccgccgatgccgacgtcgacggcgtccgttcctccgcgcggccggcggacgagaaacggccgagggccgtcgccgtcgctgaggagggcgtcgacgtccgctgtccggatcgcccggaagaagtcgaagaagcgctgtcgcggctggaagccgcccagtcggtcgtcgtcgaggtgacgggcgacaacccgcacgacggcgaagtgcgcggcgtcgcatggtgggacggacatacggcgtatttcattccgtttgaacggctggtgcagtccgacatgcggccgctggccgactggctcgccgacgcgcgtcggccgaagcgtacgcacgactcccatcgcgctgaagtggcgctgttctggcacggccttgcgtttcgcggcacgtcgttctgcacgcatatcgccgcctatttgctcgaccccacggaatcgcgccatacgctggcggacctgtcgcgccgctacggtctgccgccggtaccggaagccgaggacgtttacggcaagggcgcgaagttcaaggttcccgatcgcgacacgctggcgcgttacgtcggccgcaaggccgccctagtcgcgcggctcgttccgctgctcgaggcggatttggcggcctgcggcatgcgttcgcttttttacgacctggagctgccgctttcatccgaactcgccgtcatggagacggtcggcgtccgcgtcgacgcggcggcgctcgccgcctacggcgaggaattgcgcgaggcggcggcgaaagtcgagcgggagatttacgagctggccgggacgacgttcaacatcggatcgacgaaacagctcggcgaaattttgttcgataagctggggctgcccgtcgtcaagaaaacgaaaaccggctattccaccgacgcagacgtgctggaggaactggcgccgtaccatccgatcgtcgaaaagattttgcattaccgccaactgacgaaattgcagtcgacctacatcgaggggcttttgaaagaaatccgtccgcaaaccggtaaaatccatacgtattatcagcagacgatcgcggcgacggggcggctgagcagtcagtttcccaatcttcagaacattccgatccgtctcgaagaggggcggaaaatccgcaaggcgttcgttccgtcagaaccgggatggctgatgctcgccgccgactattcgcagatcgaactgcgcgtgctcgcgcacgtttccggcgacgaacggctgaaggaagcgtttcggacaggcatggacatccacacgaagaccgcgatggacgtgttcggcgtttccgaagaccgcgtcgacgcgcgcatgcggcggcaggcgaaggcggtcaatttcggcatcatctacggcatcagcgatttcggactggcgcaaaacctgaacatttcccgcaaggaggcggcggagttcatccggcaatatttcgccgtcttttcgggcgtcaaggcgtaccgcgagcggatcgtcgagcaggcgcgccgcgacggttacgtgacgaccctgctcggtcgcaggcgctatttgccggacatcaacgcgtcgaattacaacctccgctcgcgtgcggagcggacggcgatgaatacgccgatccagggcacggccgccgacatcatcaagaccgcgatggtgcgtctgacgcggcggatgcgcgacgtcggactgaagagccgcatgctgctgcaggttcacgacgagctcgtgtttgaagtgccgccggacgagctcgacgcgatgcgggagcttgtgacggacgtcatggagtcggcggtcccgctcgacgtgccgctgaaggtcgacgtcagctggggcgccgactggtacgcggcgaagtgagggaagcgggatcc

SEQ ID NO: 1304 - DNA, 2792 bp, Artificial Sequence
  Description of Artificial Sequence: Synthetic Caldibacillus cellulovorans CompA.2 DNA Polymerase F835N
atgaaatacctgctgccgaccgctgctgctggtctgctgctcctcgctgcccagccggcgatggccatgggcaaactgattctggtcgacggaaacagcgtcgccaaccgggcgttttacgccgtccggctgctcagcacgcgcggcggcctgcacacaaacgcggtgtacggattcgccaacatgttgctcaagctgatcgaggaggaacggccgacgcattttctcgtcgcgttcgacgcgggcaaggcgacgttccgtcatcgcgaatacgaggcctacaaggcgggtcgcctgcagacgccgcccgagctgtccgagcagtttccgtacatccgggagctcgtccgggcgttcggcgtcgcgtccggcgagctggaggaatacgaggcggacgacatgatcggtacgctggcgaaacgggcggaggccgagggcgtcgacacgctggtcgtcaccggcgaccgcgatttgctccagctcgtatcggaccgcgtgaccgtcgcgctgacgcgcaagggcatcacggaaacggagcggtacgacccggcgcgcatccgcgaggaatacggcttcgatcccgaccgcatccgcgacctcaaagggctgatgggcgacgcgtctgacaatcttcccggcgttcccggcgtcggtgagaaaaccgcactgaaactgctcaggcagtacggttcgctggagagcgtcctggaacacgcgtcggaaatcgccggaaagctcggtgaaaatctgcgggcgcacgccgacgccgcccgattgagcaagcggctggcgacgatcgactgcgcggtaccgttgcagtcgggatgggactggctgcgcctcggcgaaccggaccgcgccgcgctcgcctcgctgttgcggcagctcgaattcaagtcgctgttgaaacggctcggactcgacggcacgtccgccgatgccgacgtcgacggcgtccgttcctccgcgcggccggcggacgagaaacggccgagggccgtcgccgtcgctgaggagggcgtcgacgtccgctgtccggatcgcccggaagaagtcgaagaagcgctgtcgcggctggaagccgcccagtcggtcgtcgtcgaggtgacgggcgacaacccgcacgacggcgaagtgcgcggcgtcgcatggtgggacggacatacggcgtatttcattccgtttgaacggctggtgcagtccgacatgcggccgctggccgactggctcgccgacgcgcgtcggccgaagcgtacgcacgactcccatcgcgctgaagtggcgctgttctggcacggccttgcgtttcgcggcacgtcgttctgcacgcatatcgccgcctatttgctcgaccccacggaatcgcgccatacgctggcggacctgtcgcgccgctacggtctgccgccggtaccggaagccgaggacgtttacggcaagggcgcgaagttcaaggttcccgatcgcgacacgctggcgcgttacgtcggccgcaaggccgccctagtcgcgcggctcgttccgctgctcgaggcggatttggcggcctgcggcatgcgttcgcttttttacgacctggagctgccgctttcatccgaactcgccgtcatggagacggtcggcgtccgcgtcgacgcggcggcgctcgccgcctacggcgaggaattgcgcgaggcggcggcgaaagtcgagcgggagatttacgagctggccgggacgacgttcaacatcggatcgacgaaacagctcggcgaaattttgttcgataagctggggctgcccgtcgtcaagaaaacgaaaaccggctattccaccgacgcagacgtgctggaggaactggcgccgtaccatccgatcgtcgaaaagattttgcattaccgccaactgacgaaattgcagtcgacctacatcgaggggcttttgaaagaaatccgtccgcaaaccggtaaaatccatacgtattatcagcagacgatcgcggcgacggggcggctgagcagtcagtttcccaatcttcagaacattccgatccgtctcgaagaggggcggaaaatccgcaaggcgttcgttccgtcagaaccgggatggctgatgctcgccgccgactattcgcagatcgaactgcgcgtgctcgcgcacgtttccggcgacgaacggctgaaggaagcgtttcggacaggcatggacatccacacgaagaccgcgatggacgtgttcggcgtttccgaagaccgcgtcgacgcgcgcatgcggcggcaggcgaaggcggtcaatttcggcatcatctacggcatcagcgatttcggactggcgcaaaacctgaacatttcccgcaaggaggcggcggagttcatccggcaatatttcgccgtcttttcgggcgtcaaggcgtaccgcgagcggatcgtcgagcaggcgcgccgcgacggttacgtgacgaccctgctcggtcgcaggcgctatttgccggacatcaacgcgtcgaattacaacctccgctcgaatgcggagcggacggcgatgaatacgccgatccagggcacggccgccgacatcatcaagaccgcgatggtgcgtctgacgcggcggatgcgcgacgtcggactgaagagccgcatgctgctgcaggttcacgacgagctcgtgtttgaagtgccgccggacgagctcgacgcgatgcgggagcttgtgacggacgtcatggagtcggcggtcccgctcgacgtgccgctgaaggtcgacgtcagctggggcgccgactggtacgcggcgaagtgagggaagcgggatcc

SEQ ID NO: 1305 - DNA, 2792 bp, Artificial Sequence
  Description of Artificial Sequence: Synthetic Caldibacillus cellulovorans CompA.2 DNA Polymerase F835D
atgaaatacctgctgccgaccgctgctgctggtctgctgctcctcgctgcccagccggcgatggccatgggcaaactgattctggtcgacggaaacagcgtcgccaaccgggcgttttacgccgtccggctgctcagcacgcgcggcggcctgcacacaaacgcggtgtacggattcgccaacatgttgctcaagctgatcgaggaggaacggccgacgcattttctcgtcgcgttcgacgcgggcaaggcgacgttccgtcatcgcgaatacgaggcctacaaggcgggtcgcctgcagacgccgcccgagctgtccgagcagtttccgtacatccgggagctcgtccgggcgttcggcgtcgcgtccggcgagctggaggaatacgaggcggacgacatgatcggtacgctggcgaaacgggcggaggccgagggcgtcgacacgctggtcgtcaccggcgaccgcgatttgctccagctcgtatcggaccgcgtgaccgtcgcgctgacgcgcaagggcatcacggaaacggagcggtacgacccggcgcgcatccgcgaggaatacggcttcgatcccgaccgcatccgcgacctcaaagggctgatgggcgacgcgtctgacaatcttcccggcgttcccggcgtcggtgagaaaaccgcactgaaactgctcaggcagtacggttcgctggagagcgtcctggaacacgcgtcggaaatcgccggaaagctcggtgaaaatctgcgggcgcacgccgacgccgcccgattgagcaagcggctggcgacgatcgactgcgcggtaccgttgcagtcgggatgggactggctgcgcctcggcgaaccggaccgcgccgcgctcgcctcgctgttgcggcagctcgaattcaagtcgctgttgaaacggctcggactcgacggcacgtccgccgatgccgacgtcgacggcgtccgttcctccgcgcggccggcggacgagaaacggccgagggccgtcgccgtcgctgaggagggcgtcgacgtccgctgtccggatcgcccggaagaagtcgaagaagcgctgtcgcggctggaagccgcccagtcggtcgtcgtcgaggtgacgggcgacaacccgcacgacggcgaagtgcgcggcgtcgcatggtgggacggacatacggcgtatttcattccgtttgaacggctggtgcagtccgacatgcggccgctggccgactggctcgccgacgcgcgtcggccgaagcgtacgcacgactcccatcgcgctgaagtggcgctgttctggcacggccttgcgtttcgcggcacgtcgttctgcacgcatatcgccgcctatttgctcgaccccacggaatcgcgccatacgctggcggacctgtcgcgccgctacggtctgccgccggtaccggaagccgaggacgtttacggcaagggcgcgaagttcaaggttcccgatcgcgacacgctggcgcgttacgtcggccgcaaggccgccctagtcgcgcggctcgttccgctgctcgaggcggatttggcggcctgcggcatgcgttcgcttttttacgacctggagctgccgctttcatccgaactcgccgtcatggagacggtcggcgtccgcgtcgacgcggcggcgctcgccgcctacggcgaggaattgcgcgaggcggcggcgaaagtcgagcgggagatttacgagctggccgggacgacgttcaacatcggatcgacgaaacagctcggcgaaattttgttcgataagctggggctgcccgtcgtcaagaaaacgaaaaccggctattccaccgacgcagacgtgctggaggaactggcgccgtaccatccgatcgtcgaaaagattttgcattaccgccaactgacgaaattgcagtcgacctacatcgaggggcttttgaaagaaatccgtccgcaaaccggtaaaatccatacgtattatcagcagacgatcgcggcgacggggcggctgagcagtcagtttcccaatcttcagaacattccgatccgtctcgaagaggggcggaaaatccgcaaggcgttcgttccgtcagaaccgggatggctgatgctcgccgccgactattcgcagatcgaactgcgcgtgctcgcgcacgtttccggcgacgaacggctgaaggaagcgtttcggacaggcatggacatccacacgaagaccgcgatggacgtgttcggcgtttccgaagaccgcgtcgacgcgcgcatgcggcggcaggcgaaggcggtcaatttcggcatcatctacggcatcagcgatttcggactggcgcaaaacctgaacatttcccgcaaggaggcggcggagttcatccggcaatatttcgccgtcttttcgggcgtcaaggcgtaccgcgagcggatcgtcgagcaggcgcgccgcgacggttacgtgacgaccctgctcggtcgcaggcgctatttgccggacatcaacgcgtcgaattacaacctccgctcggatgcggagcggacggcgatgaatacgccgatccagggcacggccgccgacatcatcaagaccgcgatggtgcgtctgacgcggcggatgcgcgacgtcggactgaagagccgcatgctgctgcaggttcacgacgagctcgtgtttgaagtgccgccggacgagctcgacgcgatgcgggagcttgtgacggacgtcatggagtcggcggtcccgctcgacgtgccgctgaaggtcgacgtcagctggggcgccgactggtacgcggcgaagtgagggaagcgggatcc

SEQ ID NO: 1306 - DNA, 2792 bp, Artificial Sequence
  Description of Artificial Sequence: Synthetic Caldibacillus cellulovorans CompA.2 DNA Polymerase F835C
atgaaatacctgctgccgaccgctgctgctggtctgctgctcctcgctgcccagccggcgatggccatgggcaaactgattctggtcgacggaaacagcgtcgccaaccgggcgttttacgccgtccggctgctcagcacgcgcggcggcctgcacacaaacgcggtgtacggattcgccaacatgttgctcaagctgatcgaggaggaacggccgacgcattttctcgtcgcgttcgacgcgggcaaggcgacgttccgtcatcgcgaatacgaggcctacaaggcgggtcgcctgcagacgccgcccgagctgtccgagcagtttccgtacatccgggagctcgtccgggcgttcggcgtcgcgtccggcgagctggaggaatacgaggcggacgacatgatcggtacgctggcgaaacgggcggaggccgagggcgtcgacacgctggtcgtcaccggcgaccgcgatttgctccagctcgtatcggaccgcgtgaccgtcgcgctgacgcgcaagggcatcacggaaacggagcggtacgacccggcgcgcatccgcgaggaatacggcttcgatcccgaccgcatccgcgacctcaaagggctgatgggcgacgcgtctgacaatcttcccggcgttcccggcgtcggtgagaaaaccgcactgaaactgctcaggcagtacggttcgctggagagcgtcctggaacacgcgtcggaaatcgccggaaagctcggtgaaaatctgcgggcgcacgccgacgccgcccgattgagcaagcggctggcgacgatcgactgcgcggtaccgttgcagtcgggatgggactggctgcgcctcggcgaaccggaccgcgccgcgctcgcctcgctgttgcggcagctcgaattcaagtcgctgttgaaacggctcggactcgacggcacgtccgccgatgccgacgtcgacggcgtccgttcctccgcgcggccggcggacgagaaacggccgagggccgtcgccgtcgctgaggagggcgtcgacgtccgctgtccggatcgcccggaagaagtcgaagaagcgctgtcgcggctggaagccgcccagtcggtcgtcgtcgaggtgacgggcgacaacccgcacgacggcgaagtgcgcggcgtcgcatggtgggacggacatacggcgtatttcattccgtttgaacggctggtgcagtccgacatgcggccgctggccgactggctcgccgacgcgcgtcggccgaagcgtacgcacgactcccatcgcgctgaagtggcgctgttctggcacggccttgcgtttcgcggcacgtcgttctgcacgcatatcgccgcctatttgctcgaccccacggaatcgcgccatacgctggcggacctgtcgcgccgctacggtctgccgccggtaccggaagccgaggacgtttacggcaagggcgcgaagttcaaggttcccgatcgcgacacgctggcgcgttacgtcggccgcaaggccgccctagtcgcgcggctcgttccgctgctcgaggcggatttggcggcctgcggcatgcgttcgcttttttacgacctggagctgccgctttcatccgaactcgccgtcatggagacggtcggcgtccgcgtcgacgcggcggcgctcgccgcctacggcgaggaattgcgcgaggcggcggcgaaagtcgagcgggagatttacgagctggccgggacgacgttcaacatcggatcgacgaaacagctcggcgaaattttgttcgataagctggggctgcccgtcgtcaagaaaacgaaaaccggctattccaccgacgcagacgtgctggaggaactggcgccgtaccatccgatcgtcgaaaagattttgcattaccgccaactgacgaaattgcagtcgacctacatcgaggggcttttgaaagaaatccgtccgcaaaccggtaaaatccatacgtattatcagcagacgatcgcggcgacggggcggctgagcagtcagtttcccaatcttcagaacattccgatccgtctcgaagaggggcggaaaatccgcaaggcgttcgttccgtcagaaccgggatggctgatgctcgccgccgactattcgcagatcgaactgcgcgtgctcgcgcacgtttccggcgacgaacggctgaaggaagcgtttcggacaggcatggacatccacacgaagaccgcgatggacgtgttcggcgtttccgaagaccgcgtcgacgcgcgcatgcggcggcaggcgaaggcggtcaatttcggcatcatctacggcatcagcgatttcggactggcgcaaaacctgaacatttcccgcaaggaggcggcggagttcatccggcaatatttcgccgtcttttcgggcgtcaaggcgtaccgcgagcggatcgtcgagcaggcgcgccgcgacggttacgtgacgaccctgctcggtcgcaggcgctatttgccggacatcaacgcgtcgaattacaacctccgctcgtgtgcggagcggacggcgatgaatacgccgatccagggcacggccgccgacatcatcaagaccgcgatggtgcgtctgacgcggcggatgcgcgacgtcggactgaagagccgcatgctgctgcaggttcacgacgagctcgtgtttgaagtgccgccggacgagctcgacgcgatgcgggagcttgtgacggacgtcatggagtcggcggtcccgctcgacgtgccgctgaaggtcgacgtcagctggggcgccgactggtacgcggcgaagtgagggaagcgggatcc

SEQ ID NO: 1307 - DNA, 2792 bp, Artificial Sequence
  Description of Artificial Sequence: Synthetic Caldibacillus cellulovorans CompA.2 DNA Polymerase F835E
atgaaatacctgctgccgaccgctgctgctggtctgctgctcctcgctgcccagccggcgatggccatgggcaaactgattctggtcgacggaaacagcgtcgccaaccgggcgttttacgccgtccggctgctcagcacgcgcggcggcctgcacacaaacgcggtgtacggattcgccaacatgttgctcaagctgatcgaggaggaacggccgacgcattttctcgtcgcgttcgacgcgggcaaggcgacgttccgtcatcgcgaatacgaggcctacaaggcgggtcgcctgcagacgccgcccgagctgtccgagcagtttccgtacatccgggagctcgtccgggcgttcggcgtcgcgtccggcgagctggaggaatacgaggcggacgacatgatcggtacgctggcgaaacgggcggaggccgagggcgtcgacacgctggtcgtcaccggcgaccgcgatttgctccagctcgtatcggaccgcgtgaccgtcgcgctgacgcgcaagggcatcacggaaacggagcggtacgacccggcgcgcatccgcgaggaatacggcttcgatcccgaccgcatccgcgacctcaaagggctgatgggcgacgcgtctgacaatcttcccggcgttcccggcgtcggtgagaaaaccgcactgaaactgctcaggcagtacggttcgctggagagcgtcctggaacacgcgtcggaaatcgccggaaagctcggtgaaaatctgcgggcgcacgccgacgccgcccgattgagcaagcggctggcgacgatcgactgcgcggtaccgttgcagtcgggatgggactggctgcgcctcggcgaaccggaccgcgccgcgctcgcctcgctgttgcggcagctcgaattcaagtcgctgttgaaacggctcggactcgacggcacgtccgccgatgccgacgtcgacggcgtccgttcctccgcgcggccggcggacgagaaacggccgagggccgtcgccgtcgctgaggagggcgtcgacgtccgctgtccggatcgcccggaagaagtcgaagaagcgctgtcgcggctggaagccgcccagtcggtcgtcgtcgaggtgacgggcgacaacccgcacgacggcgaagtgcgcggcgtcgcatggtgggacggacatacggcgtatttcattccgtttgaacggctggtgcagtccgacatgcggccgctggccgactggctcgccgacgcgcgtcggccgaagcgtacgcacgactcccatcgcgctgaagtggcgctgttctggcacggccttgcgtttcgcggcacgtcgttctgcacgcatatcgccgcctatttgctcgaccccacggaatcgcgccatacgctggcggacctgtcgcgccgctacggtctgccgccggtaccggaagccgaggacgtttacggcaagggcgcgaagttcaaggttcccgatcgcgacacgctggcgcgttacgtcggccgcaaggccgccctagtcgcgcggctcgttccgctgctcgaggcggatttggcggcctgcggcatgcgttcgcttttttacgacctggagctgccgctttcatccgaactcgccgtcatggagacggtcggcgtccgcgtcgacgcggcggcgctcgccgcctacggcgaggaattgcgcgaggcggcggcgaaagtcgagcgggagatttacgagctggccgggacgacgttcaacatcggatcgacgaaacagctcggcgaaattttgttcgataagctggggctgcccgtcgtcaagaaaacgaaaaccggctattccaccgacgcagacgtgctggaggaactggcgccgtaccatccgatcgtcgaaaagattttgcattaccgccaactgacgaaattgcagtcgacctacatcgaggggcttttgaaagaaatccgtccgcaaaccggtaaaatccatacgtattatcagcagacgatcgcggcgacggggcggctgagcagtcagtttcccaatcttcagaacattccgatccgtctcgaagaggggcggaaaatccgcaaggcgttcgttccgtcagaaccgggatggctgatgctcgccgccgactattcgcagatcgaactgcgcgtgctcgcgcacgtttccggcgacgaacggctgaaggaagcgtttcggacaggcatggacatccacacgaagaccgcgatggacgtgttcggcgtttccgaagaccgcgtcgacgcgcgcatgcggcggcaggcgaaggcggtcaatttcggcatcatctacggcatcagcgatttcggactggcgcaaaacctgaacatttcccgcaaggaggcggcggagttcatccggcaatatttcgccgtcttttcgggcgtcaaggcgtaccgcgagcggatcgtcgagcaggcgcgccgcgacggttacgtgacgaccctgctcggtcgcaggcgctatttgccggacatcaacgcgtcgaattacaacctccgctcggaagcggagcggacggcgatgaatacgccgatccagggcacggccgccgacatcatcaagaccgcgatggtgcgtctgacgcggcggatgcgcgacgtcggactgaagagccgcatgctgctgcaggttcacgacgagctcgtgtttgaagtgccgccggacgagctcgacgcgatgcgggagcttgtgacggacgtcatggagtcggcggtcccgctcgacgtgccgctgaaggtcgacgtcagctggggcgccgactggtacgcggcgaagtgagggaagcgggatcc

SEQ ID NO: 1308 - DNA, 2792 bp, Artificial Sequence
  Description of Artificial Sequence: Synthetic Caldibacillus cellulovorans CompA.2 DNA Polymerase F835Q
atgaaatacctgctgccgaccgctgctgctggtctgctgctcctcgctgcccagccggcgatggccatgggcaaactgattctggtcgacggaaacagcgtcgccaaccgggcgttttacgccgtccggctgctcagcacgcgcggcggcctgcacacaaacgcggtgtacggattcgccaacatgttgctcaagctgatcgaggaggaacggccgacgcattttctcgtcgcgttcgacgcgggcaaggcgacgttccgtcatcgcgaatacgaggcctacaaggcgggtcgcctgcagacgccgcccgagctgtccgagcagtttccgtacatccgggagctcgtccgggcgttcggcgtcgcgtccggcgagctggaggaatacgaggcggacgacatgatcggtacgctggcgaaacgggcggaggccgagggcgtcgacacgctggtcgtcaccggcgaccgcgatttgctccagctcgtatcggaccgcgtgaccgtcgcgctgacgcgcaagggcatcacggaaacggagcggtacgacccggcgcgcatccgcgaggaatacggcttcgatcccgaccgcatccgcgacctcaaagggctgatgggcgacgcgtctgacaatcttcccggcgttcccggcgtcggtgagaaaaccgcactgaaactgctcaggcagtacggttcgctggagagcgtcctggaacacgcgtcggaaatcgccggaaagctcggtgaaaatctgcgggcgcacgccgacgccgcccgattgagcaagcggctggcgacgatcgactgcgcggtaccgttgcagtcgggatgggactggctgcgcctcggcgaaccggaccgcgccgcgctcgcctcgctgttgcggcagctcgaattcaagtcgctgttgaaacggctcggactcgacggcacgtccgccgatgccgacgtcgacggcgtccgttcctccgcgcggccggcggacgagaaacggccgagggccgtcgccgtcgctgaggagggcgtcgacgtccgctgtccggatcgcccggaagaagtcgaagaagcgctgtcgcggctggaagccgcccagtcggtcgtcgtcgaggtgacgggcgacaacccgcacgacggcgaagtgcgcggcgtcgcatggtgggacggacatacggcgtatttcattccgtttgaacggctggtgcagtccgacatgcggccgctggccgactggctcgccgacgcgcgtcggccgaagcgtacgcacgactcccatcgcgctgaagtggcgctgttctggcacggccttgcgtttcgcggcacgtcgttctgcacgcatatcgccgcctatttgctcgaccccacggaatcgcgccatacgctggcggacctgtcgcgccgctacggtctgccgccggtaccggaagccgaggacgtttacggcaagggcgcgaagttcaaggttcccgatcgcgacacgctggcgcgttacgtcggccgcaaggccgccctagtcgcgcggctcgttccgctgctcgaggcggatttggcggcctgcggcatgcgttcgcttttttacgacctggagctgccgctttcatccgaactcgccgtcatggagacggtcggcgtccgcgtcgacgcggcggcgctcgccgcctacggcgaggaattgcgcgaggcggcggcgaaagtcgagcgggagatttacgagctggccgggacgacgttcaacatcggatcgacgaaacagctcggcgaaattttgttcgataagctggggctgcccgtcgtcaagaaaacgaaaaccggctattccaccgacgcagacgtgctggaggaactggcgccgtaccatccgatcgtcgaaaagattttgcattaccgccaactgacgaaattgcagtcgacctacatcgaggggcttttgaaagaaatccgtccgcaaaccggtaaaatccatacgtattatcagcagacgatcgcggcgacggggcggctgagcagtcagtttcccaatcttcagaacattccgatccgtctcgaagaggggcggaaaatccgcaaggcgttcgttccgtcagaaccgggatggctgatgctcgccgccgactattcgcagatcgaactgcgcgtgctcgcgcacgtttccggcgacgaacggctgaaggaagcgtttcggacaggcatggacatccacacgaagaccgcgatggacgtgttcggcgtttccgaagaccgcgtcgacgcgcgcatgcggcggcaggcgaaggcggtcaatttcggcatcatctacggcatcagcgatttcggactggcgcaaaacctgaacatttcccgcaaggaggcggcggagttcatccggcaatatttcgccgtcttttcgggcgtcaaggcgtaccgcgagcggatcgtcgagcaggcgcgccgcgacggttacgtgacgaccctgctcggtcgcaggcgctatttgccggacatcaacgcgtcgaattacaacctccgctcgcaagcggagcggacggcgatgaatacgccgatccagggcacggccgccgacatcatcaagaccgcgatggtgcgtctgacgcggcggatgcgcgacgtcggactgaagagccgcatgctgctgcaggttcacgacgagctcgtgtttgaagtgccgccggacgagctcgacgcgatgcgggagcttgtgacggacgtcatggagtcggcggtcccgctcgacgtgccgctgaaggtcgacgtcagctggggcgccgactggtacgcggcgaagtgagggaagcgggatcc

SEQ ID NO: 1309 - DNA, 2792 bp, Artificial Sequence
  Description of Artificial Sequence: Synthetic Caldibacillus cellulovorans CompA.2 DNA Polymerase F835G
atgaaatacctgctgccgaccgctgctgctggtctgctgctcctcgctgcccagccggcgatggccatgggcaaactgattctggtcgacggaaacagcgtcgccaaccgggcgttttacgccgtccggctgctcagcacgcgcggcggcctgcacacaaacgcggtgtacggattcgccaacatgttgctcaagctgatcgaggaggaacggccgacgcattttctcgtcgcgttcgacgcgggcaaggcgacgttccgtcatcgcgaatacgaggcctacaaggcgggtcgcctgcagacgccgcccgagctgtccgagcagtttccgtacatccgggagctcgtccgggcgttcggcgtcgcgtccggcgagctggaggaatacgaggcggacgacatgatcggtacgctggcgaaacgggcggaggccgagggcgtcgacacgctggtcgtcaccggcgaccgcgatttgctccagctcgtatcggaccgcgtgaccgtcgcgctgacgcgcaagggcatcacggaaacggagcggtacgacccggcgcgcatccgcgaggaatacggcttcgatcccgaccgcatccgcgacctcaaagggctgatgggcgacgcgtctgacaatcttcccggcgttcccggcgtcggtgagaaaaccgcactgaaactgctcaggcagtacggttcgctggagagcgtcctggaacacgcgtcggaaatcgccggaaagctcggtgaaaatctgcgggcgcacgccgacgccgcccgattgagcaagcggctggcgacgatcgactgcgcggtaccgttgcagtcgggatgggactggctgcgcctcggcgaaccggaccgcgccgcgctcgcctcgctgttgcggcagctcgaattcaagtcgctgttgaaacggctcggactcgacggcacgtccgccgatgccgacgtcgacggcgtccgttcctccgcgcggccggcggacgagaaacggccgagggccgtcgccgtcgctgaggagggcgtcgacgtccgctgtccggatcgcccggaagaagtcgaagaagcgctgtcgcggctggaagccgcccagtcggtcgtcgtcgaggtgacgggcgacaacccgcacgacggcgaagtgcgcggcgtcgcatggtgggacggacatacggcgtatttcattccgtttgaacggctggtgcagtccgacatgcggccgctggccgactggctcgccgacgcgcgtcggccgaagcgtacgcacgactcccatcgcgctgaagtggcgctgttctggcacggccttgcgtttcgcggcacgtcgttctgcacgcatatcgccgcctatttgctcgaccccacggaatcgcgccatacgctggcggacctgtcgcgccgctacggtctgccgccggtaccggaagccgaggacgtttacggcaagggcgcgaagttcaaggttcccgatcgcgacacgctggcgcgttacgtcggccgcaaggccgccctagtcgcgcggctcgttccgctgctcgaggcggatttggcggcctgcggcatgcgttcgcttttttacgacctggagctgccgctttcatccgaactcgccgtcatggagacggtcggcgtccgcgtcgacgcggcggcgctcgccgcctacggcgaggaattgcgcgaggcggcggcgaaagtcgagcgggagatttacgagctggccgggacgacgttcaacatcggatcgacgaaacagctcggcgaaattttgttcgataagctggggctgcccgtcgtcaagaaaacgaaaaccggctattccaccgacgcagacgtgctggaggaactggcgccgtaccatccgatcgtcgaaaagattttgcattaccgccaactgacgaaattgcagtcgacctacatcgaggggcttttgaaagaaatccgtccgcaaaccggtaaaatccatacgtattatcagcagacgatcgcggcgacggggcggctgagcagtcagtttcccaatcttcagaacattccgatccgtctcgaagaggggcggaaaatccgcaaggcgttcgttccgtcagaaccgggatggctgatgctcgccgccgactattcgcagatcgaactgcgcgtgctcgcgcacgtttccggcgacgaacggctgaaggaagcgtttcggacaggcatggacatccacacgaagaccgcgatggacgtgttcggcgtttccgaagaccgcgtcgacgcgcgcatgcggcggcaggcgaaggcggtcaatttcggcatcatctacggcatcagcgatttcggactggcgcaaaacctgaacatttcccgcaaggaggcggcggagttcatccggcaatatttcgccgtcttttcgggcgtcaaggcgtaccgcgagcggatcgtcgagcaggcgcgccgcgacggttacgtgacgaccctgctcggtcgcaggcgctatttgccggacatcaacgcgtcgaattacaacctccgctcgggtgcggagcggacggcgatgaatacgccgatccagggcacggccgccgacatcatcaagaccgcgatggtgcgtctgacgcggcggatgcgcgacgtcggactgaagagccgcatgctgctgcaggttcacgacgagctcgtgtttgaagtgccgccggacgagctcgacgcgatgcgggagcttgtgacggacgtcatggagtcggcggtcccgctcgacgtgccgctgaaggtcgacgtcagctggggcgccgactggtacgcggcgaagtgagggaagcgggatcc

SEQ ID NO: 1310 - DNA, 2792 bp, Artificial Sequence
  Description of Artificial Sequence: Synthetic Caldibacillus cellulovorans CompA.2 DNA Polymerase F835H
atgaaatacctgctgccgaccgctgctgctggtctgctgctcctcgctgcccagccggcgatggccatgggcaaactgattctggtcgacggaaacagcgtcgccaaccgggcgttttacgccgtccggctgctcagcacgcgcggcggcctgcacacaaacgcggtgtacggattcgccaacatgttgctcaagctgatcgaggaggaacggccgacgcattttctcgtcgcgttcgacgcgggcaaggcgacgttccgtcatcgcgaatacgaggcctacaaggcgggtcgcctgcagacgccgcccgagctgtccgagcagtttccgtacatccgggagctcgtccgggcgttcggcgtcgcgtccggcgagctggaggaatacgaggcggacgacatgatcggtacgctggcgaaacgggcggaggccgagggcgtcgacacgctggtcgtcaccggcgaccgcgatttgctccagctcgtatcggaccgcgtgaccgtcgcgctgacgcgcaagggcatcacggaaacggagcggtacgacccggcgcgcatccgcgaggaatacggcttcgatcccgaccgcatccgcgacctcaaagggctgatgggcgacgcgtctgacaatcttcccggcgttcccggcgtcggtgagaaaaccgcactgaaactgctcaggcagtacggttcgctggagagcgtcctggaacacgcgtcggaaatcgccggaaagctcggtgaaaatctgcgggcgcacgccgacgccgcccgattgagcaagcggctggcgacgatcgactgcgcggtaccgttgcagtcgggatgggactggctgcgcctcggcgaaccggaccgcgccgcgctcgcctcgctgttgcggcagctcgaattcaagtcgctgttgaaacggctcggactcgacggcacgtccgccgatgccgacgtcgacggcgtccgttcctccgcgcggccggcggacgagaaacggccgagggccgtcgccgtcgctgaggagggcgtcgacgtccgctgtccggatcgcccggaagaagtcgaagaagcgctgtcgcggctggaagccgcccagtcggtcgtcgtcgaggtgacgggcgacaacccgcacgacggcgaagtgcgcggcgtcgcatggtgggacggacatacggcgtatttcattccgtttgaacggctggtgcagtccgacatgcggccgctggccgactggctcgccgacgcgcgtcggccgaagcgtacgcacgactcccatcgcgctgaagtggcgctgttctggcacggccttgcgtttcgcggcacgtcgttctgcacgcatatcgccgcctatttgctcgaccccacggaatcgcgccatacgctggcggacctgtcgcgccgctacggtctgccgccggtaccggaagccgaggacgtttacggcaagggcgcgaagttcaaggttcccgatcgcgacacgctggcgcgttacgtcggccgcaaggccgccctagtcgcgcggctcgttccgctgctcgaggcggatttggcggcctgcggcatgcgttcgcttttttacgacctggagctgccgctttcatccgaactcgccgtcatggagacggtcggcgtccgcgtcgacgcggcggcgctcgccgcctacggcgaggaattgcgcgaggcggcggcgaaagtcgagcgggagatttacgagctggccgggacgacgttcaacatcggatcgacgaaacagctcggcgaaattttgttcgataagctggggctgcccgtcgtcaagaaaacgaaaaccggctattccaccgacgcagacgtgctggaggaactggcgccgtaccatccgatcgtcgaaaagattttgcattaccgccaactgacgaaattgcagtcgacctacatcgaggggcttttgaaagaaatccgtccgcaaaccggtaaaatccatacgtattatcagcagacgatcgcggcgacggggcggctgagcagtcagtttcccaatcttcagaacattccgatccgtctcgaagaggggcggaaaatccgcaaggcgttcgttccgtcagaaccgggatggctgatgctcgccgccgactattcgcagatcgaactgcgcgtgctcgcgcacgtttccggcgacgaacggctgaaggaagcgtttcggacaggcatggacatccacacgaagaccgcgatggacgtgttcggcgtttccgaagaccgcgtcgacgcgcgcatgcggcggcaggcgaaggcggtcaatttcggcatcatctacggcatcagcgatttcggactggcgcaaaacctgaacatttcccgcaaggaggcggcggagttcatccggcaatatttcgccgtcttttcgggcgtcaaggcgtaccgcgagcggatcgtcgagcaggcgcgccgcgacggttacgtgacgaccctgctcggtcgcaggcgctatttgccggacatcaacgcgtcgaattacaacctccgctcgcatgcggagcggacggcgatgaatacgccgatccagggcacggccgccgacatcatcaagaccgcgatggtgcgtctgacgcggcggatgcgcgacgtcggactgaagagccgcatgctgctgcaggttcacgacgagctcgtgtttgaagtgccgccggacgagctcgacgcgatgcgggagcttgtgacggacgtcatggagtcggcggtcccgctcgacgtgccgctgaaggtcgacgtcagctggggcgccgactggtacgcggcgaagtgagggaagcgggatcc

SEQ ID NO: 1311 - DNA, 2792 bp, Artificial Sequence
  Description of Artificial Sequence: Synthetic Caldibacillus cellulovorans CompA.2 DNA Polymerase F835I
atgaaatacctgctgccgaccgctgctgctggtctgctgctcctcgctgcccagccggcgatggccatgggcaaactgattctggtcgacggaaacagcgtcgccaaccgggcgttttacgccgtccggctgctcagcacgcgcggcggcctgcacacaaacgcggtgtacggattcgccaacatgttgctcaagctgatcgaggaggaacggccgacgcattttctcgtcgcgttcgacgcgggcaaggcgacgttccgtcatcgcgaatacgaggcctacaaggcgggtcgcctgcagacgccgcccgagctgtccgagcagtttccgtacatccgggagctcgtccgggcgttcggcgtcgcgtccggcgagctggaggaatacgaggcggacgacatgatcggtacgctggcgaaacgggcggaggccgagggcgtcgacacgctggtcgtcaccggcgaccgcgatttgctccagctcgtatcggaccgcgtgaccgtcgcgctgacgcgcaagggcatcacggaaacggagcggtacgacccggcgcgcatccgcgaggaatacggcttcgatcccgaccgcatccgcgacctcaaagggctgatgggcgacgcgtctgacaatcttcccggcgttcccggcgtcggtgagaaaaccgcactgaaactgctcaggcagtacggttcgctggagagcgtcctggaacacgcgtcggaaatcgccggaaagctcggtgaaaatctgcgggcgcacgccgacgccgcccgattgagcaagcggctggcgacgatcgactgcgcggtaccgttgcagtcgggatgggactggctgcgcctcggcgaaccggaccgcgccgcgctcgcctcgctgttgcggcagctcgaattcaagtcgctgttgaaacggctcggactcgacggcacgtccgccgatgccgacgtcgacggcgtccgttcctccgcgcggccggcggacgagaaacggccgagggccgtcgccgtcgctgaggagggcgtcgacgtccgctgtccggatcgcccggaagaagtcgaagaagcgctgtcgcggctggaagccgcccagtcggtcgtcgtcgaggtgacgggcgacaacccgcacgacggcgaagtgcgcggcgtcgcatggtgggacggacatacggcgtatttcattccgtttgaacggctggtgcagtccgacatgcggccgctggccgactggctcgccgacgcgcgtcggccgaagcgtacgcacgactcccatcgcgctgaagtggcgctgttctggcacggccttgcgtttcgcggcacgtcgttctgcacgcatatcgccgcctatttgctcgaccccacggaatcgcgccatacgctggcggacctgtcgcgccgctacggtctgccgccggtaccggaagccgaggacgtttacggcaagggcgcgaagttcaaggttcccgatcgcgacacgctggcgcgttacgtcggccgcaaggccgccctagtcgcgcggctcgttccgctgctcgaggcggatttggcggcctgcggcatgcgttcgcttttttacgacctggagctgccgctttcatccgaactcgccgtcatggagacggtcggcgtccgcgtcgacgcggcggcgctcgccgcctacggcgaggaattgcgcgaggcggcggcgaaagtcgagcgggagatttacgagctggccgggacgacgttcaacatcggatcgacgaaacagctcggcgaaattttgttcgataagctggggctgcccgtcgtcaagaaaacgaaaaccggctattccaccgacgcagacgtgctggaggaactggcgccgtaccatccgatcgtcgaaaagattttgcattaccgccaactgacgaaattgcagtcgacctacatcgaggggcttttgaaagaaatccgtccgcaaaccggtaaaatccatacgtattatcagcagacgatcgcggcgacggggcggctgagcagtcagtttcccaatcttcagaacattccgatccgtctcgaagaggggcggaaaatccgcaaggcgttcgttccgtcagaaccgggatggctgatgctcgccgccgactattcgcagatcgaactgcgcgtgctcgcgcacgtttccggcgacgaacggctgaaggaagcgtttcggacaggcatggacatccacacgaagaccgcgatggacgtgttcggcgtttccgaagaccgcgtcgacgcgcgcatgcggcggcaggcgaaggcggtcaatttcggcatcatctacggcatcagcgatttcggactggcgcaaaacctgaacatttcccgcaaggaggcggcggagttcatccggcaatatttcgccgtcttttcgggcgtcaaggcgtaccgcgagcggatcgtcgagcaggcgcgccgcgacggttacgtgacgaccctgctcggtcgcaggcgctatttgccggacatcaacgcgtcgaattacaacctccgctcgattgcggagcggacggcgatgaatacgccgatccagggcacggccgccgacatcatcaagaccgcgatggtgcgtctgacgcggcggatgcgcgacgtcggactgaagagccgcatgctgctgcaggttcacgacgagctcgtgtttgaagtgccgccggacgagctcgacgcgatgcgggagcttgtgacggacgtcatggagtcggcggtcccgctcgacgtgccgctgaaggtcgacgtcagctggggcgccgactggtacgcggcgaagtgagggaagcgggatcc

SEQ ID NO: 1312 - DNA, 2792 bp, Artificial Sequence
  Description of Artificial Sequence: Synthetic Caldibacillus cellulovorans CompA.2 DNA Polymerase F835L
atgaaatacctgctgccgaccgctgctgctggtctgctgctcctcgctgcccagccggcgatggccatgggcaaactgattctggtcgacggaaacagcgtcgccaaccgggcgttttacgccgtccggctgctcagcacgcgcggcggcctgcacacaaacgcggtgtacggattcgccaacatgttgctcaagctgatcgaggaggaacggccgacgcattttctcgtcgcgttcgacgcgggcaaggcgacgttccgtcatcgcgaatacgaggcctacaaggcgggtcgcctgcagacgccgcccgagctgtccgagcagtttccgtacatccgggagctcgtccgggcgttcggcgtcgcgtccggcgagctggaggaatacgaggcggacgacatgatcggtacgctggcgaaacgggcggaggccgagggcgtcgacacgctggtcgtcaccggcgaccgcgatttgctccagctcgtatcggaccgcgtgaccgtcgcgctgacgcgcaagggcatcacggaaacggagcggtacgacccggcgcgcatccgcgaggaatacggcttcgatcccgaccgcatccgcgacctcaaagggctgatgggcgacgcgtctgacaatcttcccggcgttcccggcgtcggtgagaaaaccgcactgaaactgctcaggcagtacggttcgctggagagcgtcctggaacacgcgtcggaaatcgccggaaagctcggtgaaaatctgcgggcgcacgccgacgccgcccgattgagcaagcggctggcgacgatcgactgcgcggtaccgttgcagtcgggatgggactggctgcgcctcggcgaaccggaccgcgccgcgctcgcctcgctgttgcggcagctcgaattcaagtcgctgttgaaacggctcggactcgacggcacgtccgccgatgccgacgtcgacggcgtccgttcctccgcgcggccggcggacgagaaacggccgagggccgtcgccgtcgctgaggagggcgtcgacgtccgctgtccggatcgcccggaagaagtcgaagaagcgctgtcgcggctggaagccgcccagtcggtcgtcgtcgaggtgacgggcgacaacccgcacgacggcgaagtgcgcggcgtcgcatggtgggacggacatacggcgtatttcattccgtttgaacggctggtgcagtccgacatgcggccgctggccgactggctcgccgacgcgcgtcggccgaagcgtacgcacgactcccatcgcgctgaagtggcgctgttctggcacggccttgcgtttcgcggcacgtcgttctgcacgcatatcgccgcctatttgctcgaccccacggaatcgcgccatacgctggcggacctgtcgcgccgctacggtctgccgccggtaccggaagccgaggacgtttacggcaagggcgcgaagttcaaggttcccgatcgcgacacgctggcgcgttacgtcggccgcaaggccgccctagtcgcgcggctcgttccgctgctcgaggcggatttggcggcctgcggcatgcgttcgcttttttacgacctggagctgccgctttcatccgaactcgccgtcatggagacggtcggcgtccgcgtcgacgcggcggcgctcgccgcctacggcgaggaattgcgcgaggcggcggcgaaagtcgagcgggagatttacgagctggccgggacgacgttcaacatcggatcgacgaaacagctcggcgaaattttgttcgataagctggggctgcccgtcgtcaagaaaacgaaaaccggctattccaccgacgcagacgtgctggaggaactggcgccgtaccatccgatcgtcgaaaagattttgcattaccgccaactgacgaaattgcagtcgacctacatcgaggggcttttgaaagaaatccgtccgcaaaccggtaaaatccatacgtattatcagcagacgatcgcggcgacggggcggctgagcagtcagtttcccaatcttcagaacattccgatccgtctcgaagaggggcggaaaatccgcaaggcgttcgttccgtcagaaccgggatggctgatgctcgccgccgactattcgcagatcgaactgcgcgtgctcgcgcacgtttccggcgacgaacggctgaaggaagcgtttcggacaggcatggacatccacacgaagaccgcgatggacgtgttcggcgtttccgaagaccgcgtcgacgcgcgcatgcggcggcaggcgaaggcggtcaatttcggcatcatctacggcatcagcgatttcggactggcgcaaaacctgaacatttcccgcaaggaggcggcggagttcatccggcaatatttcgccgtcttttcgggcgtcaaggcgtaccgcgagcggatcgtcgagcaggcgcgccgcgacggttacgtgacgaccctgctcggtcgcaggcgctatttgccggacatcaacgcgtcgaattacaacctccgctcgcttgcggagcggacggcgatgaatacgccgatccagggcacggccgccgacatcatcaagaccgcgatggtgcgtctgacgcggcggatgcgcgacgtcggactgaagagccgcatgctgctgcaggttcacgacgagctcgtgtttgaagtgccgccggacgagctcgacgcgatgcgggagcttgtgacggacgtcatggagtcggcggtcccgctcgacgtgccgctgaaggtcgacgtcagctggggcgccgactggtacgcggcgaagtgagggaagcgggatcc

SEQ ID NO: 1313 - DNA, 2792 bp, Artificial Sequence
  Description of Artificial Sequence: Synthetic Caldibacillus cellulovorans CompA.2 DNA Polymerase F835K
atgaaatacctgctgccgaccgctgctgctggtctgctgctcctcgctgcccagccggcgatggccatgggcaaactgattctggtcgacggaaacagcgtcgccaaccgggcgttttacgccgtccggctgctcagcacgcgcggcggcctgcacacaaacgcggtgtacggattcgccaacatgttgctcaagctgatcgaggaggaacggccgacgcattttctcgtcgcgttcgacgcgggcaaggcgacgttccgtcatcgcgaatacgaggcctacaaggcgggtcgcctgcagacgccgcccgagctgtccgagcagtttccgtacatccgggagctcgtccgggcgttcggcgtcgcgtccggcgagctggaggaatacgaggcggacgacatgatcggtacgctggcgaaacgggcggaggccgagggcgtcgacacgctggtcgtcaccggcgaccgcgatttgctccagctcgtatcggaccgcgtgaccgtcgcgctgacgcgcaagggcatcacggaaacggagcggtacgacccggcgcgcatccgcgaggaatacggcttcgatcccgaccgcatccgcgacctcaaagggctgatgggcgacgcgtctgacaatcttcccggcgttcccggcgtcggtgagaaaaccgcactgaaactgctcaggcagtacggttcgctggagagcgtcctggaacacgcgtcggaaatcgccggaaagctcggtgaaaatctgcgggcgcacgccgacgccgcccgattgagcaagcggctggcgacgatcgactgcgcggtaccgttgcagtcgggatgggactggctgcgcctcggcgaaccggaccgcgccgcgctcgcctcgctgttgcggcagctcgaattcaagtcgctgttgaaacggctcggactcgacggcacgtccgccgatgccgacgtcgacggcgtccgttcctccgcgcggccggcggacgagaaacggccgagggccgtcgccgtcgctgaggagggcgtcgacgtccgctgtccggatcgcccggaagaagtcgaagaagcgctgtcgcggctggaagccgcccagtcggtcgtcgtcgaggtgacgggcgacaacccgcacgacggcgaagtgcgcggcgtcgcatggtgggacggacatacggcgtatttcattccgtttgaacggctggtgcagtccgacatgcggccgctggccgactggctcgccgacgcgcgtcggccgaagcgtacgcacgactcccatcgcgctgaagtggcgctgttctggcacggccttgcgtttcgcggcacgtcgttctgcacgcatatcgccgcctatttgctcgaccccacggaatcgcgccatacgctggcggacctgtcgcgccgctacggtctgccgccggtaccggaagccgaggacgtttacggcaagggcgcgaagttcaaggttcccgatcgcgacacgctggcgcgttacgtcggccgcaaggccgccctagtcgcgcggctcgttccgctgctcgaggcggatttggcggcctgcggcatgcgttcgcttttttacgacctggagctgccgctttcatccgaactcgccgtcatggagacggtcggcgtccgcgtcgacgcggcggcgctcgccgcctacggcgaggaattgcgcgaggcggcggcgaaagtcgagcgggagatttacgagctggccgggacgacgttcaacatcggatcgacgaaacagctcggcgaaattttgttcgataagctggggctgcccgtcgtcaagaaaacgaaaaccggctattccaccgacgcagacgtgctggaggaactggcgccgtaccatccgatcgtcgaaaagattttgcattaccgccaactgacgaaattgcagtcgacctacatcgaggggcttttgaaagaaatccgtccgcaaaccggtaaaatccatacgtattatcagcagacgatcgcggcgacggggcggctgagcagtcagtttcccaatcttcagaacattccgatccgtctcgaagaggggcggaaaatccgcaaggcgttcgttccgtcagaaccgggatggctgatgctcgccgccgactattcgcagatcgaactgcgcgtgctcgcgcacgtttccggcgacgaacggctgaaggaagcgtttcggacaggcatggacatccacacgaagaccgcgatggacgtgttcggcgtttccgaagaccgcgtcgacgcgcgcatgcggcggcaggcgaaggcggtcaatttcggcatcatctacggcatcagcgatttcggactggcgcaaaacctgaacatttcccgcaaggaggcggcggagttcatccggcaatatttcgccgtcttttcgggcgtcaaggcgtaccgcgagcggatcgtcgagcaggcgcgccgcgacggttacgtgacgaccctgctcggtcgcaggcgctatttgccggacatcaacgcgtcgaattacaacctccgctcgaaagcggagcggacggcgatgaatacgccgatccagggcacggccgccgacatcatcaagaccgcgatggtgcgtctgacgcggcggatgcgcgacgtcggactgaagagccgcatgctgctgcaggttcacgacgagctcgtgtttgaagtgccgccggacgagctcgacgcgatgcgggagcttgtgacggacgtcatggagtcggcggtcccgctcgacgtgccgctgaaggtcgacgtcagctggggcgccgactggtacgcggcgaagtgagggaagcgggatcc

SEQ ID NO: 1314 - DNA, 2792 bp, Artificial Sequence
  Description of Artificial Sequence: Synthetic Caldibacillus cellulovorans CompA.2 DNA Polymerase F835M
atgaaatacctgctgccgaccgctgctgctggtctgctgctcctcgctgcccagccggcgatggccatgggcaaactgattctggtcgacggaaacagcgtcgccaaccgggcgttttacgccgtccggctgctcagcacgcgcggcggcctgcacacaaacgcggtgtacggattcgccaacatgttgctcaagctgatcgaggaggaacggccgacgcattttctcgtcgcgttcgacgcgggcaaggcgacgttccgtcatcgcgaatacgaggcctacaaggcgggtcgcctgcagacgccgcccgagctgtccgagcagtttccgtacatccgggagctcgtccgggcgttcggcgtcgcgtccggcgagctggaggaatacgaggcggacgacatgatcggtacgctggcgaaacgggcggaggccgagggcgtcgacacgctggtcgtcaccggcgaccgcgatttgctccagctcgtatcggaccgcgtgaccgtcgcgctgacgcgcaagggcatcacggaaacggagcggtacgacccggcgcgcatccgcgaggaatacggcttcgatcccgaccgcatccgcgacctcaaagggctgatgggcgacgcgtctgacaatcttcccggcgttcccggcgtcggtgagaaaaccgcactgaaactgctcaggcagtacggttcgctggagagcgtcctggaacacgcgtcggaaatcgccggaaagctcggtgaaaatctgcgggcgcacgccgacgccgcccgattgagcaagcggctggcgacgatcgactgcgcggtaccgttgcagtcgggatgggactggctgcgcctcggcgaaccggaccgcgccgcgctcgcctcgctgttgcggcagctcgaattcaagtcgctgttgaaacggctcggactcgacggcacgtccgccgatgccgacgtcgacggcgtccgttcctccgcgcggccggcggacgagaaacggccgagggccgtcgccgtcgctgaggagggcgtcgacgtccgctgtccggatcgcccggaagaagtcgaagaagcgctgtcgcggctggaagccgcccagtcggtcgtcgtcgaggtgacgggcgacaacccgcacgacggcgaagtgcgcggcgtcgcatggtgggacggacatacggcgtatttcattccgtttgaacggctggtgcagtccgacatgcggccgctggccgactggctcgccgacgcgcgtcggccgaagcgtacgcacgactcccatcgcgctgaagtggcgctgttctggcacggccttgcgtttcgcggcacgtcgttctgcacgcatatcgccgcctatttgctcgaccccacggaatcgcgccatacgctggcggacctgtcgcgccgctacggtctgccgccggtaccggaagccgaggacgtttacggcaagggcgcgaagttcaaggttcccgatcgcgacacgctggcgcgttacgtcggccgcaaggccgccctagtcgcgcggctcgttccgctgctcgaggcggatttggcggcctgcggcatgcgttcgcttttttacgacctggagctgccgctttcatccgaactcgccgtcatggagacggtcggcgtccgcgtcgacgcggcggcgctcgccgcctacggcgaggaattgcgcgaggcggcggcgaaagtcgagcgggagatttacgagctggccgggacgacgttcaacatcggatcgacgaaacagctcggcgaaattttgttcgataagctggggctgcccgtcgtcaagaaaacgaaaaccggctattccaccgacgcagacgtgctggaggaactggcgccgtaccatccgatcgtcgaaaagattttgcattaccgccaactgacgaaattgcagtcgacctacatcgaggggcttttgaaagaaatccgtccgcaaaccggtaaaatccatacgtattatcagcagacgatcgcggcgacggggcggctgagcagtcagtttcccaatcttcagaacattccgatccgtctcgaagaggggcggaaaatccgcaaggcgttcgttccgtcagaaccgggatggctgatgctcgccgccgactattcgcagatcgaactgcgcgtgctcgcgcacgtttccggcgacgaacggctgaaggaagcgtttcggacaggcatggacatccacacgaagaccgcgatggacgtgttcggcgtttccgaagaccgcgtcgacgcgcgcatgcggcggcaggcgaaggcggtcaatttcggcatcatctacggcatcagcgatttcggactggcgcaaaacctgaacatttcccgcaaggaggcggcggagttcatccggcaatatttcgccgtcttttcgggcgtcaaggcgtaccgcgagcggatcgtcgagcaggcgcgccgcgacggttacgtgacgaccctgctcggtcgcaggcgctatttgccggacatcaacgcgtcgaattacaacctccgctcgatggcggagcggacggcgatgaatacgccgatccagggcacggccgccgacatcatcaagaccgcgatggtgcgtctgacgcggcggatgcgcgacgtcggactgaagagccgcatgctgctgcaggttcacgacgagctcgtgtttgaagtgccgccggacgagctcgacgcgatgcgggagcttgtgacggacgtcatggagtcggcggtcccgctcgacgtgccgctgaaggtcgacgtcagctggggcgccgactggtacgcggcgaagtgagggaagcgggatcc

SEQ ID NO: 1315 - DNA, 2792 bp, Artificial Sequence
  Description of Artificial Sequence: Synthetic Caldibacillus cellulovorans CompA.2 DNA Polymerase F835P
atgaaatacctgctgccgaccgctgctgctggtctgctgctcctcgctgcccagccggcgatggccatgggcaaactgattctggtcgacggaaacagcgtcgccaaccgggcgttttacgccgtccggctgctcagcacgcgcggcggcctgcacacaaacgcggtgtacggattcgccaacatgttgctcaagctgatcgaggaggaacggccgacgcattttctcgtcgcgttcgacgcgggcaaggcgacgttccgtcatcgcgaatacgaggcctacaaggcgggtcgcctgcagacgccgcccgagctgtccgagcagtttccgtacatccgggagctcgtccgggcgttcggcgtcgcgtccggcgagctggaggaatacgaggcggacgacatgatcggtacgctggcgaaacgggcggaggccgagggcgtcgacacgctggtcgtcaccggcgaccgcgatttgctccagctcgtatcggaccgcgtgaccgtcgcgctgacgcgcaagggcatcacggaaacggagcggtacgacccggcgcgcatccgcgaggaatacggcttcgatcccgaccgcatccgcgacctcaaagggctgatgggcgacgcgtctgacaatcttcccggcgttcccggcgtcggtgagaaaaccgcactgaaactgctcaggcagtacggttcgctggagagcgtcctggaacacgcgtcggaaatcgccggaaagctcggtgaaaatctgcgggcgcacgccgacgccgcccgattgagcaagcggctggcgacgatcgactgcgcggtaccgttgcagtcgggatgggactggctgcgcctcggcgaaccggaccgcgccgcgctcgcctcgctgttgcggcagctcgaattcaagtcgctgttgaaacggctcggactcgacggcacgtccgccgatgccgacgtcgacggcgtccgttcctccgcgcggccggcggacgagaaacggccgagggccgtcgccgtcgctgaggagggcgtcgacgtccgctgtccggatcgcccggaagaagtcgaagaagcgctgtcgcggctggaagccgcccagtcggtcgtcgtcgaggtgacgggcgacaacccgcacgacggcgaagtgcgcggcgtcgcatggtgggacggacatacggcgtatttcattccgtttgaacggctggtgcagtccgacatgcggccgctggccgactggctcgccgacgcgcgtcggccgaagcgtacgcacgactcccatcgcgctgaagtggcgctgttctggcacggccttgcgtttcgcggcacgtcgttctgcacgcatatcgccgcctatttgctcgaccccacggaatcgcgccatacgctggcggacctgtcgcgccgctacggtctgccgccggtaccggaagccgaggacgtttacggcaagggcgcgaagttcaaggttcccgatcgcgacacgctggcgcgttacgtcggccgcaaggccgccctagtcgcgcggctcgttccgctgctcgaggcggatttggcggcctgcggcatgcgttcgcttttttacgacctggagctgccgctttcatccgaactcgccgtcatggagacggtcggcgtccgcgtcgacgcggcggcgctcgccgcctacggcgaggaattgcgcgaggcggcggcgaaagtcgagcgggagatttacgagctggccgggacgacgttcaacatcggatcgacgaaacagctcggcgaaattttgttcgataagctggggctgcccgtcgtcaagaaaacgaaaaccggctattccaccgacgcagacgtgctggaggaactggcgccgtaccatccgatcgtcgaaaagattttgcattaccgccaactgacgaaattgcagtcgacctacatcgaggggcttttgaaagaaatccgtccgcaaaccggtaaaatccatacgtattatcagcagacgatcgcggcgacggggcggctgagcagtcagtttcccaatcttcagaacattccgatccgtctcgaagaggggcggaaaatccgcaaggcgttcgttccgtcagaaccgggatggctgatgctcgccgccgactattcgcagatcgaactgcgcgtgctcgcgcacgtttccggcgacgaacggctgaaggaagcgtttcggacaggcatggacatccacacgaagaccgcgatggacgtgttcggcgtttccgaagaccgcgtcgacgcgcgcatgcggcggcaggcgaaggcggtcaatttcggcatcatctacggcatcagcgatttcggactggcgcaaaacctgaacatttcccgcaaggaggcggcggagttcatccggcaatatttcgccgtcttttcgggcgtcaaggcgtaccgcgagcggatcgtcgagcaggcgcgccgcgacggttacgtgacgaccctgctcggtcgcaggcgctatttgccggacatcaacgcgtcgaattacaacctccgctcgcctgcggagcggacggcgatgaatacgccgatccagggcacggccgccgacatcatcaagaccgcgatggtgcgtctgacgcggcggatgcgcgacgtcggactgaagagccgcatgctgctgcaggttcacgacgagctcgtgtttgaagtgccgccggacgagctcgacgcgatgcgggagcttgtgacggacgtcatggagtcggcggtcccgctcgacgtgccgctgaaggtcgacgtcagctggggcgccgactggtacgcggcgaagtgagggaagcgggatcc

SEQ ID NO: 1316 - DNA, 2792 bp, Artificial Sequence
  Description of Artificial Sequence: Synthetic Caldibacillus cellulovorans CompA.2 DNA Polymerase F835S
atgaaatacctgctgccgaccgctgctgctggtctgctgctcctcgctgcccagccggcgatggccatgggcaaactgattctggtcgacggaaacagcgtcgccaaccgggcgttttacgccgtccggctgctcagcacgcgcggcggcctgcacacaaacgcggtgtacggattcgccaacatgttgctcaagctgatcgaggaggaacggccgacgcattttctcgtcgcgttcgacgcgggcaaggcgacgttccgtcatcgcgaatacgaggcctacaaggcgggtcgcctgcagacgccgcccgagctgtccgagcagtttccgtacatccgggagctcgtccgggcgttcggcgtcgcgtccggcgagctggaggaatacgaggcggacgacatgatcggtacgctggcgaaacgggcggaggccgagggcgtcgacacgctggtcgtcaccggcgaccgcgatttgctccagctcgtatcggaccgcgtgaccgtcgcgctgacgcgcaagggcatcacggaaacggagcggtacgacccggcgcgcatccgcgaggaatacggcttcgatcccgaccgcatccgcgacctcaaagggctgatgggcgacgcgtctgacaatcttcccggcgttcccggcgtcggtgagaaaaccgcactgaaactgctcaggcagtacggttcgctggagagcgtcctggaacacgcgtcggaaatcgccggaaagctcggtgaaaatctgcgggcgcacgccgacgccgcccgattgagcaagcggctggcgacgatcgactgcgcggtaccgttgcagtcgggatgggactggctgcgcctcggcgaaccggaccgcgccgcgctcgcctcgctgttgcggcagctcgaattcaagtcgctgttgaaacggctcggactcgacggcacgtccgccgatgccgacgtcgacggcgtccgttcctccgcgcggccggcggacgagaaacggccgagggccgtcgccgtcgctgaggagggcgtcgacgtccgctgtccggatcgcccggaagaagtcgaagaagcgctgtcgcggctggaagccgcccagtcggtcgtcgtcgaggtgacgggcgacaacccgcacgacggcgaagtgcgcggcgtcgcatggtgggacggacatacggcgtatttcattccgtttgaacggctggtgcagtccgacatgcggccgctggccgactggctcgccgacgcgcgtcggccgaagcgtacgcacgactcccatcgcgctgaagtggcgctgttctggcacggccttgcgtttcgcggcacgtcgttctgcacgcatatcgccgcctatttgctcgaccccacggaatcgcgccatacgctggcggacctgtcgcgccgctacggtctgccgccggtaccggaagccgaggacgtttacggcaagggcgcgaagttcaaggttcccgatcgcgacacgctggcgcgttacgtcggccgcaaggccgccctagtcgcgcggctcgttccgctgctcgaggcggatttggcggcctgcggcatgcgttcgcttttttacgacctggagctgccgctttcatccgaactcgccgtcatggagacggtcggcgtccgcgtcgacgcggcggcgctcgccgcctacggcgaggaattgcgcgaggcggcggcgaaagtcgagcgggagatttacgagctggccgggacgacgttcaacatcggatcgacgaaacagctcggcgaaattttgttcgataagctggggctgcccgtcgtcaagaaaacgaaaaccggctattccaccgacgcagacgtgctggaggaactggcgccgtaccatccgatcgtcgaaaagattttgcattaccgccaactgacgaaattgcagtcgacctacatcgaggggcttttgaaagaaatccgtccgcaaaccggtaaaatccatacgtattatcagcagacgatcgcggcgacggggcggctgagcagtcagtttcccaatcttcagaacattccgatccgtctcgaagaggggcggaaaatccgcaaggcgttcgttccgtcagaaccgggatggctgatgctcgccgccgactattcgcagatcgaactgcgcgtgctcgcgcacgtttccggcgacgaacggctgaaggaagcgtttcggacaggcatggacatccacacgaagaccgcgatggacgtgttcggcgtttccgaagaccgcgtcgacgcgcgcatgcggcggcaggcgaaggcggtcaatttcggcatcatctacggcatcagcgatttcggactggcgcaaaacctgaacatttcccgcaaggaggcggcggagttcatccggcaatatttcgccgtcttttcgggcgtcaaggcgtaccgcgagcggatcgtcgagcaggcgcgccgcgacggttacgtgacgaccctgctcggtcgcaggcgctatttgccggacatcaacgcgtcgaattacaacctccgctcgtctgcggagcggacggcgatgaatacgccgatccagggcacggccgccgacatcatcaagaccgcgatggtgcgtctgacgcggcggatgcgcgacgtcggactgaagagccgcatgctgctgcaggttcacgacgagctcgtgtttgaagtgccgccggacgagctcgacgcgatgcgggagcttgtgacggacgtcatggagtcggcggtcccgctcgacgtgccgctgaaggtcgacgtcagctggggcgccgactggtacgcggcgaagtgagggaagcgggatcc

SEQ ID NO: 1317 - DNA, 2792 bp, Artificial Sequence
  Description of Artificial Sequence: Synthetic Caldibacillus cellulovorans CompA.2 DNA Polymerase F835T
atgaaatacctgctgccgaccgctgctgctggtctgctgctcctcgctgcccagccggcgatggccatgggcaaactgattctggtcgacggaaacagcgtcgccaaccgggcgttttacgccgtccggctgctcagcacgcgcggcggcctgcacacaaacgcggtgtacggattcgccaacatgttgctcaagctgatcgaggaggaacggccgacgcattttctcgtcgcgttcgacgcgggcaaggcgacgttccgtcatcgcgaatacgaggcctacaaggcgggtcgcctgcagacgccgcccgagctgtccgagcagtttccgtacatccgggagctcgtccgggcgttcggcgtcgcgtccggcgagctggaggaatacgaggcggacgacatgatcggtacgctggcgaaacgggcggaggccgagggcgtcgacacgctggtcgtcaccggcgaccgcgatttgctccagctcgtatcggaccgcgtgaccgtcgcgctgacgcgcaagggcatcacggaaacggagcggtacgacccggcgcgcatccgcgaggaatacggcttcgatcccgaccgcatccgcgacctcaaagggctgatgggcgacgcgtctgacaatcttcccggcgttcccggcgtcggtgagaaaaccgcactgaaactgctcaggcagtacggttcgctggagagcgtcctggaacacgcgtcggaaatcgccggaaagctcggtgaaaatctgcgggcgcacgccgacgccgcccgattgagcaagcggctggcgacgatcgactgcgcggtaccgttgcagtcgggatgggactggctgcgcctcggcgaaccggaccgcgccgcgctcgcctcgctgttgcggcagctcgaattcaagtcgctgttgaaacggctcggactcgacggcacgtccgccgatgccgacgtcgacggcgtccgttcctccgcgcggccggcggacgagaaacggccgagggccgtcgccgtcgctgaggagggcgtcgacgtccgctgtccggatcgcccggaagaagtcgaagaagcgctgtcgcggctggaagccgcccagtcggtcgtcgtcgaggtgacgggcgacaacccgcacgacggcgaagtgcgcggcgtcgcatggtgggacggacatacggcgtatttcattccgtttgaacggctggtgcagtccgacatgcggccgctggccgactggctcgccgacgcgcgtcggccgaagcgtacgcacgactcccatcgcgctgaagtggcgctgttctggcacggccttgcgtttcgcggcacgtcgttctgcacgcatatcgccgcctatttgctcgaccccacggaatcgcgccatacgctggcggacctgtcgcgccgctacggtctgccgccggtaccggaagccgaggacgtttacggcaagggcgcgaagttcaaggttcccgatcgcgacacgctggcgcgttacgtcggccgcaaggccgccctagtcgcgcggctcgttccgctgctcgaggcggatttggcggcctgcggcatgcgttcgcttttttacgacctggagctgccgctttcatccgaactcgccgtcatggagacggtcggcgtccgcgtcgacgcggcggcgctcgccgcctacggcgaggaattgcgcgaggcggcggcgaaagtcgagcgggagatttacgagctggccgggacgacgttcaacatcggatcgacgaaacagctcggcgaaattttgttcgataagctggggctgcccgtcgtcaagaaaacgaaaaccggctattccaccgacgcagacgtgctggaggaactggcgccgtaccatccgatcgtcgaaaagattttgcattaccgccaactgacgaaattgcagtcgacctacatcgaggggcttttgaaagaaatccgtccgcaaaccggtaaaatccatacgtattatcagcagacgatcgcggcgacggggcggctgagcagtcagtttcccaatcttcagaacattccgatccgtctcgaagaggggcggaaaatccgcaaggcgttcgttccgtcagaaccgggatggctgatgctcgccgccgactattcgcagatcgaactgcgcgtgctcgcgcacgtttccggcgacgaacggctgaaggaagcgtttcggacaggcatggacatccacacgaagaccgcgatggacgtgttcggcgtttccgaagaccgcgtcgacgcgcgcatgcggcggcaggcgaaggcggtcaatttcggcatcatctacggcatcagcgatttcggactggcgcaaaacctgaacatttcccgcaaggaggcggcggagttcatccggcaatatttcgccgtcttttcgggcgtcaaggcgtaccgcgagcggatcgtcgagcaggcgcgccgcgacggttacgtgacgaccctgctcggtcgcaggcgctatttgccggacatcaacgcgtcgaattacaacctccgctcgactgcggagcggacggcgatgaatacgccgatccagggcacggccgccgacatcatcaagaccgcgatggtgcgtctgacgcggcggatgcgcgacgtcggactgaagagccgcatgctgctgcaggttcacgacgagctcgtgtttgaagtgccgccggacgagctcgacgcgatgcgggagcttgtgacggacgtcatggagtcggcggtcccgctcgacgtgccgctgaaggtcgacgtcagctggggcgccgactggtacgcggcgaagtgagggaagcgggatcc

SEQ ID NO: 1318 - DNA, 2792 bp, Artificial Sequence
  Description of Artificial Sequence: Synthetic Caldibacillus cellulovorans CompA.2 DNA Polymerase F835W
atgaaatacctgctgccgaccgctgctgctggtctgctgctcctcgctgcccagccggcgatggccatgggcaaactgattctggtcgacggaaacagcgtcgccaaccgggcgttttacgccgtccggctgctcagcacgcgcggcggcctgcacacaaacgcggtgtacggattcgccaacatgttgctcaagctgatcgaggaggaacggccgacgcattttctcgtcgcgttcgacgcgggcaaggcgacgttccgtcatcgcgaatacgaggcctacaaggcgggtcgcctgcagacgccgcccgagctgtccgagcagtttccgtacatccgggagctcgtccgggcgttcggcgtcgcgtccggcgagctggaggaatacgaggcggacgacatgatcggtacgctggcgaaacgggcggaggccgagggcgtcgacacgctggtcgtcaccggcgaccgcgatttgctccagctcgtatcggaccgcgtgaccgtcgcgctgacgcgcaagggcatcacggaaacggagcggtacgacccggcgcgcatccgcgaggaatacggcttcgatcccgaccgcatccgcgacctcaaagggctgatgggcgacgcgtctgacaatcttcccggcgttcccggcgtcggtgagaaaaccgcactgaaactgctcaggcagtacggttcgctggagagcgtcctggaacacgcgtcggaaatcgccggaaagctcggtgaaaatctgcgggcgcacgccgacgccgcccgattgagcaagcggctggcgacgatcgactgcgcggtaccgttgcagtcgggatgggactggctgcgcctcggcgaaccggaccgcgccgcgctcgcctcgctgttgcggcagctcgaattcaagtcgctgttgaaacggctcggactcgacggcacgtccgccgatgccgacgtcgacggcgtccgttcctccgcgcggccggcggacgagaaacggccgagggccgtcgccgtcgctgaggagggcgtcgacgtccgctgtccggatcgcccggaagaagtcgaagaagcgctgtcgcggctggaagccgcccagtcggtcgtcgtcgaggtgacgggcgacaacccgcacgacggcgaagtgcgcggcgtcgcatggtgggacggacatacggcgtatttcattccgtttgaacggctggtgcagtccgacatgcggccgctggccgactggctcgccgacgcgcgtcggccgaagcgtacgcacgactcccatcgcgctgaagtggcgctgttctggcacggccttgcgtttcgcggcacgtcgttctgcacgcatatcgccgcctatttgctcgaccccacggaatcgcgccatacgctggcggacctgtcgcgccgctacggtctgccgccggtaccggaagccgaggacgtttacggcaagggcgcgaagttcaaggttcccgatcgcgacacgctggcgcgttacgtcggccgcaaggccgccctagtcgcgcggctcgttccgctgctcgaggcggatttggcggcctgcggcatgcgttcgcttttttacgacctggagctgccgctttcatccgaactcgccgtcatggagacggtcggcgtccgcgtcgacgcggcggcgctcgccgcctacggcgaggaattgcgcgaggcggcggcgaaagtcgagcgggagatttacgagctggccgggacgacgttcaacatcggatcgacgaaacagctcggcgaaattttgttcgataagctggggctgcccgtcgtcaagaaaacgaaaaccggctattccaccgacgcagacgtgctggaggaactggcgccgtaccatccgatcgtcgaaaagattttgcattaccgccaactgacgaaattgcagtcgacctacatcgaggggcttttgaaagaaatccgtccgcaaaccggtaaaatccatacgtattatcagcagacgatcgcggcgacggggcggctgagcagtcagtttcccaatcttcagaacattccgatccgtctcgaagaggggcggaaaatccgcaaggcgttcgttccgtcagaaccgggatggctgatgctcgccgccgactattcgcagatcgaactgcgcgtgctcgcgcacgtttccggcgacgaacggctgaaggaagcgtttcggacaggcatggacatccacacgaagaccgcgatggacgtgttcggcgtttccgaagaccgcgtcgacgcgcgcatgcggcggcaggcgaaggcggtcaatttcggcatcatctacggcatcagcgatttcggactggcgcaaaacctgaacatttcccgcaaggaggcggcggagttcatccggcaatatttcgccgtcttttcgggcgtcaaggcgtaccgcgagcggatcgtcgagcaggcgcgccgcgacggttacgtgacgaccctgctcggtcgcaggcgctatttgccggacatcaacgcgtcgaattacaacctccgctcgtgggcggagcggacggcgatgaatacgccgatccagggcacggccgccgacatcatcaagaccgcgatggtgcgtctgacgcggcggatgcgcgacgtcggactgaagagccgcatgctgctgcaggttcacgacgagctcgtgtttgaagtgccgccggacgagctcgacgcgatgcgggagcttgtgacggacgtcatggagtcggcggtcccgctcgacgtgccgctgaaggtcgacgtcagctggggcgccgactggtacgcggcgaagtgagggaagcgggatcc

SEQ ID NO: 1319 - DNA, 2792 bp, Artificial Sequence
  Description of Artificial Sequence: Synthetic Caldibacillus cellulovorans CompA.2 DNA Polymerase F835Y
atgaaatacctgctgccgaccgctgctgctggtctgctgctcctcgctgcccagccggcgatggccatgggcaaactgattctggtcgacggaaacagcgtcgccaaccgggcgttttacgccgtccggctgctcagcacgcgcggcggcctgcacacaaacgcggtgtacggattcgccaacatgttgctcaagctgatcgaggaggaacggccgacgcattttctcgtcgcgttcgacgcgggcaaggcgacgttccgtcatcgcgaatacgaggcctacaaggcgggtcgcctgcagacgccgcccgagctgtccgagcagtttccgtacatccgggagctcgtccgggcgttcggcgtcgcgtccggcgagctggaggaatacgaggcggacgacatgatcggtacgctggcgaaacgggcggaggccgagggcgtcgacacgctggtcgtcaccggcgaccgcgatttgctccagctcgtatcggaccgcgtgaccgtcgcgctgacgcgcaagggcatcacggaaacggagcggtacgacccggcgcgcatccgcgaggaatacggcttcgatcccgaccgcatccgcgacctcaaagggctgatgggcgacgcgtctgacaatcttcccggcgttcccggcgtcggtgagaaaaccgcactgaaactgctcaggcagtacggttcgctggagagcgtcctggaacacgcgtcggaaatcgccggaaagctcggtgaaaatctgcgggcgcacgccgacgccgcccgattgagcaagcggctggcgacgatcgactgcgcggtaccgttgcagtcgggatgggactggctgcgcctcggcgaaccggaccgcgccgcgctcgcctcgctgttgcggcagctcgaattcaagtcgctgttgaaacggctcggactcgacggcacgtccgccgatgccgacgtcgacggcgtccgttcctccgcgcggccggcggacgagaaacggccgagggccgtcgccgtcgctgaggagggcgtcgacgtccgctgtccggatcgcccggaagaagtcgaagaagcgctgtcgcggctggaagccgcccagtcggtcgtcgtcgaggtgacgggcgacaacccgcacgacggcgaagtgcgcggcgtcgcatggtgggacggacatacggcgtatttcattccgtttgaacggctggtgcagtccgacatgcggccgctggccgactggctcgccgacgcgcgtcggccgaagcgtacgcacgactcccatcgcgctgaagtggcgctgttctggcacggccttgcgtttcgcggcacgtcgttctgcacgcatatcgccgcctatttgctcgaccccacggaatcgcgccatacgctggcggacctgtcgcgccgctacggtctgccgccggtaccggaagccgaggacgtttacggcaagggcgcgaagttcaaggttcccgatcgcgacacgctggcgcgttacgtcggccgcaaggccgccctagtcgcgcggctcgttccgctgctcgaggcggatttggcggcctgcggcatgcgttcgcttttttacgacctggagctgccgctttcatccgaactcgccgtcatggagacggtcggcgtccgcgtcgacgcggcggcgctcgccgcctacggcgaggaattgcgcgaggcggcggcgaaagtcgagcgggagatttacgagctggccgggacgacgttcaacatcggatcgacgaaacagctcggcgaaattttgttcgataagctggggctgcccgtcgtcaagaaaacgaaaaccggctattccaccgacgcagacgtgctggaggaactggcgccgtaccatccgatcgtcgaaaagattttgcattaccgccaactgacgaaattgcagtcgacctacatcgaggggcttttgaaagaaatccgtccgcaaaccggtaaaatccatacgtattatcagcagacgatcgcggcgacggggcggctgagcagtcagtttcccaatcttcagaacattccgatccgtctcgaagaggggcggaaaatccgcaaggcgttcgttccgtcagaaccgggatggctgatgctcgccgccgactattcgcagatcgaactgcgcgtgctcgcgcacgtttccggcgacgaacggctgaaggaagcgtttcggacaggcatggacatccacacgaagaccgcgatggacgtgttcggcgtttccgaagaccgcgtcgacgcgcgcatgcggcggcaggcgaaggcggtcaatttcggcatcatctacggcatcagcgatttcggactggcgcaaaacctgaacatttcccgcaaggaggcggcggagttcatccggcaatatttcgccgtcttttcgggcgtcaaggcgtaccgcgagcggatcgtcgagcaggcgcgccgcgacggttacgtgacgaccctgctcggtcgcaggcgctatttgccggacatcaacgcgtcgaattacaacctccgctcgtatgcggagcggacggcgatgaatacgccgatccagggcacggccgccgacatcatcaagaccgcgatggtgcgtctgacgcggcggatgcgcgacgtcggactgaagagccgcatgctgctgcaggttcacgacgagctcgtgtttgaagtgccgccggacgagctcgacgcgatgcgggagcttgtgacggacgtcatggagtcggcggtcccgctcgacgtgccgctgaaggtcgacgtcagctggggcgccgactggtacgcggcgaagtgagggaagcgggatcc

SEQ ID NO: 1320 - DNA, 2792 bp, Artificial Sequence
  Description of Artificial Sequence: Synthetic Caldibacillus cellulovorans CompA.2 DNA Polymerase F835V
atgaaatacctgctgccgaccgctgctgctggtctgctgctcctcgctgcccagccggcgatggccatgggcaaactgattctggtcgacggaaacagcgtcgccaaccgggcgttttacgccgtccggctgctcagcacgcgcggcggcctgcacacaaacgcggtgtacggattcgccaacatgttgctcaagctgatcgaggaggaacggccgacgcattttctcgtcgcgttcgacgcgggcaaggcgacgttccgtcatcgcgaatacgaggcctacaaggcgggtcgcctgcagacgccgcccgagctgtccgagcagtttccgtacatccgggagctcgtccgggcgttcggcgtcgcgtccggcgagctggaggaatacgaggcggacgacatgatcggtacgctggcgaaacgggcggaggccgagggcgtcgacacgctggtcgtcaccggcgaccgcgatttgctccagctcgtatcggaccgcgtgaccgtcgcgctgacgcgcaagggcatcacggaaacggagcggtacgacccggcgcgcatccgcgaggaatacggcttcgatcccgaccgcatccgcgacctcaaagggctgatgggcgacgcgtctgacaatcttcccggcgttcccggcgtcggtgagaaaaccgcactgaaactgctcaggcagtacggttcgctggagagcgtcctggaacacgcgtcggaaatcgccggaaagctcggtgaaaatctgcgggcgcacgccgacgccgcccgattgagcaagcggctggcgacgatcgactgcgcggtaccgttgcagtcgggatgggactggctgcgcctcggcgaaccggaccgcgccgcgctcgcctcgctgttgcggcagctcgaattcaagtcgctgttgaaacggctcggactcgacggcacgtccgccgatgccgacgtcgacggcgtccgttcctccgcgcggccggcggacgagaaacggccgagggccgtcgccgtcgctgaggagggcgtcgacgtccgctgtccggatcgcccggaagaagtcgaagaagcgctgtcgcggctggaagccgcccagtcggtcgtcgtcgaggtgacgggcgacaacccgcacgacggcgaagtgcgcggcgtcgcatggtgggacggacatacggcgtatttcattccgtttgaacggctggtgcagtccgacatgcggccgctggccgactggctcgccgacgcgcgtcggccgaagcgtacgcacgactcccatcgcgctgaagtggcgctgttctggcacggccttgcgtttcgcggcacgtcgttctgcacgcatatcgccgcctatttgctcgaccccacggaatcgcgccatacgctggcggacctgtcgcgccgctacggtctgccgccggtaccggaagccgaggacgtttacggcaagggcgcgaagttcaaggttcccgatcgcgacacgctggcgcgttacgtcggccgcaaggccgccctagtcgcgcggctcgttccgctgctcgaggcggatttggcggcctgcggcatgcgttcgcttttttacgacctggagctgccgctttcatccgaactcgccgtcatggagacggtcggcgtccgcgtcgacgcggcggcgctcgccgcctacggcgaggaattgcgcgaggcggcggcgaaagtcgagcgggagatttacgagctggccgggacgacgttcaacatcggatcgacgaaacagctcggcgaaattttgttcgataagctggggctgcccgtcgtcaagaaaacgaaaaccggctattccaccgacgcagacgtgctggaggaactggcgccgtaccatccgatcgtcgaaaagattttgcattaccgccaactgacgaaattgcagtcgacctacatcgaggggcttttgaaagaaatccgtccgcaaaccggtaaaatccatacgtattatcagcagacgatcgcggcgacggggcggctgagcagtcagtttcccaatcttcagaacattccgatccgtctcgaagaggggcggaaaatccgcaaggcgttcgttccgtcagaaccgggatggctgatgctcgccgccgactattcgcagatcgaactgcgcgtgctcgcgcacgtttccggcgacgaacggctgaaggaagcgtttcggacaggcatggacatccacacgaagaccgcgatggacgtgttcggcgtttccgaagaccgcgtcgacgcgcgcatgcggcggcaggcgaaggcggtcaatttcggcatcatctacggcatcagcgatttcggactggcgcaaaacctgaacatttcccgcaaggaggcggcggagttcatccggcaatatttcgccgtcttttcgggcgtcaaggcgtaccgcgagcggatcgtcgagcaggcgcgccgcgacggttacgtgacgaccctgctcggtcgcaggcgctatttgccggacatcaacgcgtcgaattacaacctccgctcggttgcggagcggacggcgatgaatacgccgatccagggcacggccgccgacatcatcaagaccgcgatggtgcgtctgacgcggcggatgcgcgacgtcggactgaagagccgcatgctgctgcaggttcacgacgagctcgtgtttgaagtgccgccggacgagctcgacgcgatgcgggagcttgtgacggacgtcatggagtcggcggtcccgctcgacgtgccgctgaaggtcgacgtcagctggggcgccgactggtacgcggcgaagtgagggaagcgggatcc

SEQ ID NO: 1321 - DNA, 2792 bp, Artificial Sequence
  Description of Artificial Sequence: Synthetic Caldibacillus cellulovorans CompA.2 DNA Polymerase A836R
atgaaatacctgctgccgaccgctgctgctggtctgctgctcctcgctgcccagccggcgatggccatgggcaaactgattctggtcgacggaaacagcgtcgccaaccgggcgttttacgccgtccggctgctcagcacgcgcggcggcctgcacacaaacgcggtgtacggattcgccaacatgttgctcaagctgatcgaggaggaacggccgacgcattttctcgtcgcgttcgacgcgggcaaggcgacgttccgtcatcgcgaatacgaggcctacaaggcgggtcgcctgcagacgccgcccgagctgtccgagcagtttccgtacatccgggagctcgtccgggcgttcggcgtcgcgtccggcgagctggaggaatacgaggcggacgacatgatcggtacgctggcgaaacgggcggaggccgagggcgtcgacacgctggtcgtcaccggcgaccgcgatttgctccagctcgtatcggaccgcgtgaccgtcgcgctgacgcgcaagggcatcacggaaacggagcggtacgacccggcgcgcatccgcgaggaatacggcttcgatcccgaccgcatccgcgacctcaaagggctgatgggcgacgcgtctgacaatcttcccggcgttcccggcgtcggtgagaaaaccgcactgaaactgctcaggcagtacggttcgctggagagcgtcctggaacacgcgtcggaaatcgccggaaagctcggtgaaaatctgcgggcgcacgccgacgccgcccgattgagcaagcggctggcgacgatcgactgcgcggtaccgttgcagtcgggatgggactggctgcgcctcggcgaaccggaccgcgccgcgctcgcctcgctgttgcggcagctcgaattcaagtcgctgttgaaacggctcggactcgacggcacgtccgccgatgccgacgtcgacggcgtccgttcctccgcgcggccggcggacgagaaacggccgagggccgtcgccgtcgctgaggagggcgtcgacgtccgctgtccggatcgcccggaagaagtcgaagaagcgctgtcgcggctggaagccgcccagtcggtcgtcgtcgaggtgacgggcgacaacccgcacgacggcgaagtgcgcggcgtcgcatggtgggacggacatacggcgtatttcattccgtttgaacggctggtgcagtccgacatgcggccgctggccgactggctcgccgacgcgcgtcggccgaagcgtacgcacgactcccatcgcgctgaagtggcgctgttctggcacggccttgcgtttcgcggcacgtcgttctgcacgcatatcgccgcctatttgctcgaccccacggaatcgcgccatacgctggcggacctgtcgcgccgctacggtctgccgccggtaccggaagccgaggacgtttacggcaagggcgcgaagttcaaggttcccgatcgcgacacgctggcgcgttacgtcggccgcaaggccgccctagtcgcgcggctcgttccgctgctcgaggcggatttggcggcctgcggcatgcgttcgcttttttacgacctggagctgccgctttcatccgaactcgccgtcatggagacggtcggcgtccgcgtcgacgcggcggcgctcgccgcctacggcgaggaattgcgcgaggcggcggcgaaagtcgagcgggagatttacgagctggccgggacgacgttcaacatcggatcgacgaaacagctcggcgaaattttgttcgataagctggggctgcccgtcgtcaagaaaacgaaaaccggctattccaccgacgcagacgtgctggaggaactggcgccgtaccatccgatcgtcgaaaagattttgcattaccgccaactgacgaaattgcagtcgacctacatcgaggggcttttgaaagaaatccgtccgcaaaccggtaaaatccatacgtattatcagcagacgatcgcggcgacggggcggctgagcagtcagtttcccaatcttcagaacattccgatccgtctcgaagaggggcggaaaatccgcaaggcgttcgttccgtcagaaccgggatggctgatgctcgccgccgactattcgcagatcgaactgcgcgtgctcgcgcacgtttccggcgacgaacggctgaaggaagcgtttcggacaggcatggacatccacacgaagaccgcgatggacgtgttcggcgtttccgaagaccgcgtcgacgcgcgcatgcggcggcaggcgaaggcggtcaatttcggcatcatctacggcatcagcgatttcggactggcgcaaaacctgaacatttcccgcaaggaggcggcggagttcatccggcaatatttcgccgtcttttcgggcgtcaaggcgtaccgcgagcggatcgtcgagcaggcgcgccgcgacggttacgtgacgaccctgctcggtcgcaggcgctatttgccggacatcaacgcgtcgaattacaacctccgctcgttccgtgagcggacggcgatgaatacgccgatccagggcacggccgccgacatcatcaagaccgcgatggtgcgtctgacgcggcggatgcgcgacgtcggactgaagagccgcatgctgctgcaggttcacgacgagctcgtgtttgaagtgccgccggacgagctcgacgcgatgcgggagcttgtgacggacgtcatggagtcggcggtcccgctcgacgtgccgctgaaggtcgacgtcagctggggcgccgactggtacgcggcgaagtgagggaagcgggatcc

SEQ ID NO: 1322 - DNA, 2792 bp, Artificial Sequence
  Description of Artificial Sequence: Synthetic Caldibacillus cellulovorans CompA.2 DNA Polymerase A836N
atgaaatacctgctgccgaccgctgctgctggtctgctgctcctcgctgcccagccggcgatggccatgggcaaactgattctggtcgacggaaacagcgtcgccaaccgggcgttttacgccgtccggctgctcagcacgcgcggcggcctgcacacaaacgcggtgtacggattcgccaacatgttgctcaagctgatcgaggaggaacggccgacgcattttctcgtcgcgttcgacgcgggcaaggcgacgttccgtcatcgcgaatacgaggcctacaaggcgggtcgcctgcagacgccgcccgagctgtccgagcagtttccgtacatccgggagctcgtccgggcgttcggcgtcgcgtccggcgagctggaggaatacgaggcggacgacatgatcggtacgctggcgaaacgggcggaggccgagggcgtcgacacgctggtcgtcaccggcgaccgcgatttgctccagctcgtatcggaccgcgtgaccgtcgcgctgacgcgcaagggcatcacggaaacggagcggtacgacccggcgcgcatccgcgaggaatacggcttcgatcccgaccgcatccgcgacctcaaagggctgatgggcgacgcgtctgacaatcttcccggcgttcccggcgtcggtgagaaaaccgcactgaaactgctcaggcagtacggttcgctggagagcgtcctggaacacgcgtcggaaatcgccggaaagctcggtgaaaatctgcgggcgcacgccgacgccgcccgattgagcaagcggctggcgacgatcgactgcgcggtaccgttgcagtcgggatgggactggctgcgcctcggcgaaccggaccgcgccgcgctcgcctcgctgttgcggcagctcgaattcaagtcgctgttgaaacggctcggactcgacggcacgtccgccgatgccgacgtcgacggcgtccgttcctccgcgcggccggcggacgagaaacggccgagggccgtcgccgtcgctgaggagggcgtcgacgtccgctgtccggatcgcccggaagaagtcgaagaagcgctgtcgcggctggaagccgcccagtcggtcgtcgtcgaggtgacgggcgacaacccgcacgacggcgaagtgcgcggcgtcgcatggtgggacggacatacggcgtatttcattccgtttgaacggctggtgcagtccgacatgcggccgctggccgactggctcgccgacgcgcgtcggccgaagcgtacgcacgactcccatcgcgctgaagtggcgctgttctggcacggccttgcgtttcgcggcacgtcgttctgcacgcatatcgccgcctatttgctcgaccccacggaatcgcgccatacgctggcggacctgtcgcgccgctacggtctgccgccggtaccggaagccgaggacgtttacggcaagggcgcgaagttcaaggttcccgatcgcgacacgctggcgcgttacgtcggccgcaaggccgccctagtcgcgcggctcgttccgctgctcgaggcggatttggcggcctgcggcatgcgttcgcttttttacgacctggagctgccgctttcatccgaactcgccgtcatggagacggtcggcgtccgcgtcgacgcggcggcgctcgccgcctacggcgaggaattgcgcgaggcggcggcgaaagtcgagcgggagatttacgagctggccgggacgacgttcaacatcggatcgacgaaacagctcggcgaaattttgttcgataagctggggctgcccgtcgtcaagaaaacgaaaaccggctattccaccgacgcagacgtgctggaggaactggcgccgtaccatccgatcgtcgaaaagattttgcattaccgccaactgacgaaattgcagtcgacctacatcgaggggcttttgaaagaaatccgtccgcaaaccggtaaaatccatacgtattatcagcagacgatcgcggcgacggggcggctgagcagtcagtttcccaatcttcagaacattccgatccgtctcgaagaggggcggaaaatccgcaaggcgttcgttccgtcagaaccgggatggctgatgctcgccgccgactattcgcagatcgaactgcgcgtgctcgcgcacgtttccggcgacgaacggctgaaggaagcgtttcggacaggcatggacatccacacgaagaccgcgatggacgtgttcggcgtttccgaagaccgcgtcgacgcgcgcatgcggcggcaggcgaaggcggtcaatttcggcatcatctacggcatcagcgatttcggactggcgcaaaacctgaacatttcccgcaaggaggcggcggagttcatccggcaatatttcgccgtcttttcgggcgtcaaggcgtaccgcgagcggatcgtcgagcaggcgcgccgcgacggttacgtgacgaccctgctcggtcgcaggcgctatttgccggacatcaacgcgtcgaattacaacctccgctcgttcaatgagcggacggcgatgaatacgccgatccagggcacggccgccgacatcatcaagaccgcgatggtgcgtctgacgcggcggatgcgcgacgtcggactgaagagccgcatgctgctgcaggttcacgacgagctcgtgtttgaagtgccgccggacgagctcgacgcgatgcgggagcttgtgacggacgtcatggagtcggcggtcccgctcgacgtgccgctgaaggtcgacgtcagctggggcgccgactggtacgcggcgaagtgagggaagcgggatcc

SEQ ID NO: 1323 - DNA, 2792 bp, Artificial Sequence
  Description of Artificial Sequence: Synthetic Caldibacillus cellulovorans CompA.2 DNA Polymerase A836D
atgaaatacctgctgccgaccgctgctgctggtctgctgctcctcgctgcccagccggcgatggccatgggcaaactgattctggtcgacggaaacagcgtcgccaaccgggcgttttacgccgtccggctgctcagcacgcgcggcggcctgcacacaaacgcggtgtacggattcgccaacatgttgctcaagctgatcgaggaggaacggccgacgcattttctcgtcgcgttcgacgcgggcaaggcgacgttccgtcatcgcgaatacgaggcctacaaggcgggtcgcctgcagacgccgcccgagctgtccgagcagtttccgtacatccgggagctcgtccgggcgttcggcgtcgcgtccggcgagctggaggaatacgaggcggacgacatgatcggtacgctggcgaaacgggcggaggccgagggcgtcgacacgctggtcgtcaccggcgaccgcgatttgctccagctcgtatcggaccgcgtgaccgtcgcgctgacgcgcaagggcatcacggaaacggagcggtacgacccggcgcgcatccgcgaggaatacggcttcgatcccgaccgcatccgcgacctcaaagggctgatgggcgacgcgtctgacaatcttcccggcgttcccggcgtcggtgagaaaaccgcactgaaactgctcaggcagtacggttcgctggagagcgtcctggaacacgcgtcggaaatcgccggaaagctcggtgaaaatctgcgggcgcacgccgacgccgcccgattgagcaagcggctggcgacgatcgactgcgcggtaccgttgcagtcgggatgggactggctgcgcctcggcgaaccggaccgcgccgcgctcgcctcgctgttgcggcagctcgaattcaagtcgctgttgaaacggctcggactcgacggcacgtccgccgatgccgacgtcgacggcgtccgttcctccgcgcggccggcggacgagaaacggccgagggccgtcgccgtcgctgaggagggcgtcgacgtccgctgtccggatcgcccggaagaagtcgaagaagcgctgtcgcggctggaagccgcccagtcggtcgtcgtcgaggtgacgggcgacaacccgcacgacggcgaagtgcgcggcgtcgcatggtgggacggacatacggcgtatttcattccgtttgaacggctggtgcagtccgacatgcggccgctggccgactggctcgccgacgcgcgtcggccgaagcgtacgcacgactcccatcgcgctgaagtggcgctgttctggcacggccttgcgtttcgcggcacgtcgttctgcacgcatatcgccgcctatttgctcgaccccacggaatcgcgccatacgctggcggacctgtcgcgccgctacggtctgccgccggtaccggaagccgaggacgtttacggcaagggcgcgaagttcaaggttcccgatcgcgacacgctggcgcgttacgtcggccgcaaggccgccctagtcgcgcggctcgttccgctgctcgaggcggatttggcggcctgcggcatgcgttcgcttttttacgacctggagctgccgctttcatccgaactcgccgtcatggagacggtcggcgtccgcgtcgacgcggcggcgctcgccgcctacggcgaggaattgcgcgaggcggcggcgaaagtcgagcgggagatttacgagctggccgggacgacgttcaacatcggatcgacgaaacagctcggcgaaattttgttcgataagctggggctgcccgtcgtcaagaaaacgaaaaccggctattccaccgacgcagacgtgctggaggaactggcgccgtaccatccgatcgtcgaaaagattttgcattaccgccaactgacgaaattgcagtcgacctacatcgaggggcttttgaaagaaatccgtccgcaaaccggtaaaatccatacgtattatcagcagacgatcgcggcgacggggcggctgagcagtcagtttcccaatcttcagaacattccgatccgtctcgaagaggggcggaaaatccgcaaggcgttcgttccgtcagaaccgggatggctgatgctcgccgccgactattcgcagatcgaactgcgcgtgctcgcgcacgtttccggcgacgaacggctgaaggaagcgtttcggacaggcatggacatccacacgaagaccgcgatggacgtgttcggcgtttccgaagaccgcgtcgacgcgcgcatgcggcggcaggcgaaggcggtcaatttcggcatcatctacggcatcagcgatttcggactggcgcaaaacctgaacatttcccgcaaggaggcggcggagttcatccggcaatatttcgccgtcttttcgggcgtcaaggcgtaccgcgagcggatcgtcgagcaggcgcgccgcgacggttacgtgacgaccctgctcggtcgcaggcgctatttgccggacatcaacgcgtcgaattacaacctccgctcgttcgatgagcggacggcgatgaatacgccgatccagggcacggccgccgacatcatcaagaccgcgatggtgcgtctgacgcggcggatgcgcgacgtcggactgaagagccgcatgctgctgcaggttcacgacgagctcgtgtttgaagtgccgccggacgagctcgacgcgatgcgggagcttgtgacggacgtcatggagtcggcggtcccgctcgacgtgccgctgaaggtcgacgtcagctggggcgccgactggtacgcggcgaagtgagggaagcgggatcc

SEQ ID NO: 1324 - DNA, 2792 bp, Artificial Sequence
  Description of Artificial Sequence: Synthetic Caldibacillus cellulovorans CompA.2 DNA Polymerase A836C
atgaaatacctgctgccgaccgctgctgctggtctgctgctcctcgctgcccagccggcgatggccatgggcaaactgattctggtcgacggaaacagcgtcgccaaccgggcgttttacgccgtccggctgctcagcacgcgcggcggcctgcacacaaacgcggtgtacggattcgccaacatgttgctcaagctgatcgaggaggaacggccgacgcattttctcgtcgcgttcgacgcgggcaaggcgacgttccgtcatcgcgaatacgaggcctacaaggcgggtcgcctgcagacgccgcccgagctgtccgagcagtttccgtacatccgggagctcgtccgggcgttcggcgtcgcgtccggcgagctggaggaatacgaggcggacgacatgatcggtacgctggcgaaacgggcggaggccgagggcgtcgacacgctggtcgtcaccggcgaccgcgatttgctccagctcgtatcggaccgcgtgaccgtcgcgctgacgcgcaagggcatcacggaaacggagcggtacgacccggcgcgcatccgcgaggaatacggcttcgatcccgaccgcatccgcgacctcaaagggctgatgggcgacgcgtctgacaatcttcccggcgttcccggcgtcggtgagaaaaccgcactgaaactgctcaggcagtacggttcgctggagagcgtcctggaacacgcgtcggaaatcgccggaaagctcggtgaaaatctgcgggcgcacgccgacgccgcccgattgagcaagcggctggcgacgatcgactgcgcggtaccgttgcagtcgggatgggactggctgcgcctcggcgaaccggaccgcgccgcgctcgcctcgctgttgcggcagctcgaattcaagtcgctgttgaaacggctcggactcgacggcacgtccgccgatgccgacgtcgacggcgtccgttcctccgcgcggccggcggacgagaaacggccgagggccgtcgccgtcgctgaggagggcgtcgacgtccgctgtccggatcgcccggaagaagtcgaagaagcgctgtcgcggctggaagccgcccagtcggtcgtcgtcgaggtgacgggcgacaacccgcacgacggcgaagtgcgcggcgtcgcatggtgggacggacatacggcgtatttcattccgtttgaacggctggtgcagtccgacatgcggccgctggccgactggctcgccgacgcgcgtcggccgaagcgtacgcacgactcccatcgcgctgaagtggcgctgttctggcacggccttgcgtttcgcggcacgtcgttctgcacgcatatcgccgcctatttgctcgaccccacggaatcgcgccatacgctggcggacctgtcgcgccgctacggtctgccgccggtaccggaagccgaggacgtttacggcaagggcgcgaagttcaaggttcccgatcgcgacacgctggcgcgttacgtcggccgcaaggccgccctagtcgcgcggctcgttccgctgctcgaggcggatttggcggcctgcggcatgcgttcgcttttttacgacctggagctgccgctttcatccgaactcgccgtcatggagacggtcggcgtccgcgtcgacgcggcggcgctcgccgcctacggcgaggaattgcgcgaggcggcggcgaaagtcgagcgggagatttacgagctggccgggacgacgttcaacatcggatcgacgaaacagctcggcgaaattttgttcgataagctggggctgcccgtcgtcaagaaaacgaaaaccggctattccaccgacgcagacgtgctggaggaactggcgccgtaccatccgatcgtcgaaaagattttgcattaccgccaactgacgaaattgcagtcgacctacatcgaggggcttttgaaagaaatccgtccgcaaaccggtaaaatccatacgtattatcagcagacgatcgcggcgacggggcggctgagcagtcagtttcccaatcttcagaacattccgatccgtctcgaagaggggcggaaaatccgcaaggcgttcgttccgtcagaaccgggatggctgatgctcgccgccgactattcgcagatcgaactgcgcgtgctcgcgcacgtttccggcgacgaacggctgaaggaagcgtttcggacaggcatggacatccacacgaagaccgcgatggacgtgttcggcgtttccgaagaccgcgtcgacgcgcgcatgcggcggcaggcgaaggcggtcaatttcggcatcatctacggcatcagcgatttcggactggcgcaaaacctgaacatttcccgcaaggaggcggcggagttcatccggcaatatttcgccgtcttttcgggcgtcaaggcgtaccgcgagcggatcgtcgagcaggcgcgccgcgacggttacgtgacgaccctgctcggtcgcaggcgctatttgccggacatcaacgcgtcgaattacaacctccgctcgttctgtgagcggacggcgatgaatacgccgatccagggcacggccgccgacatcatcaagaccgcgatggtgcgtctgacgcggcggatgcgcgacgtcggactgaagagccgcatgctgctgcaggttcacgacgagctcgtgtttgaagtgccgccggacgagctcgacgcgatgcgggagcttgtgacggacgtcatggagtcggcggtcccgctcgacgtgccgctgaaggtcgacgtcagctggggcgccgactggtacgcggcgaagtgagggaagcgggatcc

SEQ ID NO: 1325 - DNA, 2792 bp, Artificial Sequence
  Description of Artificial Sequence: Synthetic Caldibacillus cellulovorans CompA.2 DNA Polymerase A836E
atgaaatacctgctgccgaccgctgctgctggtctgctgctcctcgctgcccagccggcgatggccatgggcaaactgattctggtcgacggaaacagcgtcgccaaccgggcgttttacgccgtccggctgctcagcacgcgcggcggcctgcacacaaacgcggtgtacggattcgccaacatgttgctcaagctgatcgaggaggaacggccgacgcattttctcgtcgcgttcgacgcgggcaaggcgacgttccgtcatcgcgaatacgaggcctacaaggcgggtcgcctgcagacgccgcccgagctgtccgagcagtttccgtacatccgggagctcgtccgggcgttcggcgtcgcgtccggcgagctggaggaatacgaggcggacgacatgatcggtacgctggcgaaacgggcggaggccgagggcgtcgacacgctggtcgtcaccggcgaccgcgatttgctccagctcgtatcggaccgcgtgaccgtcgcgctgacgcgcaagggcatcacggaaacggagcggtacgacccggcgcgcatccgcgaggaatacggcttcgatcccgaccgcatccgcgacctcaaagggctgatgggcgacgcgtctgacaatcttcccggcgttcccggcgtcggtgagaaaaccgcactgaaactgctcaggcagtacggttcgctggagagcgtcctggaacacgcgtcggaaatcgccggaaagctcggtgaaaatctgcgggcgcacgccgacgccgcccgattgagcaagcggctggcgacgatcgactgcgcggtaccgttgcagtcgggatgggactggctgcgcctcggcgaaccggaccgcgccgcgctcgcctcgctgttgcggcagctcgaattcaagtcgctgttgaaacggctcggactcgacggcacgtccgccgatgccgacgtcgacggcgtccgttcctccgcgcggccggcggacgagaaacggccgagggccgtcgccgtcgctgaggagggcgtcgacgtccgctgtccggatcgcccggaagaagtcgaagaagcgctgtcgcggctggaagccgcccagtcggtcgtcgtcgaggtgacgggcgacaacccgcacgacggcgaagtgcgcggcgtcgcatggtgggacggacatacggcgtatttcattccgtttgaacggctggtgcagtccgacatgcggccgctggccgactggctcgccgacgcgcgtcggccgaagcgtacgcacgactcccatcgcgctgaagtggcgctgttctggcacggccttgcgtttcgcggcacgtcgttctgcacgcatatcgccgcctatttgctcgaccccacggaatcgcgccatacgctggcggacctgtcgcgccgctacggtctgccgccggtaccggaagccgaggacgtttacggcaagggcgcgaagttcaaggttcccgatcgcgacacgctggcgcgttacgtcggccgcaaggccgccctagtcgcgcggctcgttccgctgctcgaggcggatttggcggcctgcggcatgcgttcgcttttttacgacctggagctgccgctttcatccgaactcgccgtcatggagacggtcggcgtccgcgtcgacgcggcggcgctcgccgcctacggcgaggaattgcgcgaggcggcggcgaaagtcgagcgggagatttacgagctggccgggacgacgttcaacatcggatcgacgaaacagctcggcgaaattttgttcgataagctggggctgcccgtcgtcaagaaaacgaaaaccggctattccaccgacgcagacgtgctggaggaactggcgccgtaccatccgatcgtcgaaaagattttgcattaccgccaactgacgaaattgcagtcgacctacatcgaggggcttttgaaagaaatccgtccgcaaaccggtaaaatccatacgtattatcagcagacgatcgcggcgacggggcggctgagcagtcagtttcccaatcttcagaacattccgatccgtctcgaagaggggcggaaaatccgcaaggcgttcgttccgtcagaaccgggatggctgatgctcgccgccgactattcgcagatcgaactgcgcgtgctcgcgcacgtttccggcgacgaacggctgaaggaagcgtttcggacaggcatggacatccacacgaagaccgcgatggacgtgttcggcgtttccgaagaccgcgtcgacgcgcgcatgcggcggcaggcgaaggcggtcaatttcggcatcatctacggcatcagcgatttcggactggcgcaaaacctgaacatttcccgcaaggaggcggcggagttcatccggcaatatttcgccgtcttttcgggcgtcaaggcgtaccgcgagcggatcgtcgagcaggcgcgccgcgacggttacgtgacgaccctgctcggtcgcaggcgctatttgccggacatcaacgcgtcgaattacaacctccgctcgttcgaagagcggacggcgatgaatacgccgatccagggcacggccgccgacatcatcaagaccgcgatggtgcgtctgacgcggcggatgcgcgacgtcggactgaagagccgcatgctgctgcaggttcacgacgagctcgtgtttgaagtgccgccggacgagctcgacgcgatgcgggagcttgtgacggacgtcatggagtcggcggtcccgctcgacgtgccgctgaaggtcgacgtcagctggggcgccgactggtacgcggcgaagtgagggaagcgggatcc

SEQ ID NO: 1326 - DNA, 2792 bp, Artificial Sequence
  Description of Artificial Sequence: Synthetic Caldibacillus cellulovorans CompA.2 DNA Polymerase A836Q
atgaaatacctgctgccgaccgctgctgctggtctgctgctcctcgctgcccagccggcgatggccatgggcaaactgattctggtcgacggaaacagcgtcgccaaccgggcgttttacgccgtccggctgctcagcacgcgcggcggcctgcacacaaacgcggtgtacggattcgccaacatgttgctcaagctgatcgaggaggaacggccgacgcattttctcgtcgcgttcgacgcgggcaaggcgacgttccgtcatcgcgaatacgaggcctacaaggcgggtcgcctgcagacgccgcccgagctgtccgagcagtttccgtacatccgggagctcgtccgggcgttcggcgtcgcgtccggcgagctggaggaatacgaggcggacgacatgatcggtacgctggcgaaacgggcggaggccgagggcgtcgacacgctggtcgtcaccggcgaccgcgatttgctccagctcgtatcggaccgcgtgaccgtcgcgctgacgcgcaagggcatcacggaaacggagcggtacgacccggcgcgcatccgcgaggaatacggcttcgatcccgaccgcatccgcgacctcaaagggctgatgggcgacgcgtctgacaatcttcccggcgttcccggcgtcggtgagaaaaccgcactgaaactgctcaggcagtacggttcgctggagagcgtcctggaacacgcgtcggaaatcgccggaaagctcggtgaaaatctgcgggcgcacgccgacgccgcccgattgagcaagcggctggcgacgatcgactgcgcggtaccgttgcagtcgggatgggactggctgcgcctcggcgaaccggaccgcgccgcgctcgcctcgctgttgcggcagctcgaattcaagtcgctgttgaaacggctcggactcgacggcacgtccgccgatgccgacgtcgacggcgtccgttcctccgcgcggccggcggacgagaaacggccgagggccgtcgccgtcgctgaggagggcgtcgacgtccgctgtccggatcgcccggaagaagtcgaagaagcgctgtcgcggctggaagccgcccagtcggtcgtcgtcgaggtgacgggcgacaacccgcacgacggcgaagtgcgcggcgtcgcatggtgggacggacatacggcgtatttcattccgtttgaacggctggtgcagtccgacatgcggccgctggccgactggctcgccgacgcgcgtcggccgaagcgtacgcacgactcccatcgcgctgaagtggcgctgttctggcacggccttgcgtttcgcggcacgtcgttctgcacgcatatcgccgcctatttgctcgaccccacggaatcgcgccatacgctggcggacctgtcgcgccgctacggtctgccgccggtaccggaagccgaggacgtttacggcaagggcgcgaagttcaaggttcccgatcgcgacacgctggcgcgttacgtcggccgcaaggccgccctagtcgcgcggctcgttccgctgctcgaggcggatttggcggcctgcggcatgcgttcgcttttttacgacctggagctgccgctttcatccgaactcgccgtcatggagacggtcggcgtccgcgtcgacgcggcggcgctcgccgcctacggcgaggaattgcgcgaggcggcggcgaaagtcgagcgggagatttacgagctggccgggacgacgttcaacatcggatcgacgaaacagctcggcgaaattttgttcgataagctggggctgcccgtcgtcaagaaaacgaaaaccggctattccaccgacgcagacgtgctggaggaactggcgccgtaccatccgatcgtcgaaaagattttgcattaccgccaactgacgaaattgcagtcgacctacatcgaggggcttttgaaagaaatccgtccgcaaaccggtaaaatccatacgtattatcagcagacgatcgcggcgacggggcggctgagcagtcagtttcccaatcttcagaacattccgatccgtctcgaagaggggcggaaaatccgcaaggcgttcgttccgtcagaaccgggatggctgatgctcgccgccgactattcgcagatcgaactgcgcgtgctcgcgcacgtttccggcgacgaacggctgaaggaagcgtttcggacaggcatggacatccacacgaagaccgcgatggacgtgttcggcgtttccgaagaccgcgtcgacgcgcgcatgcggcggcaggcgaaggcggtcaatttcggcatcatctacggcatcagcgatttcggactggcgcaaaacctgaacatttcccgcaaggaggcggcggagttcatccggcaatatttcgccgtcttttcgggcgtcaaggcgtaccgcgagcggatcgtcgagcaggcgcgccgcgacggttacgtgacgaccctgctcggtcgcaggcgctatttgccggacatcaacgcgtcgaattacaacctccgctcgttccaagagcggacggcgatgaatacgccgatccagggcacggccgccgacatcatcaagaccgcgatggtgcgtctgacgcggcggatgcgcgacgtcggactgaagagccgcatgctgctgcaggttcacgacgagctcgtgtttgaagtgccgccggacgagctcgacgcgatgcgggagcttgtgacggacgtcatggagtcggcggtcccgctcgacgtgccgctgaaggtcgacgtcagctggggcgccgactggtacgcggcgaagtgagggaagcgggatcc

SEQ ID NO: 1327 - DNA, 2792 bp, Artificial Sequence
  Description of Artificial Sequence: Synthetic Caldibacillus cellulovorans CompA.2 DNA Polymerase A836G
atgaaatacctgctgccgaccgctgctgctggtctgctgctcctcgctgcccagccggcgatggccatgggcaaactgattctggtcgacggaaacagcgtcgccaaccgggcgttttacgccgtccggctgctcagcacgcgcggcggcctgcacacaaacgcggtgtacggattcgccaacatgttgctcaagctgatcgaggaggaacggccgacgcattttctcgtcgcgttcgacgcgggcaaggcgacgttccgtcatcgcgaatacgaggcctacaaggcgggtcgcctgcagacgccgcccgagctgtccgagcagtttccgtacatccgggagctcgtccgggcgttcggcgtcgcgtccggcgagctggaggaatacgaggcggacgacatgatcggtacgctggcgaaacgggcggaggccgagggcgtcgacacgctggtcgtcaccggcgaccgcgatttgctccagctcgtatcggaccgcgtgaccgtcgcgctgacgcgcaagggcatcacggaaacggagcggtacgacccggcgcgcatccgcgaggaatacggcttcgatcccgaccgcatccgcgacctcaaagggctgatgggcgacgcgtctgacaatcttcccggcgttcccggcgtcggtgagaaaaccgcactgaaactgctcaggcagtacggttcgctggagagcgtcctggaacacgcgtcggaaatcgccggaaagctcggtgaaaatctgcgggcgcacgccgacgccgcccgattgagcaagcggctggcgacgatcgactgcgcggtaccgttgcagtcgggatgggactggctgcgcctcggcgaaccggaccgcgccgcgctcgcctcgctgttgcggcagctcgaattcaagtcgctgttgaaacggctcggactcgacggcacgtccgccgatgccgacgtcgacggcgtccgttcctccgcgcggccggcggacgagaaacggccgagggccgtcgccgtcgctgaggagggcgtcgacgtccgctgtccggatcgcccggaagaagtcgaagaagcgctgtcgcggctggaagccgcccagtcggtcgtcgtcgaggtgacgggcgacaacccgcacgacggcgaagtgcgcggcgtcgcatggtgggacggacatacggcgtatttcattccgtttgaacggctggtgcagtccgacatgcggccgctggccgactggctcgccgacgcgcgtcggccgaagcgtacgcacgactcccatcgcgctgaagtggcgctgttctggcacggccttgcgtttcgcggcacgtcgttctgcacgcatatcgccgcctatttgctcgaccccacggaatcgcgccatacgctggcggacctgtcgcgccgctacggtctgccgccggtaccggaagccgaggacgtttacggcaagggcgcgaagttcaaggttcccgatcgcgacacgctggcgcgttacgtcggccgcaaggccgccctagtcgcgcggctcgttccgctgctcgaggcggatttggcggcctgcggcatgcgttcgcttttttacgacctggagctgccgctttcatccgaactcgccgtcatggagacggtcggcgtccgcgtcgacgcggcggcgctcgccgcctacggcgaggaattgcgcgaggcggcggcgaaagtcgagcgggagatttacgagctggccgggacgacgttcaacatcggatcgacgaaacagctcggcgaaattttgttcgataagctggggctgcccgtcgtcaagaaaacgaaaaccggctattccaccgacgcagacgtgctggaggaactggcgccgtaccatccgatcgtcgaaaagattttgcattaccgccaactgacgaaattgcagtcgacctacatcgaggggcttttgaaagaaatccgtccgcaaaccggtaaaatccatacgtattatcagcagacgatcgcggcgacggggcggctgagcagtcagtttcccaatcttcagaacattccgatccgtctcgaagaggggcggaaaatccgcaaggcgttcgttccgtcagaaccgggatggctgatgctcgccgccgactattcgcagatcgaactgcgcgtgctcgcgcacgtttccggcgacgaacggctgaaggaagcgtttcggacaggcatggacatccacacgaagaccgcgatggacgtgttcggcgtttccgaagaccgcgtcgacgcgcgcatgcggcggcaggcgaaggcggtcaatttcggcatcatctacggcatcagcgatttcggactggcgcaaaacctgaacatttcccgcaaggaggcggcggagttcatccggcaatatttcgccgtcttttcgggcgtcaaggcgtaccgcgagcggatcgtcgagcaggcgcgccgcgacggttacgtgacgaccctgctcggtcgcaggcgctatttgccggacatcaacgcgtcgaattacaacctccgctcgttcggtgagcggacggcgatgaatacgccgatccagggcacggccgccgacatcatcaagaccgcgatggtgcgtctgacgcggcggatgcgcgacgtcggactgaagagccgcatgctgctgcaggttcacgacgagctcgtgtttgaagtgccgccggacgagctcgacgcgatgcgggagcttgtgacggacgtcatggagtcggcggtcccgctcgacgtgccgctgaaggtcgacgtcagctggggcgccgactggtacgcggcgaagtgagggaagcgggatcc

SEQ ID NO: 1328 - DNA, 2792 bp, Artificial Sequence
  Description of Artificial Sequence: Synthetic Caldibacillus cellulovorans CompA.2 DNA Polymerase A836H
atgaaatacctgctgccgaccgctgctgctggtctgctgctcctcgctgcccagccggcgatggccatgggcaaactgattctggtcgacggaaacagcgtcgccaaccgggcgttttacgccgtccggctgctcagcacgcgcggcggcctgcacacaaacgcggtgtacggattcgccaacatgttgctcaagctgatcgaggaggaacggccgacgcattttctcgtcgcgttcgacgcgggcaaggcgacgttccgtcatcgcgaatacgaggcctacaaggcgggtcgcctgcagacgccgcccgagctgtccgagcagtttccgtacatccgggagctcgtccgggcgttcggcgtcgcgtccggcgagctggaggaatacgaggcggacgacatgatcggtacgctggcgaaacgggcggaggccgagggcgtcgacacgctggtcgtcaccggcgaccgcgatttgctccagctcgtatcggaccgcgtgaccgtcgcgctgacgcgcaagggcatcacggaaacggagcggtacgacccggcgcgcatccgcgaggaatacggcttcgatcccgaccgcatccgcgacctcaaagggctgatgggcgacgcgtctgacaatcttcccggcgttcccggcgtcggtgagaaaaccgcactgaaactgctcaggcagtacggttcgctggagagcgtcctggaacacgcgtcggaaatcgccggaaagctcggtgaaaatctgcgggcgcacgccgacgccgcccgattgagcaagcggctggcgacgatcgactgcgcggtaccgttgcagtcgggatgggactggctgcgcctcggcgaaccggaccgcgccgcgctcgcctcgctgttgcggcagctcgaattcaagtcgctgttgaaacggctcggactcgacggcacgtccgccgatgccgacgtcgacggcgtccgttcctccgcgcggccggcggacgagaaacggccgagggccgtcgccgtcgctgaggagggcgtcgacgtccgctgtccggatcgcccggaagaagtcgaagaagcgctgtcgcggctggaagccgcccagtcggtcgtcgtcgaggtgacgggcgacaacccgcacgacggcgaagtgcgcggcgtcgcatggtgggacggacatacggcgtatttcattccgtttgaacggctggtgcagtccgacatgcggccgctggccgactggctcgccgacgcgcgtcggccgaagcgtacgcacgactcccatcgcgctgaagtggcgctgttctggcacggccttgcgtttcgcggcacgtcgttctgcacgcatatcgccgcctatttgctcgaccccacggaatcgcgccatacgctggcggacctgtcgcgccgctacggtctgccgccggtaccggaagccgaggacgtttacggcaagggcgcgaagttcaaggttcccgatcgcgacacgctggcgcgttacgtcggccgcaaggccgccctagtcgcgcggctcgttccgctgctcgaggcggatttggcggcctgcggcatgcgttcgcttttttacgacctggagctgccgctttcatccgaactcgccgtcatggagacggtcggcgtccgcgtcgacgcggcggcgctcgccgcctacggcgaggaattgcgcgaggcggcggcgaaagtcgagcgggagatttacgagctggccgggacgacgttcaacatcggatcgacgaaacagctcggcgaaattttgttcgataagctggggctgcccgtcgtcaagaaaacgaaaaccggctattccaccgacgcagacgtgctggaggaactggcgccgtaccatccgatcgtcgaaaagattttgcattaccgccaactgacgaaattgcagtcgacctacatcgaggggcttttgaaagaaatccgtccgcaaaccggtaaaatccatacgtattatcagcagacgatcgcggcgacggggcggctgagcagtcagtttcccaatcttcagaacattccgatccgtctcgaagaggggcggaaaatccgcaaggcgttcgttccgtcagaaccgggatggctgatgctcgccgccgactattcgcagatcgaactgcgcgtgctcgcgcacgtttccggcgacgaacggctgaaggaagcgtttcggacaggcatggacatccacacgaagaccgcgatggacgtgttcggcgtttccgaagaccgcgtcgacgcgcgcatgcggcggcaggcgaaggcggtcaatttcggcatcatctacggcatcagcgatttcggactggcgcaaaacctgaacatttcccgcaaggaggcggcggagttcatccggcaatatttcgccgtcttttcgggcgtcaaggcgtaccgcgagcggatcgtcgagcaggcgcgccgcgacggttacgtgacgaccctgctcggtcgcaggcgctatttgccggacatcaacgcgtcgaattacaacctccgctcgttccatgagcggacggcgatgaatacgccgatccagggcacggccgccgacatcatcaagaccgcgatggtgcgtctgacgcggcggatgcgcgacgtcggactgaagagccgcatgctgctgcaggttcacgacgagctcgtgtttgaagtgccgccggacgagctcgacgcgatgcgggagcttgtgacggacgtcatggagtcggcggtcccgctcgacgtgccgctgaaggtcgacgtcagctggggcgccgactggtacgcggcgaagtgagggaagcgggatcc

SEQ ID NO: 1329 - DNA, 2792 bp, Artificial Sequence
  Description of Artificial Sequence: Synthetic Caldibacillus cellulovorans CompA.2 DNA Polymerase A836I
atgaaatacctgctgccgaccgctgctgctggtctgctgctcctcgctgcccagccggcgatggccatgggcaaactgattctggtcgacggaaacagcgtcgccaaccgggcgttttacgccgtccggctgctcagcacgcgcggcggcctgcacacaaacgcggtgtacggattcgccaacatgttgctcaagctgatcgaggaggaacggccgacgcattttctcgtcgcgttcgacgcgggcaaggcgacgttccgtcatcgcgaatacgaggcctacaaggcgggtcgcctgcagacgccgcccgagctgtccgagcagtttccgtacatccgggagctcgtccgggcgttcggcgtcgcgtccggcgagctggaggaatacgaggcggacgacatgatcggtacgctggcgaaacgggcggaggccgagggcgtcgacacgctggtcgtcaccggcgaccgcgatttgctccagctcgtatcggaccgcgtgaccgtcgcgctgacgcgcaagggcatcacggaaacggagcggtacgacccggcgcgcatccgcgaggaatacggcttcgatcccgaccgcatccgcgacctcaaagggctgatgggcgacgcgtctgacaatcttcccggcgttcccggcgtcggtgagaaaaccgcactgaaactgctcaggcagtacggttcgctggagagcgtcctggaacacgcgtcggaaatcgccggaaagctcggtgaaaatctgcgggcgcacgccgacgccgcccgattgagcaagcggctggcgacgatcgactgcgcggtaccgttgcagtcgggatgggactggctgcgcctcggcgaaccggaccgcgccgcgctcgcctcgctgttgcggcagctcgaattcaagtcgctgttgaaacggctcggactcgacggcacgtccgccgatgccgacgtcgacggcgtccgttcctccgcgcggccggcggacgagaaacggccgagggccgtcgccgtcgctgaggagggcgtcgacgtccgctgtccggatcgcccggaagaagtcgaagaagcgctgtcgcggctggaagccgcccagtcggtcgtcgtcgaggtgacgggcgacaacccgcacgacggcgaagtgcgcggcgtcgcatggtgggacggacatacggcgtatttcattccgtttgaacggctggtgcagtccgacatgcggccgctggccgactggctcgccgacgcgcgtcggccgaagcgtacgcacgactcccatcgcgctgaagtggcgctgttctggcacggccttgcgtttcgcggcacgtcgttctgcacgcatatcgccgcctatttgctcgaccccacggaatcgcgccatacgctggcggacctgtcgcgccgctacggtctgccgccggtaccggaagccgaggacgtttacggcaagggcgcgaagttcaaggttcccgatcgcgacacgctggcgcgttacgtcggccgcaaggccgccctagtcgcgcggctcgttccgctgctcgaggcggatttggcggcctgcggcatgcgttcgcttttttacgacctggagctgccgctttcatccgaactcgccgtcatggagacggtcggcgtccgcgtcgacgcggcggcgctcgccgcctacggcgaggaattgcgcgaggcggcggcgaaagtcgagcgggagatttacgagctggccgggacgacgttcaacatcggatcgacgaaacagctcggcgaaattttgttcgataagctggggctgcccgtcgtcaagaaaacgaaaaccggctattccaccgacgcagacgtgctggaggaactggcgccgtaccatccgatcgtcgaaaagattttgcattaccgccaactgacgaaattgcagtcgacctacatcgaggggcttttgaaagaaatccgtccgcaaaccggtaaaatccatacgtattatcagcagacgatcgcggcgacggggcggctgagcagtcagtttcccaatcttcagaacattccgatccgtctcgaagaggggcggaaaatccgcaaggcgttcgttccgtcagaaccgggatggctgatgctcgccgccgactattcgcagatcgaactgcgcgtgctcgcgcacgtttccggcgacgaacggctgaaggaagcgtttcggacaggcatggacatccacacgaagaccgcgatggacgtgttcggcgtttccgaagaccgcgtcgacgcgcgcatgcggcggcaggcgaaggcggtcaatttcggcatcatctacggcatcagcgatttcggactggcgcaaaacctgaacatttcccgcaaggaggcggcggagttcatccggcaatatttcgccgtcttttcgggcgtcaaggcgtaccgcgagcggatcgtcgagcaggcgcgccgcgacggttacgtgacgaccctgctcggtcgcaggcgctatttgccggacatcaacgcgtcgaattacaacctccgctcgttcattgagcggacggcgatgaatacgccgatccagggcacggccgccgacatcatcaagaccgcgatggtgcgtctgacgcggcggatgcgcgacgtcggactgaagagccgcatgctgctgcaggttcacgacgagctcgtgtttgaagtgccgccggacgagctcgacgcgatgcgggagcttgtgacggacgtcatggagtcggcggtcccgctcgacgtgccgctgaaggtcgacgtcagctggggcgccgactggtacgcggcgaagtgagggaagcgggatcc

SEQ ID NO: 1330 - DNA, 2792 bp, Artificial Sequence
  Description of Artificial Sequence: Synthetic Caldibacillus cellulovorans CompA.2 DNA Polymerase A836L
atgaaatacctgctgccgaccgctgctgctggtctgctgctcctcgctgcccagccggcgatggccatgggcaaactgattctggtcgacggaaacagcgtcgccaaccgggcgttttacgccgtccggctgctcagcacgcgcggcggcctgcacacaaacgcggtgtacggattcgccaacatgttgctcaagctgatcgaggaggaacggccgacgcattttctcgtcgcgttcgacgcgggcaaggcgacgttccgtcatcgcgaatacgaggcctacaaggcgggtcgcctgcagacgccgcccgagctgtccgagcagtttccgtacatccgggagctcgtccgggcgttcggcgtcgcgtccggcgagctggaggaatacgaggcggacgacatgatcggtacgctggcgaaacgggcggaggccgagggcgtcgacacgctggtcgtcaccggcgaccgcgatttgctccagctcgtatcggaccgcgtgaccgtcgcgctgacgcgcaagggcatcacggaaacggagcggtacgacccggcgcgcatccgcgaggaatacggcttcgatcccgaccgcatccgcgacctcaaagggctgatgggcgacgcgtctgacaatcttcccggcgttcccggcgtcggtgagaaaaccgcactgaaactgctcaggcagtacggttcgctggagagcgtcctggaacacgcgtcggaaatcgccggaaagctcggtgaaaatctgcgggcgcacgccgacgccgcccgattgagcaagcggctggcgacgatcgactgcgcggtaccgttgcagtcgggatgggactggctgcgcctcggcgaaccggaccgcgccgcgctcgcctcgctgttgcggcagctcgaattcaagtcgctgttgaaacggctcggactcgacggcacgtccgccgatgccgacgtcgacggcgtccgttcctccgcgcggccggcggacgagaaacggccgagggccgtcgccgtcgctgaggagggcgtcgacgtccgctgtccggatcgcccggaagaagtcgaagaagcgctgtcgcggctggaagccgcccagtcggtcgtcgtcgaggtgacgggcgacaacccgcacgacggcgaagtgcgcggcgtcgcatggtgggacggacatacggcgtatttcattccgtttgaacggctggtgcagtccgacatgcggccgctggccgactggctcgccgacgcgcgtcggccgaagcgtacgcacgactcccatcgcgctgaagtggcgctgttctggcacggccttgcgtttcgcggcacgtcgttctgcacgcatatcgccgcctatttgctcgaccccacggaatcgcgccatacgctggcggacctgtcgcgccgctacggtctgccgccggtaccggaagccgaggacgtttacggcaagggcgcgaagttcaaggttcccgatcgcgacacgctggcgcgttacgtcggccgcaaggccgccctagtcgcgcggctcgttccgctgctcgaggcggatttggcggcctgcggcatgcgttcgcttttttacgacctggagctgccgctttcatccgaactcgccgtcatggagacggtcggcgtccgcgtcgacgcggcggcgctcgccgcctacggcgaggaattgcgcgaggcggcggcgaaagtcgagcgggagatttacgagctggccgggacgacgttcaacatcggatcgacgaaacagctcggcgaaattttgttcgataagctggggctgcccgtcgtcaagaaaacgaaaaccggctattccaccgacgcagacgtgctggaggaactggcgccgtaccatccgatcgtcgaaaagattttgcattaccgccaactgacgaaattgcagtcgacctacatcgaggggcttttgaaagaaatccgtccgcaaaccggtaaaatccatacgtattatcagcagacgatcgcggcgacggggcggctgagcagtcagtttcccaatcttcagaacattccgatccgtctcgaagaggggcggaaaatccgcaaggcgttcgttccgtcagaaccgggatggctgatgctcgccgccgactattcgcagatcgaactgcgcgtgctcgcgcacgtttccggcgacgaacggctgaaggaagcgtttcggacaggcatggacatccacacgaagaccgcgatggacgtgttcggcgtttccgaagaccgcgtcgacgcgcgcatgcggcggcaggcgaaggcggtcaatttcggcatcatctacggcatcagcgatttcggactggcgcaaaacctgaacatttcccgcaaggaggcggcggagttcatccggcaatatttcgccgtcttttcgggcgtcaaggcgtaccgcgagcggatcgtcgagcaggcgcgccgcgacggttacgtgacgaccctgctcggtcgcaggcgctatttgccggacatcaacgcgtcgaattacaacctccgctcgttccttgagcggacggcgatgaatacgccgatccagggcacggccgccgacatcatcaagaccgcgatggtgcgtctgacgcggcggatgcgcgacgtcggactgaagagccgcatgctgctgcaggttcacgacgagctcgtgtttgaagtgccgccggacgagctcgacgcgatgcgggagcttgtgacggacgtcatggagtcggcggtcccgctcgacgtgccgctgaaggtcgacgtcagctggggcgccgactggtacgcggcgaagtgagggaagcgggatcc

SEQ ID NO: 1331 - DNA, 2792 bp, Artificial Sequence
  Description of Artificial Sequence: Synthetic Caldibacillus cellulovorans CompA.2 DNA Polymerase A836K
atgaaatacctgctgccgaccgctgctgctggtctgctgctcctcgctgcccagccggcgatggccatgggcaaactgattctggtcgacggaaacagcgtcgccaaccgggcgttttacgccgtccggctgctcagcacgcgcggcggcctgcacacaaacgcggtgtacggattcgccaacatgttgctcaagctgatcgaggaggaacggccgacgcattttctcgtcgcgttcgacgcgggcaaggcgacgttccgtcatcgcgaatacgaggcctacaaggcgggtcgcctgcagacgccgcccgagctgtccgagcagtttccgtacatccgggagctcgtccgggcgttcggcgtcgcgtccggcgagctggaggaatacgaggcggacgacatgatcggtacgctggcgaaacgggcggaggccgagggcgtcgacacgctggtcgtcaccggcgaccgcgatttgctccagctcgtatcggaccgcgtgaccgtcgcgctgacgcgcaagggcatcacggaaacggagcggtacgacccggcgcgcatccgcgaggaatacggcttcgatcccgaccgcatccgcgacctcaaagggctgatgggcgacgcgtctgacaatcttcccggcgttcccggcgtcggtgagaaaaccgcactgaaactgctcaggcagtacggttcgctggagagcgtcctggaacacgcgtcggaaatcgccggaaagctcggtgaaaatctgcgggcgcacgccgacgccgcccgattgagcaagcggctggcgacgatcgactgcgcggtaccgttgcagtcgggatgggactggctgcgcctcggcgaaccggaccgcgccgcgctcgcctcgctgttgcggcagctcgaattcaagtcgctgttgaaacggctcggactcgacggcacgtccgccgatgccgacgtcgacggcgtccgttcctccgcgcggccggcggacgagaaacggccgagggccgtcgccgtcgctgaggagggcgtcgacgtccgctgtccggatcgcccggaagaagtcgaagaagcgctgtcgcggctggaagccgcccagtcggtcgtcgtcgaggtgacgggcgacaacccgcacgacggcgaagtgcgcggcgtcgcatggtgggacggacatacggcgtatttcattccgtttgaacggctggtgcagtccgacatgcggccgctggccgactggctcgccgacgcgcgtcggccgaagcgtacgcacgactcccatcgcgctgaagtggcgctgttctggcacggccttgcgtttcgcggcacgtcgttctgcacgcatatcgccgcctatttgctcgaccccacggaatcgcgccatacgctggcggacctgtcgcgccgctacggtctgccgccggtaccggaagccgaggacgtttacggcaagggcgcgaagttcaaggttcccgatcgcgacacgctggcgcgttacgtcggccgcaaggccgccctagtcgcgcggctcgttccgctgctcgaggcggatttggcggcctgcggcatgcgttcgcttttttacgacctggagctgccgctttcatccgaactcgccgtcatggagacggtcggcgtccgcgtcgacgcggcggcgctcgccgcctacggcgaggaattgcgcgaggcggcggcgaaagtcgagcgggagatttacgagctggccgggacgacgttcaacatcggatcgacgaaacagctcggcgaaattttgttcgataagctggggctgcccgtcgtcaagaaaacgaaaaccggctattccaccgacgcagacgtgctggaggaactggcgccgtaccatccgatcgtcgaaaagattttgcattaccgccaactgacgaaattgcagtcgacctacatcgaggggcttttgaaagaaatccgtccgcaaaccggtaaaatccatacgtattatcagcagacgatcgcggcgacggggcggctgagcagtcagtttcccaatcttcagaacattccgatccgtctcgaagaggggcggaaaatccgcaaggcgttcgttccgtcagaaccgggatggctgatgctcgccgccgactattcgcagatcgaactgcgcgtgctcgcgcacgtttccggcgacgaacggctgaaggaagcgtttcggacaggcatggacatccacacgaagaccgcgatggacgtgttcggcgtttccgaagaccgcgtcgacgcgcgcatgcggcggcaggcgaaggcggtcaatttcggcatcatctacggcatcagcgatttcggactggcgcaaaacctgaacatttcccgcaaggaggcggcggagttcatccggcaatatttcgccgtcttttcgggcgtcaaggcgtaccgcgagcggatcgtcgagcaggcgcgccgcgacggttacgtgacgaccctgctcggtcgcaggcgctatttgccggacatcaacgcgtcgaattacaacctccgctcgttcaaagagcggacggcgatgaatacgccgatccagggcacggccgccgacatcatcaagaccgcgatggtgcgtctgacgcggcggatgcgcgacgtcggactgaagagccgcatgctgctgcaggttcacgacgagctcgtgtttgaagtgccgccggacgagctcgacgcgatgcgggagcttgtgacggacgtcatggagtcggcggtcccgctcgacgtgccgctgaaggtcgacgtcagctggggcgccgactggtacgcggcgaagtgagggaagcgggatcc

SEQ ID NO: 1332 - DNA, 2792 bp, Artificial Sequence
  Description of Artificial Sequence: Synthetic Caldibacillus cellulovorans CompA.2 DNA Polymerase A836M
atgaaatacctgctgccgaccgctgctgctggtctgctgctcctcgctgcccagccggcgatggccatgggcaaactgattctggtcgacggaaacagcgtcgccaaccgggcgttttacgccgtccggctgctcagcacgcgcggcggcctgcacacaaacgcggtgtacggattcgccaacatgttgctcaagctgatcgaggaggaacggccgacgcattttctcgtcgcgttcgacgcgggcaaggcgacgttccgtcatcgcgaatacgaggcctacaaggcgggtcgcctgcagacgccgcccgagctgtccgagcagtttccgtacatccgggagctcgtccgggcgttcggcgtcgcgtccggcgagctggaggaatacgaggcggacgacatgatcggtacgctggcgaaacgggcggaggccgagggcgtcgacacgctggtcgtcaccggcgaccgcgatttgctccagctcgtatcggaccgcgtgaccgtcgcgctgacgcgcaagggcatcacggaaacggagcggtacgacccggcgcgcatccgcgaggaatacggcttcgatcccgaccgcatccgcgacctcaaagggctgatgggcgacgcgtctgacaatcttcccggcgttcccggcgtcggtgagaaaaccgcactgaaactgctcaggcagtacggttcgctggagagcgtcctggaacacgcgtcggaaatcgccggaaagctcggtgaaaatctgcgggcgcacgccgacgccgcccgattgagcaagcggctggcgacgatcgactgcgcggtaccgttgcagtcgggatgggactggctgcgcctcggcgaaccggaccgcgccgcgctcgcctcgctgttgcggcagctcgaattcaagtcgctgttgaaacggctcggactcgacggcacgtccgccgatgccgacgtcgacggcgtccgttcctccgcgcggccggcggacgagaaacggccgagggccgtcgccgtcgctgaggagggcgtcgacgtccgctgtccggatcgcccggaagaagtcgaagaagcgctgtcgcggctggaagccgcccagtcggtcgtcgtcgaggtgacgggcgacaacccgcacgacggcgaagtgcgcggcgtcgcatggtgggacggacatacggcgtatttcattccgtttgaacggctggtgcagtccgacatgcggccgctggccgactggctcgccgacgcgcgtcggccgaagcgtacgcacgactcccatcgcgctgaagtggcgctgttctggcacggccttgcgtttcgcggcacgtcgttctgcacgcatatcgccgcctatttgctcgaccccacggaatcgcgccatacgctggcggacctgtcgcgccgctacggtctgccgccggtaccggaagccgaggacgtttacggcaagggcgcgaagttcaaggttcccgatcgcgacacgctggcgcgttacgtcggccgcaaggccgccctagtcgcgcggctcgttccgctgctcgaggcggatttggcggcctgcggcatgcgttcgcttttttacgacctggagctgccgctttcatccgaactcgccgtcatggagacggtcggcgtccgcgtcgacgcggcggcgctcgccgcctacggcgaggaattgcgcgaggcggcggcgaaagtcgagcgggagatttacgagctggccgggacgacgttcaacatcggatcgacgaaacagctcggcgaaattttgttcgataagctggggctgcccgtcgtcaagaaaacgaaaaccggctattccaccgacgcagacgtgctggaggaactggcgccgtaccatccgatcgtcgaaaagattttgcattaccgccaactgacgaaattgcagtcgacctacatcgaggggcttttgaaagaaatccgtccgcaaaccggtaaaatccatacgtattatcagcagacgatcgcggcgacggggcggctgagcagtcagtttcccaatcttcagaacattccgatccgtctcgaagaggggcggaaaatccgcaaggcgttcgttccgtcagaaccgggatggctgatgctcgccgccgactattcgcagatcgaactgcgcgtgctcgcgcacgtttccggcgacgaacggctgaaggaagcgtttcggacaggcatggacatccacacgaagaccgcgatggacgtgttcggcgtttccgaagaccgcgtcgacgcgcgcatgcggcggcaggcgaaggcggtcaatttcggcatcatctacggcatcagcgatttcggactggcgcaaaacctgaacatttcccgcaaggaggcggcggagttcatccggcaatatttcgccgtcttttcgggcgtcaaggcgtaccgcgagcggatcgtcgagcaggcgcgccgcgacggttacgtgacgaccctgctcggtcgcaggcgctatttgccggacatcaacgcgtcgaattacaacctccgctcgttcatggagcggacggcgatgaatacgccgatccagggcacggccgccgacatcatcaagaccgcgatggtgcgtctgacgcggcggatgcgcgacgtcggactgaagagccgcatgctgctgcaggttcacgacgagctcgtgtttgaagtgccgccggacgagctcgacgcgatgcgggagcttgtgacggacgtcatggagtcggcggtcccgctcgacgtgccgctgaaggtcgacgtcagctggggcgccgactggtacgcggcgaagtgagggaagcgggatcc

SEQ ID NO: 1333 - DNA, 2792 bp, Artificial Sequence
  Description of Artificial Sequence: Synthetic Caldibacillus cellulovorans CompA.2 DNA Polymerase A836F
atgaaatacctgctgccgaccgctgctgctggtctgctgctcctcgctgcccagccggcgatggccatgggcaaactgattctggtcgacggaaacagcgtcgccaaccgggcgttttacgccgtccggctgctcagcacgcgcggcggcctgcacacaaacgcggtgtacggattcgccaacatgttgctcaagctgatcgaggaggaacggccgacgcattttctcgtcgcgttcgacgcgggcaaggcgacgttccgtcatcgcgaatacgaggcctacaaggcgggtcgcctgcagacgccgcccgagctgtccgagcagtttccgtacatccgggagctcgtccgggcgttcggcgtcgcgtccggcgagctggaggaatacgaggcggacgacatgatcggtacgctggcgaaacgggcggaggccgagggcgtcgacacgctggtcgtcaccggcgaccgcgatttgctccagctcgtatcggaccgcgtgaccgtcgcgctgacgcgcaagggcatcacggaaacggagcggtacgacccggcgcgcatccgcgaggaatacggcttcgatcccgaccgcatccgcgacctcaaagggctgatgggcgacgcgtctgacaatcttcccggcgttcccggcgtcggtgagaaaaccgcactgaaactgctcaggcagtacggttcgctggagagcgtcctggaacacgcgtcggaaatcgccggaaagctcggtgaaaatctgcgggcgcacgccgacgccgcccgattgagcaagcggctggcgacgatcgactgcgcggtaccgttgcagtcgggatgggactggctgcgcctcggcgaaccggaccgcgccgcgctcgcctcgctgttgcggcagctcgaattcaagtcgctgttgaaacggctcggactcgacggcacgtccgccgatgccgacgtcgacggcgtccgttcctccgcgcggccggcggacgagaaacggccgagggccgtcgccgtcgctgaggagggcgtcgacgtccgctgtccggatcgcccggaagaagtcgaagaagcgctgtcgcggctggaagccgcccagtcggtcgtcgtcgaggtgacgggcgacaacccgcacgacggcgaagtgcgcggcgtcgcatggtgggacggacatacggcgtatttcattccgtttgaacggctggtgcagtccgacatgcggccgctggccgactggctcgccgacgcgcgtcggccgaagcgtacgcacgactcccatcgcgctgaagtggcgctgttctggcacggccttgcgtttcgcggcacgtcgttctgcacgcatatcgccgcctatttgctcgaccccacggaatcgcgccatacgctggcggacctgtcgcgccgctacggtctgccgccggtaccggaagccgaggacgtttacggcaagggcgcgaagttcaaggttcccgatcgcgacacgctggcgcgttacgtcggccgcaaggccgccctagtcgcgcggctcgttccgctgctcgaggcggatttggcggcctgcggcatgcgttcgcttttttacgacctggagctgccgctttcatccgaactcgccgtcatggagacggtcggcgtccgcgtcgacgcggcggcgctcgccgcctacggcgaggaattgcgcgaggcggcggcgaaagtcgagcgggagatttacgagctggccgggacgacgttcaacatcggatcgacgaaacagctcggcgaaattttgttcgataagctggggctgcccgtcgtcaagaaaacgaaaaccggctattccaccgacgcagacgtgctggaggaactggcgccgtaccatccgatcgtcgaaaagattttgcattaccgccaactgacgaaattgcagtcgacctacatcgaggggcttttgaaagaaatccgtccgcaaaccggtaaaatccatacgtattatcagcagacgatcgcggcgacggggcggctgagcagtcagtttcccaatcttcagaacattccgatccgtctcgaagaggggcggaaaatccgcaaggcgttcgttccgtcagaaccgggatggctgatgctcgccgccgactattcgcagatcgaactgcgcgtgctcgcgcacgtttccggcgacgaacggctgaaggaagcgtttcggacaggcatggacatccacacgaagaccgcgatggacgtgttcggcgtttccgaagaccgcgtcgacgcgcgcatgcggcggcaggcgaaggcggtcaatttcggcatcatctacggcatcagcgatttcggactggcgcaaaacctgaacatttcccgcaaggaggcggcggagttcatccggcaatatttcgccgtcttttcgggcgtcaaggcgtaccgcgagcggatcgtcgagcaggcgcgccgcgacggttacgtgacgaccctgctcggtcgcaggcgctatttgccggacatcaacgcgtcgaattacaacctccgctcgttctttgagcggacggcgatgaatacgccgatccagggcacggccgccgacatcatcaagaccgcgatggtgcgtctgacgcggcggatgcgcgacgtcggactgaagagccgcatgctgctgcaggttcacgacgagctcgtgtttgaagtgccgccggacgagctcgacgcgatgcgggagcttgtgacggacgtcatggagtcggcggtcccgctcgacgtgccgctgaaggtcgacgtcagctggggcgccgactggtacgcggcgaagtgagggaagcgggatcc

SEQ ID NO: 1334 - DNA, 2792 bp, Artificial Sequence
  Description of Artificial Sequence: Synthetic Caldibacillus cellulovorans CompA.2 DNA Polymerase A836P
atgaaatacctgctgccgaccgctgctgctggtctgctgctcctcgctgcccagccggcgatggccatgggcaaactgattctggtcgacggaaacagcgtcgccaaccgggcgttttacgccgtccggctgctcagcacgcgcggcggcctgcacacaaacgcggtgtacggattcgccaacatgttgctcaagctgatcgaggaggaacggccgacgcattttctcgtcgcgttcgacgcgggcaaggcgacgttccgtcatcgcgaatacgaggcctacaaggcgggtcgcctgcagacgccgcccgagctgtccgagcagtttccgtacatccgggagctcgtccgggcgttcggcgtcgcgtccggcgagctggaggaatacgaggcggacgacatgatcggtacgctggcgaaacgggcggaggccgagggcgtcgacacgctggtcgtcaccggcgaccgcgatttgctccagctcgtatcggaccgcgtgaccgtcgcgctgacgcgcaagggcatcacggaaacggagcggtacgacccggcgcgcatccgcgaggaatacggcttcgatcccgaccgcatccgcgacctcaaagggctgatgggcgacgcgtctgacaatcttcccggcgttcccggcgtcggtgagaaaaccgcactgaaactgctcaggcagtacggttcgctggagagcgtcctggaacacgcgtcggaaatcgccggaaagctcggtgaaaatctgcgggcgcacgccgacgccgcccgattgagcaagcggctggcgacgatcgactgcgcggtaccgttgcagtcgggatgggactggctgcgcctcggcgaaccggaccgcgccgcgctcgcctcgctgttgcggcagctcgaattcaagtcgctgttgaaacggctcggactcgacggcacgtccgccgatgccgacgtcgacggcgtccgttcctccgcgcggccggcggacgagaaacggccgagggccgtcgccgtcgctgaggagggcgtcgacgtccgctgtccggatcgcccggaagaagtcgaagaagcgctgtcgcggctggaagccgcccagtcggtcgtcgtcgaggtgacgggcgacaacccgcacgacggcgaagtgcgcggcgtcgcatggtgggacggacatacggcgtatttcattccgtttgaacggctggtgcagtccgacatgcggccgctggccgactggctcgccgacgcgcgtcggccgaagcgtacgcacgactcccatcgcgctgaagtggcgctgttctggcacggccttgcgtttcgcggcacgtcgttctgcacgcatatcgccgcctatttgctcgaccccacggaatcgcgccatacgctggcggacctgtcgcgccgctacggtctgccgccggtaccggaagccgaggacgtttacggcaagggcgcgaagttcaaggttcccgatcgcgacacgctggcgcgttacgtcggccgcaaggccgccctagtcgcgcggctcgttccgctgctcgaggcggatttggcggcctgcggcatgcgttcgcttttttacgacctggagctgccgctttcatccgaactcgccgtcatggagacggtcggcgtccgcgtcgacgcggcggcgctcgccgcctacggcgaggaattgcgcgaggcggcggcgaaagtcgagcgggagatttacgagctggccgggacgacgttcaacatcggatcgacgaaacagctcggcgaaattttgttcgataagctggggctgcccgtcgtcaagaaaacgaaaaccggctattccaccgacgcagacgtgctggaggaactggcgccgtaccatccgatcgtcgaaaagattttgcattaccgccaactgacgaaattgcagtcgacctacatcgaggggcttttgaaagaaatccgtccgcaaaccggtaaaatccatacgtattatcagcagacgatcgcggcgacggggcggctgagcagtcagtttcccaatcttcagaacattccgatccgtctcgaagaggggcggaaaatccgcaaggcgttcgttccgtcagaaccgggatggctgatgctcgccgccgactattcgcagatcgaactgcgcgtgctcgcgcacgtttccggcgacgaacggctgaaggaagcgtttcggacaggcatggacatccacacgaagaccgcgatggacgtgttcggcgtttccgaagaccgcgtcgacgcgcgcatgcggcggcaggcgaaggcggtcaatttcggcatcatctacggcatcagcgatttcggactggcgcaaaacctgaacatttcccgcaaggaggcggcggagttcatccggcaatatttcgccgtcttttcgggcgtcaaggcgtaccgcgagcggatcgtcgagcaggcgcgccgcgacggttacgtgacgaccctgctcggtcgcaggcgctatttgccggacatcaacgcgtcgaattacaacctccgctcgttccctgagcggacggcgatgaatacgccgatccagggcacggccgccgacatcatcaagaccgcgatggtgcgtctgacgcggcggatgcgcgacgtcggactgaagagccgcatgctgctgcaggttcacgacgagctcgtgtttgaagtgccgccggacgagctcgacgcgatgcgggagcttgtgacggacgtcatggagtcggcggtcccgctcgacgtgccgctgaaggtcgacgtcagctggggcgccgactggtacgcggcgaagtgagggaagcgggatcc

SEQ ID NO: 1335 - DNA, 2792 bp, Artificial Sequence
  Description of Artificial Sequence: Synthetic Caldibacillus cellulovorans CompA.2 DNA Polymerase A836S
atgaaatacctgctgccgaccgctgctgctggtctgctgctcctcgctgcccagccggcgatggccatgggcaaactgattctggtcgacggaaacagcgtcgccaaccgggcgttttacgccgtccggctgctcagcacgcgcggcggcctgcacacaaacgcggtgtacggattcgccaacatgttgctcaagctgatcgaggaggaacggccgacgcattttctcgtcgcgttcgacgcgggcaaggcgacgttccgtcatcgcgaatacgaggcctacaaggcgggtcgcctgcagacgccgcccgagctgtccgagcagtttccgtacatccgggagctcgtccgggcgttcggcgtcgcgtccggcgagctggaggaatacgaggcggacgacatgatcggtacgctggcgaaacgggcggaggccgagggcgtcgacacgctggtcgtcaccggcgaccgcgatttgctccagctcgtatcggaccgcgtgaccgtcgcgctgacgcgcaagggcatcacggaaacggagcggtacgacccggcgcgcatccgcgaggaatacggcttcgatcccgaccgcatccgcgacctcaaagggctgatgggcgacgcgtctgacaatcttcccggcgttcccggcgtcggtgagaaaaccgcactgaaactgctcaggcagtacggttcgctggagagcgtcctggaacacgcgtcggaaatcgccggaaagctcggtgaaaatctgcgggcgcacgccgacgccgcccgattgagcaagcggctggcgacgatcgactgcgcggtaccgttgcagtcgggatgggactggctgcgcctcggcgaaccggaccgcgccgcgctcgcctcgctgttgcggcagctcgaattcaagtcgctgttgaaacggctcggactcgacggcacgtccgccgatgccgacgtcgacggcgtccgttcctccgcgcggccggcggacgagaaacggccgagggccgtcgccgtcgctgaggagggcgtcgacgtccgctgtccggatcgcccggaagaagtcgaagaagcgctgtcgcggctggaagccgcccagtcggtcgtcgtcgaggtgacgggcgacaacccgcacgacggcgaagtgcgcggcgtcgcatggtgggacggacatacggcgtatttcattccgtttgaacggctggtgcagtccgacatgcggccgctggccgactggctcgccgacgcgcgtcggccgaagcgtacgcacgactcccatcgcgctgaagtggcgctgttctggcacggccttgcgtttcgcggcacgtcgttctgcacgcatatcgccgcctatttgctcgaccccacggaatcgcgccatacgctggcggacctgtcgcgccgctacggtctgccgccggtaccggaagccgaggacgtttacggcaagggcgcgaagttcaaggttcccgatcgcgacacgctggcgcgttacgtcggccgcaaggccgccctagtcgcgcggctcgttccgctgctcgaggcggatttggcggcctgcggcatgcgttcgcttttttacgacctggagctgccgctttcatccgaactcgccgtcatggagacggtcggcgtccgcgtcgacgcggcggcgctcgccgcctacggcgaggaattgcgcgaggcggcggcgaaagtcgagcgggagatttacgagctggccgggacgacgttcaacatcggatcgacgaaacagctcggcgaaattttgttcgataagctggggctgcccgtcgtcaagaaaacgaaaaccggctattccaccgacgcagacgtgctggaggaactggcgccgtaccatccgatcgtcgaaaagattttgcattaccgccaactgacgaaattgcagtcgacctacatcgaggggcttttgaaagaaatccgtccgcaaaccggtaaaatccatacgtattatcagcagacgatcgcggcgacggggcggctgagcagtcagtttcccaatcttcagaacattccgatccgtctcgaagaggggcggaaaatccgcaaggcgttcgttccgtcagaaccgggatggctgatgctcgccgccgactattcgcagatcgaactgcgcgtgctcgcgcacgtttccggcgacgaacggctgaaggaagcgtttcggacaggcatggacatccacacgaagaccgcgatggacgtgttcggcgtttccgaagaccgcgtcgacgcgcgcatgcggcggcaggcgaaggcggtcaatttcggcatcatctacggcatcagcgatttcggactggcgcaaaacctgaacatttcccgcaaggaggcggcggagttcatccggcaatatttcgccgtcttttcgggcgtcaaggcgtaccgcgagcggatcgtcgagcaggcgcgccgcgacggttacgtgacgaccctgctcggtcgcaggcgctatttgccggacatcaacgcgtcgaattacaacctccgctcgttctctgagcggacggcgatgaatacgccgatccagggcacggccgccgacatcatcaagaccgcgatggtgcgtctgacgcggcggatgcgcgacgtcggactgaagagccgcatgctgctgcaggttcacgacgagctcgtgtttgaagtgccgccggacgagctcgacgcgatgcgggagcttgtgacggacgtcatggagtcggcggtcccgctcgacgtgccgctgaaggtcgacgtcagctggggcgccgactggtacgcggcgaagtgagggaagcgggatcc

SEQ ID NO: 1336 - DNA, 2792 bp, Artificial Sequence
  Description of Artificial Sequence: Synthetic Caldibacillus cellulovorans CompA.2 DNA Polymerase A836T
atgaaatacctgctgccgaccgctgctgctggtctgctgctcctcgctgcccagccggcgatggccatgggcaaactgattctggtcgacggaaacagcgtcgccaaccgggcgttttacgccgtccggctgctcagcacgcgcggcggcctgcacacaaacgcggtgtacggattcgccaacatgttgctcaagctgatcgaggaggaacggccgacgcattttctcgtcgcgttcgacgcgggcaaggcgacgttccgtcatcgcgaatacgaggcctacaaggcgggtcgcctgcagacgccgcccgagctgtccgagcagtttccgtacatccgggagctcgtccgggcgttcggcgtcgcgtccggcgagctggaggaatacgaggcggacgacatgatcggtacgctggcgaaacgggcggaggccgagggcgtcgacacgctggtcgtcaccggcgaccgcgatttgctccagctcgtatcggaccgcgtgaccgtcgcgctgacgcgcaagggcatcacggaaacggagcggtacgacccggcgcgcatccgcgaggaatacggcttcgatcccgaccgcatccgcgacctcaaagggctgatgggcgacgcgtctgacaatcttcccggcgttcccggcgtcggtgagaaaaccgcactgaaactgctcaggcagtacggttcgctggagagcgtcctggaacacgcgtcggaaatcgccggaaagctcggtgaaaatctgcgggcgcacgccgacgccgcccgattgagcaagcggctggcgacgatcgactgcgcggtaccgttgcagtcgggatgggactggctgcgcctcggcgaaccggaccgcgccgcgctcgcctcgctgttgcggcagctcgaattcaagtcgctgttgaaacggctcggactcgacggcacgtccgccgatgccgacgtcgacggcgtccgttcctccgcgcggccggcggacgagaaacggccgagggccgtcgccgtcgctgaggagggcgtcgacgtccgctgtccggatcgcccggaagaagtcgaagaagcgctgtcgcggctggaagccgcccagtcggtcgtcgtcgaggtgacgggcgacaacccgcacgacggcgaagtgcgcggcgtcgcatggtgggacggacatacggcgtatttcattccgtttgaacggctggtgcagtccgacatgcggccgctggccgactggctcgccgacgcgcgtcggccgaagcgtacgcacgactcccatcgcgctgaagtggcgctgttctggcacggccttgcgtttcgcggcacgtcgttctgcacgcatatcgccgcctatttgctcgaccccacggaatcgcgccatacgctggcggacctgtcgcgccgctacggtctgccgccggtaccggaagccgaggacgtttacggcaagggcgcgaagttcaaggttcccgatcgcgacacgctggcgcgttacgtcggccgcaaggccgccctagtcgcgcggctcgttccgctgctcgaggcggatttggcggcctgcggcatgcgttcgcttttttacgacctggagctgccgctttcatccgaactcgccgtcatggagacggtcggcgtccgcgtcgacgcggcggcgctcgccgcctacggcgaggaattgcgcgaggcggcggcgaaagtcgagcgggagatttacgagctggccgggacgacgttcaacatcggatcgacgaaacagctcggcgaaattttgttcgataagctggggctgcccgtcgtcaagaaaacgaaaaccggctattccaccgacgcagacgtgctggaggaactggcgccgtaccatccgatcgtcgaaaagattttgcattaccgccaactgacgaaattgcagtcgacctacatcgaggggcttttgaaagaaatccgtccgcaaaccggtaaaatccatacgtattatcagcagacgatcgcggcgacggggcggctgagcagtcagtttcccaatcttcagaacattccgatccgtctcgaagaggggcggaaaatccgcaaggcgttcgttccgtcagaaccgggatggctgatgctcgccgccgactattcgcagatcgaactgcgcgtgctcgcgcacgtttccggcgacgaacggctgaaggaagcgtttcggacaggcatggacatccacacgaagaccgcgatggacgtgttcggcgtttccgaagaccgcgtcgacgcgcgcatgcggcggcaggcgaaggcggtcaatttcggcatcatctacggcatcagcgatttcggactggcgcaaaacctgaacatttcccgcaaggaggcggcggagttcatccggcaatatttcgccgtcttttcgggcgtcaaggcgtaccgcgagcggatcgtcgagcaggcgcgccgcgacggttacgtgacgaccctgctcggtcgcaggcgctatttgccggacatcaacgcgtcgaattacaacctccgctcgttcactgagcggacggcgatgaatacgccgatccagggcacggccgccgacatcatcaagaccgcgatggtgcgtctgacgcggcggatgcgcgacgtcggactgaagagccgcatgctgctgcaggttcacgacgagctcgtgtttgaagtgccgccggacgagctcgacgcgatgcgggagcttgtgacggacgtcatggagtcggcggtcccgctcgacgtgccgctgaaggtcgacgtcagctggggcgccgactggtacgcggcgaagtgagggaagcgggatcc

SEQ ID NO: 1337 - DNA, 2792 bp, Artificial Sequence
  Description of Artificial Sequence: Synthetic Caldibacillus cellulovorans CompA.2 DNA Polymerase A836W
atgaaatacctgctgccgaccgctgctgctggtctgctgctcctcgctgcccagccggcgatggccatgggcaaactgattctggtcgacggaaacagcgtcgccaaccgggcgttttacgccgtccggctgctcagcacgcgcggcggcctgcacacaaacgcggtgtacggattcgccaacatgttgctcaagctgatcgaggaggaacggccgacgcattttctcgtcgcgttcgacgcgggcaaggcgacgttccgtcatcgcgaatacgaggcctacaaggcgggtcgcctgcagacgccgcccgagctgtccgagcagtttccgtacatccgggagctcgtccgggcgttcggcgtcgcgtccggcgagctggaggaatacgaggcggacgacatgatcggtacgctggcgaaacgggcggaggccgagggcgtcgacacgctggtcgtcaccggcgaccgcgatttgctccagctcgtatcggaccgcgtgaccgtcgcgctgacgcgcaagggcatcacggaaacggagcggtacgacccggcgcgcatccgcgaggaatacggcttcgatcccgaccgcatccgcgacctcaaagggctgatgggcgacgcgtctgacaatcttcccggcgttcccggcgtcggtgagaaaaccgcactgaaactgctcaggcagtacggttcgctggagagcgtcctggaacacgcgtcggaaatcgccggaaagctcggtgaaaatctgcgggcgcacgccgacgccgcccgattgagcaagcggctggcgacgatcgactgcgcggtaccgttgcagtcgggatgggactggctgcgcctcggcgaaccggaccgcgccgcgctcgcctcgctgttgcggcagctcgaattcaagtcgctgttgaaacggctcggactcgacggcacgtccgccgatgccgacgtcgacggcgtccgttcctccgcgcggccggcggacgagaaacggccgagggccgtcgccgtcgctgaggagggcgtcgacgtccgctgtccggatcgcccggaagaagtcgaagaagcgctgtcgcggctggaagccgcccagtcggtcgtcgtcgaggtgacgggcgacaacccgcacgacggcgaagtgcgcggcgtcgcatggtgggacggacatacggcgtatttcattccgtttgaacggctggtgcagtccgacatgcggccgctggccgactggctcgccgacgcgcgtcggccgaagcgtacgcacgactcccatcgcgctgaagtggcgctgttctggcacggccttgcgtttcgcggcacgtcgttctgcacgcatatcgccgcctatttgctcgaccccacggaatcgcgccatacgctggcggacctgtcgcgccgctacggtctgccgccggtaccggaagccgaggacgtttacggcaagggcgcgaagttcaaggttcccgatcgcgacacgctggcgcgttacgtcggccgcaaggccgccctagtcgcgcggctcgttccgctgctcgaggcggatttggcggcctgcggcatgcgttcgcttttttacgacctggagctgccgctttcatccgaactcgccgtcatggagacggtcggcgtccgcgtcgacgcggcggcgctcgccgcctacggcgaggaattgcgcgaggcggcggcgaaagtcgagcgggagatttacgagctggccgggacgacgttcaacatcggatcgacgaaacagctcggcgaaattttgttcgataagctggggctgcccgtcgtcaagaaaacgaaaaccggctattccaccgacgcagacgtgctggaggaactggcgccgtaccatccgatcgtcgaaaagattttgcattaccgccaactgacgaaattgcagtcgacctacatcgaggggcttttgaaagaaatccgtccgcaaaccggtaaaatccatacgtattatcagcagacgatcgcggcgacggggcggctgagcagtcagtttcccaatcttcagaacattccgatccgtctcgaagaggggcggaaaatccgcaaggcgttcgttccgtcagaaccgggatggctgatgctcgccgccgactattcgcagatcgaactgcgcgtgctcgcgcacgtttccggcgacgaacggctgaaggaagcgtttcggacaggcatggacatccacacgaagaccgcgatggacgtgttcggcgtttccgaagaccgcgtcgacgcgcgcatgcggcggcaggcgaaggcggtcaatttcggcatcatctacggcatcagcgatttcggactggcgcaaaacctgaacatttcccgcaaggaggcggcggagttcatccggcaatatttcgccgtcttttcgggcgtcaaggcgtaccgcgagcggatcgtcgagcaggcgcgccgcgacggttacgtgacgaccctgctcggtcgcaggcgctatttgccggacatcaacgcgtcgaattacaacctccgctcgttctgggagcggacggcgatgaatacgccgatccagggcacggccgccgacatcatcaagaccgcgatggtgcgtctgacgcggcggatgcgcgacgtcggactgaagagccgcatgctgctgcaggttcacgacgagctcgtgtttgaagtgccgccggacgagctcgacgcgatgcgggagcttgtgacggacgtcatggagtcggcggtcccgctcgacgtgccgctgaaggtcgacgtcagctggggcgccgactggtacgcggcgaagtgagggaagcgggatcc

SEQ ID NO: 1338 - DNA, 2792 bp, Artificial Sequence
  Description of Artificial Sequence: Synthetic Caldibacillus cellulovorans CompA.2 DNA Polymerase A836Y
atgaaatacctgctgccgaccgctgctgctggtctgctgctcctcgctgcccagccggcgatggccatgggcaaactgattctggtcgacggaaacagcgtcgccaaccgggcgttttacgccgtccggctgctcagcacgcgcggcggcctgcacacaaacgcggtgtacggattcgccaacatgttgctcaagctgatcgaggaggaacggccgacgcattttctcgtcgcgttcgacgcgggcaaggcgacgttccgtcatcgcgaatacgaggcctacaaggcgggtcgcctgcagacgccgcccgagctgtccgagcagtttccgtacatccgggagctcgtccgggcgttcggcgtcgcgtccggcgagctggaggaatacgaggcggacgacatgatcggtacgctggcgaaacgggcggaggccgagggcgtcgacacgctggtcgtcaccggcgaccgcgatttgctccagctcgtatcggaccgcgtgaccgtcgcgctgacgcgcaagggcatcacggaaacggagcggtacgacccggcgcgcatccgcgaggaatacggcttcgatcccgaccgcatccgcgacctcaaagggctgatgggcgacgcgtctgacaatcttcccggcgttcccggcgtcggtgagaaaaccgcactgaaactgctcaggcagtacggttcgctggagagcgtcctggaacacgcgtcggaaatcgccggaaagctcggtgaaaatctgcgggcgcacgccgacgccgcccgattgagcaagcggctggcgacgatcgactgcgcggtaccgttgcagtcgggatgggactggctgcgcctcggcgaaccggaccgcgccgcgctcgcctcgctgttgcggcagctcgaattcaagtcgctgttgaaacggctcggactcgacggcacgtccgccgatgccgacgtcgacggcgtccgttcctccgcgcggccggcggacgagaaacggccgagggccgtcgccgtcgctgaggagggcgtcgacgtccgctgtccggatcgcccggaagaagtcgaagaagcgctgtcgcggctggaagccgcccagtcggtcgtcgtcgaggtgacgggcgacaacccgcacgacggcgaagtgcgcggcgtcgcatggtgggacggacatacggcgtatttcattccgtttgaacggctggtgcagtccgacatgcggccgctggccgactggctcgccgacgcgcgtcggccgaagcgtacgcacgactcccatcgcgctgaagtggcgctgttctggcacggccttgcgtttcgcggcacgtcgttctgcacgcatatcgccgcctatttgctcgaccccacggaatcgcgccatacgctggcggacctgtcgcgccgctacggtctgccgccggtaccggaagccgaggacgtttacggcaagggcgcgaagttcaaggttcccgatcgcgacacgctggcgcgttacgtcggccgcaaggccgccctagtcgcgcggctcgttccgctgctcgaggcggatttggcggcctgcggcatgcgttcgcttttttacgacctggagctgccgctttcatccgaactcgccgtcatggagacggtcggcgtccgcgtcgacgcggcggcgctcgccgcctacggcgaggaattgcgcgaggcggcggcgaaagtcgagcgggagatttacgagctggccgggacgacgttcaacatcggatcgacgaaacagctcggcgaaattttgttcgataagctggggctgcccgtcgtcaagaaaacgaaaaccggctattccaccgacgcagacgtgctggaggaactggcgccgtaccatccgatcgtcgaaaagattttgcattaccgccaactgacgaaattgcagtcgacctacatcgaggggcttttgaaagaaatccgtccgcaaaccggtaaaatccatacgtattatcagcagacgatcgcggcgacggggcggctgagcagtcagtttcccaatcttcagaacattccgatccgtctcgaagaggggcggaaaatccgcaaggcgttcgttccgtcagaaccgggatggctgatgctcgccgccgactattcgcagatcgaactgcgcgtgctcgcgcacgtttccggcgacgaacggctgaaggaagcgtttcggacaggcatggacatccacacgaagaccgcgatggacgtgttcggcgtttccgaagaccgcgtcgacgcgcgcatgcggcggcaggcgaaggcggtcaatttcggcatcatctacggcatcagcgatttcggactggcgcaaaacctgaacatttcccgcaaggaggcggcggagttcatccggcaatatttcgccgtcttttcgggcgtcaaggcgtaccgcgagcggatcgtcgagcaggcgcgccgcgacggttacgtgacgaccctgctcggtcgcaggcgctatttgccggacatcaacgcgtcgaattacaacctccgctcgttctatgagcggacggcgatgaatacgccgatccagggcacggccgccgacatcatcaagaccgcgatggtgcgtctgacgcggcggatgcgcgacgtcggactgaagagccgcatgctgctgcaggttcacgacgagctcgtgtttgaagtgccgccggacgagctcgacgcgatgcgggagcttgtgacggacgtcatggagtcggcggtcccgctcgacgtgccgctgaaggtcgacgtcagctggggcgccgactggtacgcggcgaagtgagggaagcgggatcc

SEQ ID NO: 1339 - DNA, 2792 bp, Artificial Sequence; identical to SEQ ID NO: 1330
  Description of Artificial Sequence: Synthetic Caldibacillus cellulovorans CompA.2 DNA Polymerase A836V

SEQ ID NO: 1340 - DNA, 2792 bp, Artificial Sequence
  Description of Artificial Sequence: Synthetic Caldibacillus cellulovorans CompA.2 DNA Polymerase E837A
atgaaatacctgctgccgaccgctgctgctggtctgctgctcctcgctgcccagccggcgatggccatgggcaaactgattctggtcgacggaaacagcgtcgccaaccgggcgttttacgccgtccggctgctcagcacgcgcggcggcctgcacacaaacgcggtgtacggattcgccaacatgttgctcaagctgatcgaggaggaacggccgacgcattttctcgtcgcgttcgacgcgggcaaggcgacgttccgtcatcgcgaatacgaggcctacaaggcgggtcgcctgcagacgccgcccgagctgtccgagcagtttccgtacatccgggagctcgtccgggcgttcggcgtcgcgtccggcgagctggaggaatacgaggcggacgacatgatcggtacgctggcgaaacgggcggaggccgagggcgtcgacacgctggtcgtcaccggcgaccgcgatttgctccagctcgtatcggaccgcgtgaccgtcgcgctgacgcgcaagggcatcacggaaacggagcggtacgacccggcgcgcatccgcgaggaatacggcttcgatcccgaccgcatccgcgacctcaaagggctgatgggcgacgcgtctgacaatcttcccggcgttcccggcgtcggtgagaaaaccgcactgaaactgctcaggcagtacggttcgctggagagcgtcctggaacacgcgtcggaaatcgccggaaagctcggtgaaaatctgcgggcgcacgccgacgccgcccgattgagcaagcggctggcgacgatcgactgcgcggtaccgttgcagtcgggatgggactggctgcgcctcggcgaaccggaccgcgccgcgctcgcctcgctgttgcggcagctcgaattcaagtcgctgttgaaacggctcggactcgacggcacgtccgccgatgccgacgtcgacggcgtccgttcctccgcgcggccggcggacgagaaacggccgagggccgtcgccgtcgctgaggagggcgtcgacgtccgctgtccggatcgcccggaagaagtcgaagaagcgctgtcgcggctggaagccgcccagtcggtcgtcgtcgaggtgacgggcgacaacccgcacgacggcgaagtgcgcggcgtcgcatggtgggacggacatacggcgtatttcattccgtttgaacggctggtgcagtccgacatgcggccgctggccgactggctcgccgacgcgcgtcggccgaagcgtacgcacgactcccatcgcgctgaagtggcgctgttctggcacggccttgcgtttcgcggcacgtcgttctgcacgcatatcgccgcctatttgctcgaccccacggaatcgcgccatacgctggcggacctgtcgcgccgctacggtctgccgccggtaccggaagccgaggacgtttacggcaagggcgcgaagttcaaggttcccgatcgcgacacgctggcgcgttacgtcggccgcaaggccgccctagtcgcgcggctcgttccgctgctcgaggcggatttggcggcctgcggcatgcgttcgcttttttacgacctggagctgccgctttcatccgaactcgccgtcatggagacggtcggcgtccgcgtcgacgcggcggcgctcgccgcctacggcgaggaattgcgcgaggcggcggcgaaagtcgagcgggagatttacgagctggccgggacgacgttcaacatcggatcgacgaaacagctcggcgaaattttgttcgataagctggggctgcccgtcgtcaagaaaacgaaaaccggctattccaccgacgcagacgtgctggaggaactggcgccgtaccatccgatcgtcgaaaagattttgcattaccgccaactgacgaaattgcagtcgacctacatcgaggggcttttgaaagaaatccgtccgcaaaccggtaaaatccatacgtattatcagcagacgatcgcggcgacggggcggctgagcagtcagtttcccaatcttcagaacattccgatccgtctcgaagaggggcggaaaatccgcaaggcgttcgttccgtcagaaccgggatggctgatgctcgccgccgactattcgcagatcgaactgcgcgtgctcgcgcacgtttccggcgacgaacggctgaaggaagcgtttcggacaggcatggacatccacacgaagaccgcgatggacgtgttcggcgtttccgaagaccgcgtcgacgcgcgcatgcggcggcaggcgaaggcggtcaatttcggcatcatctacggcatcagcgatttcggactggcgcaaaacctgaacatttcccgcaaggaggcggcggagttcatccggcaatatttcgccgtcttttcgggcgtcaaggcgtaccgcgagcggatcgtcgagcaggcgcgccgcgacggttacgtgacgaccctgctcggtcgcaggcgctatttgccggacatcaacgcgtcgaattacaacctccgctcgttcgcggctcggacggcgatgaatacgccgatccagggcacggccgccgacatcatcaagaccgcgatggtgcgtctgacgcggcggatgcgcgacgtcggactgaagagccgcatgctgctgcaggttcacgacgagctcgtgtttgaagtgccgccggacgagctcgacgcgatgcgggagcttgtgacggacgtcatggagtcggcggtcccgctcgacgtgccgctgaaggtcgacgtcagctggggcgccgactggtacgcggcgaagtgagggaagcgggatcc

SEQ ID NO: 1341 - DNA, 2792 bp, Artificial Sequence
  Description of Artificial Sequence: Synthetic Caldibacillus cellulovorans CompA.2 DNA Polymerase E837R
atgaaatacctgctgccgaccgctgctgctggtctgctgctcctcgctgcccagccggcgatggccatgggcaaactgattctggtcgacggaaacagcgtcgccaaccgggcgttttacgccgtccggctgctcagcacgcgcggcggcctgcacacaaacgcggtgtacggattcgccaacatgttgctcaagctgatcgaggaggaacggccgacgcattttctcgtcgcgttcgacgcgggcaaggcgacgttccgtcatcgcgaatacgaggcctacaaggcgggtcgcctgcagacgccgcccgagctgtccgagcagtttccgtacatccgggagctcgtccgggcgttcggcgtcgcgtccggcgagctggaggaatacgaggcggacgacatgatcggtacgctggcgaaacgggcggaggccgagggcgtcgacacgctggtcgtcaccggcgaccgcgatttgctccagctcgtatcggaccgcgtgaccgtcgcgctgacgcgcaagggcatcacggaaacggagcggtacgacccggcgcgcatccgcgaggaatacggcttcgatcccgaccgcatccgcgacctcaaagggctgatgggcgacgcgtctgacaatcttcccggcgttcccggcgtcggtgagaaaaccgcactgaaactgctcaggcagtacggttcgctggagagcgtcctggaacacgcgtcggaaatcgccggaaagctcggtgaaaatctgcgggcgcacgccgacgccgcccgattgagcaagcggctggcgacgatcgactgcgcggtaccgttgcagtcgggatgggactggctgcgcctcggcgaaccggaccgcgccgcgctcgcctcgctgttgcggcagctcgaattcaagtcgctgttgaaacggctcggactcgacggcacgtccgccgatgccgacgtcgacggcgtccgttcctccgcgcggccggcggacgagaaacggccgagggccgtcgccgtcgctgaggagggcgtcgacgtccgctgtccggatcgcccggaagaagtcgaagaagcgctgtcgcggctggaagccgcccagtcggtcgtcgtcgaggtgacgggcgacaacccgcacgacggcgaagtgcgcggcgtcgcatggtgggacggacatacggcgtatttcattccgtttgaacggctggtgcagtccgacatgcggccgctggccgactggctcgccgacgcgcgtcggccgaagcgtacgcacgactcccatcgcgctgaagtggcgctgttctggcacggccttgcgtttcgcggcacgtcgttctgcacgcatatcgccgcctatttgctcgaccccacggaatcgcgccatacgctggcggacctgtcgcgccgctacggtctgccgccggtaccggaagccgaggacgtttacggcaagggcgcgaagttcaaggttcccgatcgcgacacgctggcgcgttacgtcggccgcaaggccgccctagtcgcgcggctcgttccgctgctcgaggcggatttggcggcctgcggcatgcgttcgcttttttacgacctggagctgccgctttcatccgaactcgccgtcatggagacggtcggcgtccgcgtcgacgcggcggcgctcgccgcctacggcgaggaattgcgcgaggcggcggcgaaagtcgagcgggagatttacgagctggccgggacgacgttcaacatcggatcgacgaaacagctcggcgaaattttgttcgataagctggggctgcccgtcgtcaagaaaacgaaaaccggctattccaccgacgcagacgtgctggaggaactggcgccgtaccatccgatcgtcgaaaagattttgcattaccgccaactgacgaaattgcagtcgacctacatcgaggggcttttgaaagaaatccgtccgcaaaccggtaaaatccatacgtattatcagcagacgatcgcggcgacggggcggctgagcagtcagtttcccaatcttcagaacattccgatccgtctcgaagaggggcggaaaatccgcaaggcgttcgttccgtcagaaccgggatggctgatgctcgccgccgactattcgcagatcgaactgcgcgtgctcgcgcacgtttccggcgacgaacggctgaaggaagcgtttcggacaggcatggacatccacacgaagaccgcgatggacgtgttcggcgtttccgaagaccgcgtcgacgcgcgcatgcggcggcaggcgaaggcggtcaatttcggcatcatctacggcatcagcgatttcggactggcgcaaaacctgaacatttcccgcaaggaggcggcggagttcatccggcaatatttcgccgtcttttcgggcgtcaaggcgtaccgcgagcggatcgtcgagcaggcgcgccgcgacggttacgtgacgaccctgctcggtcgcaggcgctatttgccggacatcaacgcgtcgaattacaacctccgctcgttcgcgcgtcggacggcgatgaatacgccgatccagggcacggccgccgacatcatcaagaccgcgatggtgcgtctgacgcggcggatgcgcgacgtcggactgaagagccgcatgctgctgcaggttcacgacgagctcgtgtttgaagtgccgccggacgagctcgacgcgatgcgggagcttgtgacggacgtcatggagtcggcggtcccgctcgacgtgccgctgaaggtcgacgtcagctggggcgccgactggtacgcggcgaagtgagggaagcgggatcc

SEQ ID NO: 1342 - DNA, 2792 bp, Artificial Sequence
  Description of Artificial Sequence: Synthetic Caldibacillus cellulovorans CompA.2 DNA Polymerase E837N
atgaaatacctgctgccgaccgctgctgctggtctgctgctcctcgctgcccagccggcgatggccatgggcaaactgattctggtcgacggaaacagcgtcgccaaccgggcgttttacgccgtccggctgctcagcacgcgcggcggcctgcacacaaacgcggtgtacggattcgccaacatgttgctcaagctgatcgaggaggaacggccgacgcattttctcgtcgcgttcgacgcgggcaaggcgacgttccgtcatcgcgaatacgaggcctacaaggcgggtcgcctgcagacgccgcccgagctgtccgagcagtttccgtacatccgggagctcgtccgggcgttcggcgtcgcgtccggcgagctggaggaatacgaggcggacgacatgatcggtacgctggcgaaacgggcggaggccgagggcgtcgacacgctggtcgtcaccggcgaccgcgatttgctccagctcgtatcggaccgcgtgaccgtcgcgctgacgcgcaagggcatcacggaaacggagcggtacgacccggcgcgcatccgcgaggaatacggcttcgatcccgaccgcatccgcgacctcaaagggctgatgggcgacgcgtctgacaatcttcccggcgttcccggcgtcggtgagaaaaccgcactgaaactgctcaggcagtacggttcgctggagagcgtcctggaacacgcgtcggaaatcgccggaaagctcggtgaaaatctgcgggcgcacgccgacgccgcccgattgagcaagcggctggcgacgatcgactgcgcggtaccgttgcagtcgggatgggactggctgcgcctcggcgaaccggaccgcgccgcgctcgcctcgctgttgcggcagctcgaattcaagtcgctgttgaaacggctcggactcgacggcacgtccgccgatgccgacgtcgacggcgtccgttcctccgcgcggccggcggacgagaaacggccgagggccgtcgccgtcgctgaggagggcgtcgacgtccgctgtccggatcgcccggaagaagtcgaagaagcgctgtcgcggctggaagccgcccagtcggtcgtcgtcgaggtgacgggcgacaacccgcacgacggcgaagtgcgcggcgtcgcatggtgggacggacatacggcgtatttcattccgtttgaacggctggtgcagtccgacatgcggccgctggccgactggctcgccgacgcgcgtcggccgaagcgtacgcacgactcccatcgcgctgaagtggcgctgttctggcacggccttgcgtttcgcggcacgtcgttctgcacgcatatcgccgcctatttgctcgaccccacggaatcgcgccatacgctggcggacctgtcgcgccgctacggtctgccgccggtaccggaagccgaggacgtttacggcaagggcgcgaagttcaaggttcccgatcgcgacacgctggcgcgttacgtcggccgcaaggccgccctagtcgcgcggctcgttccgctgctcgaggcggatttggcggcctgcggcatgcgttcgcttttttacgacctggagctgccgctttcatccgaactcgccgtcatggagacggtcggcgtccgcgtcgacgcggcggcgctcgccgcctacggcgaggaattgcgcgaggcggcggcgaaagtcgagcgggagatttacgagctggccgggacgacgttcaacatcggatcgacgaaacagctcggcgaaattttgttcgataagctggggctgcccgtcgtcaagaaaacgaaaaccggctattccaccgacgcagacgtgctggaggaactggcgccgtaccatccgatcgtcgaaaagattttgcattaccgccaactgacgaaattgcagtcgacctacatcgaggggcttttgaaagaaatccgtccgcaaaccggtaaaatccatacgtattatcagcagacgatcgcggcgacggggcggctgagcagtcagtttcccaatcttcagaacattccgatccgtctcgaagaggggcggaaaatccgcaaggcgttcgttccgtcagaaccgggatggctgatgctcgccgccgactattcgcagatcgaactgcgcgtgctcgcgcacgtttccggcgacgaacggctgaaggaagcgtttcggacaggcatggacatccacacgaagaccgcgatggacgtgttcggcgtttccgaagaccgcgtcgacgcgcgcatgcggcggcaggcgaaggcggtcaatttcggcatcatctacggcatcagcgatttcggactggcgcaaaacctgaacatttcccgcaaggaggcggcggagttcatccggcaatatttcgccgtcttttcgggcgtcaaggcgtaccgcgagcggatcgtcgagcaggcgcgccgcgacggttacgtgacgaccctgctcggtcgcaggcgctatttgccggacatcaacgcgtcgaattacaacctccgctcgttcgcgaatcggacggcgatgaatacgccgatccagggcacggccgccgacatcatcaagaccgcgatggtgcgtctgacgcggcggatgcgcgacgtcggactgaagagccgcatgctgctgcaggttcacgacgagctcgtgtttgaagtgccgccggacgagctcgacgcgatgcgggagcttgtgacggacgtcatggagtcggcggtcccgctcgacgtgccgctgaaggtcgacgtcagctggggcgccgactggtacgcggcgaagtgagggaagcgggatcc

SEQ ID NO: 1343 - DNA, 2792 bp, Artificial Sequence
  Description of Artificial Sequence: Synthetic Caldibacillus cellulovorans CompA.2 DNA Polymerase E837D
atgaaatacctgctgccgaccgctgctgctggtctgctgctcctcgctgcccagccggcgatggccatgggcaaactgattctggtcgacggaaacagcgtcgccaaccgggcgttttacgccgtccggctgctcagcacgcgcggcggcctgcacacaaacgcggtgtacggattcgccaacatgttgctcaagctgatcgaggaggaacggccgacgcattttctcgtcgcgttcgacgcgggcaaggcgacgttccgtcatcgcgaatacgaggcctacaaggcgggtcgcctgcagacgccgcccgagctgtccgagcagtttccgtacatccgggagctcgtccgggcgttcggcgtcgcgtccggcgagctggaggaatacgaggcggacgacatgatcggtacgctggcgaaacgggcggaggccgagggcgtcgacacgctggtcgtcaccggcgaccgcgatttgctccagctcgtatcggaccgcgtgaccgtcgcgctgacgcgcaagggcatcacggaaacggagcggtacgacccggcgcgcatccgcgaggaatacggcttcgatcccgaccgcatccgcgacctcaaagggctgatgggcgacgcgtctgacaatcttcccggcgttcccggcgtcggtgagaaaaccgcactgaaactgctcaggcagtacggttcgctggagagcgtcctggaacacgcgtcggaaatcgccggaaagctcggtgaaaatctgcgggcgcacgccgacgccgcccgattgagcaagcggctggcgacgatcgactgcgcggtaccgttgcagtcgggatgggactggctgcgcctcggcgaaccggaccgcgccgcgctcgcctcgctgttgcggcagctcgaattcaagtcgctgttgaaacggctcggactcgacggcacgtccgccgatgccgacgtcgacggcgtccgttcctccgcgcggccggcggacgagaaacggccgagggccgtcgccgtcgctgaggagggcgtcgacgtccgctgtccggatcgcccggaagaagtcgaagaagcgctgtcgcggctggaagccgcccagtcggtcgtcgtcgaggtgacgggcgacaacccgcacgacggcgaagtgcgcggcgtcgcatggtgggacggacatacggcgtatttcattccgtttgaacggctggtgcagtccgacatgcggccgctggccgactggctcgccgacgcgcgtcggccgaagcgtacgcacgactcccatcgcgctgaagtggcgctgttctggcacggccttgcgtttcgcggcacgtcgttctgcacgcatatcgccgcctatttgctcgaccccacggaatcgcgccatacgctggcggacctgtcgcgccgctacggtctgccgccggtaccggaagccgaggacgtttacggcaagggcgcgaagttcaaggttcccgatcgcgacacgctggcgcgttacgtcggccgcaaggccgccctagtcgcgcggctcgttccgctgctcgaggcggatttggcggcctgcggcatgcgttcgcttttttacgacctggagctgccgctttcatccgaactcgccgtcatggagacggtcggcgtccgcgtcgacgcggcggcgctcgccgcctacggcgaggaattgcgcgaggcggcggcgaaagtcgagcgggagatttacgagctggccgggacgacgttcaacatcggatcgacgaaacagctcggcgaaattttgttcgataagctggggctgcccgtcgtcaagaaaacgaaaaccggctattccaccgacgcagacgtgctggaggaactggcgccgtaccatccgatcgtcgaaaagattttgcattaccgccaactgacgaaattgcagtcgacctacatcgaggggcttttgaaagaaatccgtccgcaaaccggtaaaatccatacgtattatcagcagacgatcgcggcgacggggcggctgagcagtcagtttcccaatcttcagaacattccgatccgtctcgaagaggggcggaaaatccgcaaggcgttcgttccgtcagaaccgggatggctgatgctcgccgccgactattcgcagatcgaactgcgcgtgctcgcgcacgtttccggcgacgaacggctgaaggaagcgtttcggacaggcatggacatccacacgaagaccgcgatggacgtgttcggcgtttccgaagaccgcgtcgacgcgcgcatgcggcggcaggcgaaggcggtcaatttcggcatcatctacggcatcagcgatttcggactggcgcaaaacctgaacatttcccgcaaggaggcggcggagttcatccggcaatatttcgccgtcttttcgggcgtcaaggcgtaccgcgagcggatcgtcgagcaggcgcgccgcgacggttacgtgacgaccctgctcggtcgcaggcgctatttgccggacatcaacgcgtcgaattacaacctccgctcgttcgcggatcggacggcgatgaatacgccgatccagggcacggccgccgacatcatcaagaccgcgatggtgcgtctgacgcggcggatgcgcgacgtcggactgaagagccgcatgctgctgcaggttcacgacgagctcgtgtttgaagtgccgccggacgagctcgacgcgatgcgggagcttgtgacggacgtcatggagtcggcggtcccgctcgacgtgccgctgaaggtcgacgtcagctggggcgccgactggtacgcggcgaagtgagggaagcgggatcc

SEQ ID NO: 1344 - DNA, 2792 bp, Artificial Sequence
  Description of Artificial Sequence: Synthetic Caldibacillus cellulovorans CompA.2 DNA Polymerase E837C
atgaaatacctgctgccgaccgctgctgctggtctgctgctcctcgctgcccagccggcgatggccatgggcaaactgattctggtcgacggaaacagcgtcgccaaccgggcgttttacgccgtccggctgctcagcacgcgcggcggcctgcacacaaacgcggtgtacggattcgccaacatgttgctcaagctgatcgaggaggaacggccgacgcattttctcgtcgcgttcgacgcgggcaaggcgacgttccgtcatcgcgaatacgaggcctacaaggcgggtcgcctgcagacgccgcccgagctgtccgagcagtttccgtacatccgggagctcgtccgggcgttcggcgtcgcgtccggcgagctggaggaatacgaggcggacgacatgatcggtacgctggcgaaacgggcggaggccgagggcgtcgacacgctggtcgtcaccggcgaccgcgatttgctccagctcgtatcggaccgcgtgaccgtcgcgctgacgcgcaagggcatcacggaaacggagcggtacgacccggcgcgcatccgcgaggaatacggcttcgatcccgaccgcatccgcgacctcaaagggctgatgggcgacgcgtctgacaatcttcccggcgttcccggcgtcggtgagaaaaccgcactgaaactgctcaggcagtacggttcgctggagagcgtcctggaacacgcgtcggaaatcgccggaaagctcggtgaaaatctgcgggcgcacgccgacgccgcccgattgagcaagcggctggcgacgatcgactgcgcggtaccgttgcagtcgggatgggactggctgcgcctcggcgaaccggaccgcgccgcgctcgcctcgctgttgcggcagctcgaattcaagtcgctgttgaaacggctcggactcgacggcacgtccgccgatgccgacgtcgacggcgtccgttcctccgcgcggccggcggacgagaaacggccgagggccgtcgccgtcgctgaggagggcgtcgacgtccgctgtccggatcgcccggaagaagtcgaagaagcgctgtcgcggctggaagccgcccagtcggtcgtcgtcgaggtgacgggcgacaacccgcacgacggcgaagtgcgcggcgtcgcatggtgggacggacatacggcgtatttcattccgtttgaacggctggtgcagtccgacatgcggccgctggccgactggctcgccgacgcgcgtcggccgaagcgtacgcacgactcccatcgcgctgaagtggcgctgttctggcacggccttgcgtttcgcggcacgtcgttctgcacgcatatcgccgcctatttgctcgaccccacggaatcgcgccatacgctggcggacctgtcgcgccgctacggtctgccgccggtaccggaagccgaggacgtttacggcaagggcgcgaagttcaaggttcccgatcgcgacacgctggcgcgttacgtcggccgcaaggccgccctagtcgcgcggctcgttccgctgctcgaggcggatttggcggcctgcggcatgcgttcgcttttttacgacctggagctgccgctttcatccgaactcgccgtcatggagacggtcggcgtccgcgtcgacgcggcggcgctcgccgcctacggcgaggaattgcgcgaggcggcggcgaaagtcgagcgggagatttacgagctggccgggacgacgttcaacatcggatcgacgaaacagctcggcgaaattttgttcgataagctggggctgcccgtcgtcaagaaaacgaaaaccggctattccaccgacgcagacgtgctggaggaactggcgccgtaccatccgatcgtcgaaaagattttgcattaccgccaactgacgaaattgcagtcgacctacatcgaggggcttttgaaagaaatccgtccgcaaaccggtaaaatccatacgtattatcagcagacgatcgcggcgacggggcggctgagcagtcagtttcccaatcttcagaacattccgatccgtctcgaagaggggcggaaaatccgcaaggcgttcgttccgtcagaaccgggatggctgatgctcgccgccgactattcgcagatcgaactgcgcgtgctcgcgcacgtttccggcgacgaacggctgaaggaagcgtttcggacaggcatggacatccacacgaagaccgcgatggacgtgttcggcgtttccgaagaccgcgtcgacgcgcgcatgcggcggcaggcgaaggcggtcaatttcggcatcatctacggcatcagcgatttcggactggcgcaaaacctgaacatttcccgcaaggaggcggcggagttcatccggcaatatttcgccgtcttttcgggcgtcaaggcgtaccgcgagcggatcgtcgagcaggcgcgccgcgacggttacgtgacgaccctgctcggtcgcaggcgctatttgccggacatcaacgcgtcgaattacaacctccgctcgttcgcgtgtcggacggcgatgaatacgccgatccagggcacggccgccgacatcatcaagaccgcgatggtgcgtctgacgcggcggatgcgcgacgtcggactgaagagccgcatgctgctgcaggttcacgacgagctcgtgtttgaagtgccgccggacgagctcgacgcgatgcgggagcttgtgacggacgtcatggagtcggcggtcccgctcgacgtgccgctgaaggtcgacgtcagctggggcgccgactggtacgcggcgaagtgagggaagcgggatcc

SEQ ID NO: 1345 - DNA, 2792 bp, Artificial Sequence
  Description of Artificial Sequence: Synthetic Caldibacillus cellulovorans CompA.2 DNA Polymerase E837Q
atgaaatacctgctgccgaccgctgctgctggtctgctgctcctcgctgcccagccggcgatggccatgggcaaactgattctggtcgacggaaacagcgtcgccaaccgggcgttttacgccgtccggctgctcagcacgcgcggcggcctgcacacaaacgcggtgtacggattcgccaacatgttgctcaagctgatcgaggaggaacggccgacgcattttctcgtcgcgttcgacgcgggcaaggcgacgttccgtcatcgcgaatacgaggcctacaaggcgggtcgcctgcagacgccgcccgagctgtccgagcagtttccgtacatccgggagctcgtccgggcgttcggcgtcgcgtccggcgagctggaggaatacgaggcggacgacatgatcggtacgctggcgaaacgggcggaggccgagggcgtcgacacgctggtcgtcaccggcgaccgcgatttgctccagctcgtatcggaccgcgtgaccgtcgcgctgacgcgcaagggcatcacggaaacggagcggtacgacccggcgcgcatccgcgaggaatacggcttcgatcccgaccgcatccgcgacctcaaagggctgatgggcgacgcgtctgacaatcttcccggcgttcccggcgtcggtgagaaaaccgcactgaaactgctcaggcagtacggttcgctggagagcgtcctggaacacgcgtcggaaatcgccggaaagctcggtgaaaatctgcgggcgcacgccgacgccgcccgattgagcaagcggctggcgacgatcgactgcgcggtaccgttgcagtcgggatgggactggctgcgcctcggcgaaccggaccgcgccgcgctcgcctcgctgttgcggcagctcgaattcaagtcgctgttgaaacggctcggactcgacggcacgtccgccgatgccgacgtcgacggcgtccgttcctccgcgcggccggcggacgagaaacggccgagggccgtcgccgtcgctgaggagggcgtcgacgtccgctgtccggatcgcccggaagaagtcgaagaagcgctgtcgcggctggaagccgcccagtcggtcgtcgtcgaggtgacgggcgacaacccgcacgacggcgaagtgcgcggcgtcgcatggtgggacggacatacggcgtatttcattccgtttgaacggctggtgcagtccgacatgcggccgctggccgactggctcgccgacgcgcgtcggccgaagcgtacgcacgactcccatcgcgctgaagtggcgctgttctggcacggccttgcgtttcgcggcacgtcgttctgcacgcatatcgccgcctatttgctcgaccccacggaatcgcgccatacgctggcggacctgtcgcgccgctacggtctgccgccggtaccggaagccgaggacgtttacggcaagggcgcgaagttcaaggttcccgatcgcgacacgctggcgcgttacgtcggccgcaaggccgccctagtcgcgcggctcgttccgctgctcgaggcggatttggcggcctgcggcatgcgttcgcttttttacgacctggagctgccgctttcatccgaactcgccgtcatggagacggtcggcgtccgcgtcgacgcggcggcgctcgccgcctacggcgaggaattgcgcgaggcggcggcgaaagtcgagcgggagatttacgagctggccgggacgacgttcaacatcggatcgacgaaacagctcggcgaaattttgttcgataagctggggctgcccgtcgtcaagaaaacgaaaaccggctattccaccgacgcagacgtgctggaggaactggcgccgtaccatccgatcgtcgaaaagattttgcattaccgccaactgacgaaattgcagtcgacctacatcgaggggcttttgaaagaaatccgtccgcaaaccggtaaaatccatacgtattatcagcagacgatcgcggcgacggggcggctgagcagtcagtttcccaatcttcagaacattccgatccgtctcgaagaggggcggaaaatccgcaaggcgttcgttccgtcagaaccgggatggctgatgctcgccgccgactattcgcagatcgaactgcgcgtgctcgcgcacgtttccggcgacgaacggctgaaggaagcgtttcggacaggcatggacatccacacgaagaccgcgatggacgtgttcggcgtttccgaagaccgcgtcgacgcgcgcatgcggcggcaggcgaaggcggtcaatttcggcatcatctacggcatcagcgatttcggactggcgcaaaacctgaacatttcccgcaaggaggcggcggagttcatccggcaatatttcgccgtcttttcgggcgtcaaggcgtaccgcgagcggatcgtcgagcaggcgcgccgcgacggttacgtgacgaccctgctcggtcgcaggcgctatttgccggacatcaacgcgtcgaattacaacctccgctcgttcgcgcaacggacggcgatgaatacgccgatccagggcacggccgccgacatcatcaagaccgcgatggtgcgtctgacgcggcggatgcgcgacgtcggactgaagagccgcatgctgctgcaggttcacgacgagctcgtgtttgaagtgccgccggacgagctcgacgcgatgcgggagcttgtgacggacgtcatggagtcggcggtcccgctcgacgtgccgctgaaggtcgacgtcagctggggcgccgactggtacgcggcgaagtgagggaagcgggatcc

SEQ ID NO: 1346 - DNA, 2792 bp, Artificial Sequence
  Description of Artificial Sequence: Synthetic Caldibacillus cellulovorans CompA.2 DNA Polymerase E837G
atgaaatacctgctgccgaccgctgctgctggtctgctgctcctcgctgcccagccggcgatggccatgggcaaactgattctggtcgacggaaacagcgtcgccaaccgggcgttttacgccgtccggctgctcagcacgcgcggcggcctgcacacaaacgcggtgtacggattcgccaacatgttgctcaagctgatcgaggaggaacggccgacgcattttctcgtcgcgttcgacgcgggcaaggcgacgttccgtcatcgcgaatacgaggcctacaaggcgggtcgcctgcagacgccgcccgagctgtccgagcagtttccgtacatccgggagctcgtccgggcgttcggcgtcgcgtccggcgagctggaggaatacgaggcggacgacatgatcggtacgctggcgaaacgggcggaggccgagggcgtcgacacgctggtcgtcaccggcgaccgcgatttgctccagctcgtatcggaccgcgtgaccgtcgcgctgacgcgcaagggcatcacggaaacggagcggtacgacccggcgcgcatccgcgaggaatacggcttcgatcccgaccgcatccgcgacctcaaagggctgatgggcgacgcgtctgacaatcttcccggcgttcccggcgtcggtgagaaaaccgcactgaaactgctcaggcagtacggttcgctggagagcgtcctggaacacgcgtcggaaatcgccggaaagctcggtgaaaatctgcgggcgcacgccgacgccgcccgattgagcaagcggctggcgacgatcgactgcgcggtaccgttgcagtcgggatgggactggctgcgcctcggcgaaccggaccgcgccgcgctcgcctcgctgttgcggcagctcgaattcaagtcgctgttgaaacggctcggactcgacggcacgtccgccgatgccgacgtcgacggcgtccgttcctccgcgcggccggcggacgagaaacggccgagggccgtcgccgtcgctgaggagggcgtcgacgtccgctgtccggatcgcccggaagaagtcgaagaagcgctgtcgcggctggaagccgcccagtcggtcgtcgtcgaggtgacgggcgacaacccgcacgacggcgaagtgcgcggcgtcgcatggtgggacggacatacggcgtatttcattccgtttgaacggctggtgcagtccgacatgcggccgctggccgactggctcgccgacgcgcgtcggccgaagcgtacgcacgactcccatcgcgctgaagtggcgctgttctggcacggccttgcgtttcgcggcacgtcgttctgcacgcatatcgccgcctatttgctcgaccccacggaatcgcgccatacgctggcggacctgtcgcgccgctacggtctgccgccggtaccggaagccgaggacgtttacggcaagggcgcgaagttcaaggttcccgatcgcgacacgctggcgcgttacgtcggccgcaaggccgccctagtcgcgcggctcgttccgctgctcgaggcggatttggcggcctgcggcatgcgttcgcttttttacgacctggagctgccgctttcatccgaactcgccgtcatggagacggtcggcgtccgcgtcgacgcggcggcgctcgccgcctacggcgaggaattgcgcgaggcggcggcgaaagtcgagcgggagatttacgagctggccgggacgacgttcaacatcggatcgacgaaacagctcggcgaaattttgttcgataagctggggctgcccgtcgtcaagaaaacgaaaaccggctattccaccgacgcagacgtgctggaggaactggcgccgtaccatccgatcgtcgaaaagattttgcattaccgccaactgacgaaattgcagtcgacctacatcgaggggcttttgaaagaaatccgtccgcaaaccggtaaaatccatacgtattatcagcagacgatcgcggcgacggggcggctgagcagtcagtttcccaatcttcagaacattccgatccgtctcgaagaggggcggaaaatccgcaaggcgttcgttccgtcagaaccgggatggctgatgctcgccgccgactattcgcagatcgaactgcgcgtgctcgcgcacgtttccggcgacgaacggctgaaggaagcgtttcggacaggcatggacatccacacgaagaccgcgatggacgtgttcggcgtttccgaagaccgcgtcgacgcgcgcatgcggcggcaggcgaaggcggtcaatttcggcatcatctacggcatcagcgatttcggactggcgcaaaacctgaacatttcccgcaaggaggcggcggagttcatccggcaatatttcgccgtcttttcgggcgtcaaggcgtaccgcgagcggatcgtcgagcaggcgcgccgcgacggttacgtgacgaccctgctcggtcgcaggcgctatttgccggacatcaacgcgtcgaattacaacctccgctcgttcgcgggtcggacggcgatgaatacgccgatccagggcacggccgccgacatcatcaagaccgcgatggtgcgtctgacgcggcggatgcgcgacgtcggactgaagagccgcatgctgctgcaggttcacgacgagctcgtgtttgaagtgccgccggacgagctcgacgcgatgcgggagcttgtgacggacgtcatggagtcggcggtcccgctcgacgtgccgctgaaggtcgacgtcagctggggcgccgactggtacgcggcgaagtgagggaagcgggatcc

SEQ ID NO: 1347 - DNA, 2792 bp, Artificial Sequence
  Description of Artificial Sequence: Synthetic Caldibacillus cellulovorans CompA.2 DNA Polymerase E837H
atgaaatacctgctgccgaccgctgctgctggtctgctgctcctcgctgcccagccggcgatggccatgggcaaactgattctggtcgacggaaacagcgtcgccaaccgggcgttttacgccgtccggctgctcagcacgcgcggcggcctgcacacaaacgcggtgtacggattcgccaacatgttgctcaagctgatcgaggaggaacggccgacgcattttctcgtcgcgttcgacgcgggcaaggcgacgttccgtcatcgcgaatacgaggcctacaaggcgggtcgcctgcagacgccgcccgagctgtccgagcagtttccgtacatccgggagctcgtccgggcgttcggcgtcgcgtccggcgagctggaggaatacgaggcggacgacatgatcggtacgctggcgaaacgggcggaggccgagggcgtcgacacgctggtcgtcaccggcgaccgcgatttgctccagctcgtatcggaccgcgtgaccgtcgcgctgacgcgcaagggcatcacggaaacggagcggtacgacccggcgcgcatccgcgaggaatacggcttcgatcccgaccgcatccgcgacctcaaagggctgatgggcgacgcgtctgacaatcttcccggcgttcccggcgtcggtgagaaaaccgcactgaaactgctcaggcagtacggttcgctggagagcgtcctggaacacgcgtcggaaatcgccggaaagctcggtgaaaatctgcgggcgcacgccgacgccgcccgattgagcaagcggctggcgacgatcgactgcgcggtaccgttgcagtcgggatgggactggctgcgcctcggcgaaccggaccgcgccgcgctcgcctcgctgttgcggcagctcgaattcaagtcgctgttgaaacggctcggactcgacggcacgtccgccgatgccgacgtcgacggcgtccgttcctccgcgcggccggcggacgagaaacggccgagggccgtcgccgtcgctgaggagggcgtcgacgtccgctgtccggatcgcccggaagaagtcgaagaagcgctgtcgcggctggaagccgcccagtcggtcgtcgtcgaggtgacgggcgacaacccgcacgacggcgaagtgcgcggcgtcgcatggtgggacggacatacggcgtatttcattccgtttgaacggctggtgcagtccgacatgcggccgctggccgactggctcgccgacgcgcgtcggccgaagcgtacgcacgactcccatcgcgctgaagtggcgctgttctggcacggccttgcgtttcgcggcacgtcgttctgcacgcatatcgccgcctatttgctcgaccccacggaatcgcgccatacgctggcggacctgtcgcgccgctacggtctgccgccggtaccggaagccgaggacgtttacggcaagggcgcgaagttcaaggttcccgatcgcgacacgctggcgcgttacgtcggccgcaaggccgccctagtcgcgcggctcgttccgctgctcgaggcggatttggcggcctgcggcatgcgttcgcttttttacgacctggagctgccgctttcatccgaactcgccgtcatggagacggtcggcgtccgcgtcgacgcggcggcgctcgccgcctacggcgaggaattgcgcgaggcggcggcgaaagtcgagcgggagatttacgagctggccgggacgacgttcaacatcggatcgacgaaacagctcggcgaaattttgttcgataagctggggctgcccgtcgtcaagaaaacgaaaaccggctattccaccgacgcagacgtgctggaggaactggcgccgtaccatccgatcgtcgaaaagattttgcattaccgccaactgacgaaattgcagtcgacctacatcgaggggcttttgaaagaaatccgtccgcaaaccggtaaaatccatacgtattatcagcagacgatcgcggcgacggggcggctgagcagtcagtttcccaatcttcagaacattccgatccgtctcgaagaggggcggaaaatccgcaaggcgttcgttccgtcagaaccgggatggctgatgctcgccgccgactattcgcagatcgaactgcgcgtgctcgcgcacgtttccggcgacgaacggctgaaggaagcgtttcggacaggcatggacatccacacgaagaccgcgatggacgtgttcggcgtttccgaagaccgcgtcgacgcgcgcatgcggcggcaggcgaaggcggtcaatttcggcatcatctacggcatcagcgatttcggactggcgcaaaacctgaacatttcccgcaaggaggcggcggagttcatccggcaatatttcgccgtcttttcgggcgtcaaggcgtaccgcgagcggatcgtcgagcaggcgcgccgcgacggttacgtgacgaccctgctcggtcgcaggcgctatttgccggacatcaacgcgtcgaattacaacctccgctcgttcgcgcatcggacggcgatgaatacgccgatccagggcacggccgccgacatcatcaagaccgcgatggtgcgtctgacgcggcggatgcgcgacgtcggactgaagagccgcatgctgctgcaggttcacgacgagctcgtgtttgaagtgccgccggacgagctcgacgcgatgcgggagcttgtgacggacgtcatggagtcggcggtcccgctcgacgtgccgctgaaggtcgacgtcagctggggcgccgactggtacgcggcgaagtgagggaagcgggatcc

SEQ ID NO: 1348 - DNA, 2792 bp, Artificial Sequence
  Description of Artificial Sequence: Synthetic Caldibacillus cellulovorans CompA.2 DNA Polymerase E837I
atgaaatacctgctgccgaccgctgctgctggtctgctgctcctcgctgcccagccggcgatggccatgggcaaactgattctggtcgacggaaacagcgtcgccaaccgggcgttttacgccgtccggctgctcagcacgcgcggcggcctgcacacaaacgcggtgtacggattcgccaacatgttgctcaagctgatcgaggaggaacggccgacgcattttctcgtcgcgttcgacgcgggcaaggcgacgttccgtcatcgcgaatacgaggcctacaaggcgggtcgcctgcagacgccgcccgagctgtccgagcagtttccgtacatccgggagctcgtccgggcgttcggcgtcgcgtccggcgagctggaggaatacgaggcggacgacatgatcggtacgctggcgaaacgggcggaggccgagggcgtcgacacgctggtcgtcaccggcgaccgcgatttgctccagctcgtatcggaccgcgtgaccgtcgcgctgacgcgcaagggcatcacggaaacggagcggtacgacccggcgcgcatccgcgaggaatacggcttcgatcccgaccgcatccgcgacctcaaagggctgatgggcgacgcgtctgacaatcttcccggcgttcccggcgtcggtgagaaaaccgcactgaaactgctcaggcagtacggttcgctggagagcgtcctggaacacgcgtcggaaatcgccggaaagctcggtgaaaatctgcgggcgcacgccgacgccgcccgattgagcaagcggctggcgacgatcgactgcgcggtaccgttgcagtcgggatgggactggctgcgcctcggcgaaccggaccgcgccgcgctcgcctcgctgttgcggcagctcgaattcaagtcgctgttgaaacggctcggactcgacggcacgtccgccgatgccgacgtcgacggcgtccgttcctccgcgcggccggcggacgagaaacggccgagggccgtcgccgtcgctgaggagggcgtcgacgtccgctgtccggatcgcccggaagaagtcgaagaagcgctgtcgcggctggaagccgcccagtcggtcgtcgtcgaggtgacgggcgacaacccgcacgacggcgaagtgcgcggcgtcgcatggtgggacggacatacggcgtatttcattccgtttgaacggctggtgcagtccgacatgcggccgctggccgactggctcgccgacgcgcgtcggccgaagcgtacgcacgactcccatcgcgctgaagtggcgctgttctggcacggccttgcgtttcgcggcacgtcgttctgcacgcatatcgccgcctatttgctcgaccccacggaatcgcgccatacgctggcggacctgtcgcgccgctacggtctgccgccggtaccggaagccgaggacgtttacggcaagggcgcgaagttcaaggttcccgatcgcgacacgctggcgcgttacgtcggccgcaaggccgccctagtcgcgcggctcgttccgctgctcgaggcggatttggcggcctgcggcatgcgttcgcttttttacgacctggagctgccgctttcatccgaactcgccgtcatggagacggtcggcgtccgcgtcgacgcggcggcgctcgccgcctacggcgaggaattgcgcgaggcggcggcgaaagtcgagcgggagatttacgagctggccgggacgacgttcaacatcggatcgacgaaacagctcggcgaaattttgttcgataagctggggctgcccgtcgtcaagaaaacgaaaaccggctattccaccgacgcagacgtgctggaggaactggcgccgtaccatccgatcgtcgaaaagattttgcattaccgccaactgacgaaattgcagtcgacctacatcgaggggcttttgaaagaaatccgtccgcaaaccggtaaaatccatacgtattatcagcagacgatcgcggcgacggggcggctgagcagtcagtttcccaatcttcagaacattccgatccgtctcgaagaggggcggaaaatccgcaaggcgttcgttccgtcagaaccgggatggctgatgctcgccgccgactattcgcagatcgaactgcgcgtgctcgcgcacgtttccggcgacgaacggctgaaggaagcgtttcggacaggcatggacatccacacgaagaccgcgatggacgtgttcggcgtttccgaagaccgcgtcgacgcgcgcatgcggcggcaggcgaaggcggtcaatttcggcatcatctacggcatcagcgatttcggactggcgcaaaacctgaacatttcccgcaaggaggcggcggagttcatccggcaatatttcgccgtcttttcgggcgtcaaggcgtaccgcgagcggatcgtcgagcaggcgcgccgcgacggttacgtgacgaccctgctcggtcgcaggcgctatttgccggacatcaacgcgtcgaattacaacctccgctcgttcgcgattcggacggcgatgaatacgccgatccagggcacggccgccgacatcatcaagaccgcgatggtgcgtctgacgcggcggatgcgcgacgtcggactgaagagccgcatgctgctgcaggttcacgacgagctcgtgtttgaagtgccgccggacgagctcgacgcgatgcgggagcttgtgacggacgtcatggagtcggcggtcccgctcgacgtgccgctgaaggtcgacgtcagctggggcgccgactggtacgcggcgaagtgagggaagcgggatcc

SEQ ID NO: 1349 - DNA, 2792 bp, Artificial Sequence
  Description of Artificial Sequence: Synthetic Caldibacillus cellulovorans CompA.2 DNA Polymerase E837L
atgaaatacctgctgccgaccgctgctgctggtctgctgctcctcgctgcccagccggcgatggccatgggcaaactgattctggtcgacggaaacagcgtcgccaaccgggcgttttacgccgtccggctgctcagcacgcgcggcggcctgcacacaaacgcggtgtacggattcgccaacatgttgctcaagctgatcgaggaggaacggccgacgcattttctcgtcgcgttcgacgcgggcaaggcgacgttccgtcatcgcgaatacgaggcctacaaggcgggtcgcctgcagacgccgcccgagctgtccgagcagtttccgtacatccgggagctcgtccgggcgttcggcgtcgcgtccggcgagctggaggaatacgaggcggacgacatgatcggtacgctggcgaaacgggcggaggccgagggcgtcgacacgctggtcgtcaccggcgaccgcgatttgctccagctcgtatcggaccgcgtgaccgtcgcgctgacgcgcaagggcatcacggaaacggagcggtacgacccggcgcgcatccgcgaggaatacggcttcgatcccgaccgcatccgcgacctcaaagggctgatgggcgacgcgtctgacaatcttcccggcgttcccggcgtcggtgagaaaaccgcactgaaactgctcaggcagtacggttcgctggagagcgtcctggaacacgcgtcggaaatcgccggaaagctcggtgaaaatctgcgggcgcacgccgacgccgcccgattgagcaagcggctggcgacgatcgactgcgcggtaccgttgcagtcgggatgggactggctgcgcctcggcgaaccggaccgcgccgcgctcgcctcgctgttgcggcagctcgaattcaagtcgctgttgaaacggctcggactcgacggcacgtccgccgatgccgacgtcgacggcgtccgttcctccgcgcggccggcggacgagaaacggccgagggccgtcgccgtcgctgaggagggcgtcgacgtccgctgtccggatcgcccggaagaagtcgaagaagcgctgtcgcggctggaagccgcccagtcggtcgtcgtcgaggtgacgggcgacaacccgcacgacggcgaagtgcgcggcgtcgcatggtgggacggacatacggcgtatttcattccgtttgaacggctggtgcagtccgacatgcggccgctggccgactggctcgccgacgcgcgtcggccgaagcgtacgcacgactcccatcgcgctgaagtggcgctgttctggcacggccttgcgtttcgcggcacgtcgttctgcacgcatatcgccgcctatttgctcgaccccacggaatcgcgccatacgctggcggacctgtcgcgccgctacggtctgccgccggtaccggaagccgaggacgtttacggcaagggcgcgaagttcaaggttcccgatcgcgacacgctggcgcgttacgtcggccgcaaggccgccctagtcgcgcggctcgttccgctgctcgaggcggatttggcggcctgcggcatgcgttcgcttttttacgacctggagctgccgctttcatccgaactcgccgtcatggagacggtcggcgtccgcgtcgacgcggcggcgctcgccgcctacggcgaggaattgcgcgaggcggcggcgaaagtcgagcgggagatttacgagctggccgggacgacgttcaacatcggatcgacgaaacagctcggcgaaattttgttcgataagctggggctgcccgtcgtcaagaaaacgaaaaccggctattccaccgacgcagacgtgctggaggaactggcgccgtaccatccgatcgtcgaaaagattttgcattaccgccaactgacgaaattgcagtcgacctacatcgaggggcttttgaaagaaatccgtccgcaaaccggtaaaatccatacgtattatcagcagacgatcgcggcgacggggcggctgagcagtcagtttcccaatcttcagaacattccgatccgtctcgaagaggggcggaaaatccgcaaggcgttcgttccgtcagaaccgggatggctgatgctcgccgccgactattcgcagatcgaactgcgcgtgctcgcgcacgtttccggcgacgaacggctgaaggaagcgtttcggacaggcatggacatccacacgaagaccgcgatggacgtgttcggcgtttccgaagaccgcgtcgacgcgcgcatgcggcggcaggcgaaggcggtcaatttcggcatcatctacggcatcagcgatttcggactggcgcaaaacctgaacatttcccgcaaggaggcggcggagttcatccggcaatatttcgccgtcttttcgggcgtcaaggcgtaccgcgagcggatcgtcgagcaggcgcgccgcgacggttacgtgacgaccctgctcggtcgcaggcgctatttgccggacatcaacgcgtcgaattacaacctccgctcgttcgcgcttcggacggcgatgaatacgccgatccagggcacggccgccgacatcatcaagaccgcgatggtgcgtctgacgcggcggatgcgcgacgtcggactgaagagccgcatgctgctgcaggttcacgacgagctcgtgtttgaagtgccgccggacgagctcgacgcgatgcgggagcttgtgacggacgtcatggagtcggcggtcccgctcgacgtgccgctgaaggtcgacgtcagctggggcgccgactggtacgcggcgaagtgagggaagcgggatcc

SEQ ID NO: 1350 - DNA, 2792 bp, Artificial Sequence
  Description of Artificial Sequence: Synthetic Caldibacillus cellulovorans CompA.2 DNA Polymerase E837K
atgaaatacctgctgccgaccgctgctgctggtctgctgctcctcgctgcccagccggcgatggccatgggcaaactgattctggtcgacggaaacagcgtcgccaaccgggcgttttacgccgtccggctgctcagcacgcgcggcggcctgcacacaaacgcggtgtacggattcgccaacatgttgctcaagctgatcgaggaggaacggccgacgcattttctcgtcgcgttcgacgcgggcaaggcgacgttccgtcatcgcgaatacgaggcctacaaggcgggtcgcctgcagacgccgcccgagctgtccgagcagtttccgtacatccgggagctcgtccgggcgttcggcgtcgcgtccggcgagctggaggaatacgaggcggacgacatgatcggtacgctggcgaaacgggcggaggccgagggcgtcgacacgctggtcgtcaccggcgaccgcgatttgctccagctcgtatcggaccgcgtgaccgtcgcgctgacgcgcaagggcatcacggaaacggagcggtacgacccggcgcgcatccgcgaggaatacggcttcgatcccgaccgcatccgcgacctcaaagggctgatgggcgacgcgtctgacaatcttcccggcgttcccggcgtcggtgagaaaaccgcactgaaactgctcaggcagtacggttcgctggagagcgtcctggaacacgcgtcggaaatcgccggaaagctcggtgaaaatctgcgggcgcacgccgacgccgcccgattgagcaagcggctggcgacgatcgactgcgcggtaccgttgcagtcgggatgggactggctgcgcctcggcgaaccggaccgcgccgcgctcgcctcgctgttgcggcagctcgaattcaagtcgctgttgaaacggctcggactcgacggcacgtccgccgatgccgacgtcgacggcgtccgttcctccgcgcggccggcggacgagaaacggccgagggccgtcgccgtcgctgaggagggcgtcgacgtccgctgtccggatcgcccggaagaagtcgaagaagcgctgtcgcggctggaagccgcccagtcggtcgtcgtcgaggtgacgggcgacaacccgcacgacggcgaagtgcgcggcgtcgcatggtgggacggacatacggcgtatttcattccgtttgaacggctggtgcagtccgacatgcggccgctggccgactggctcgccgacgcgcgtcggccgaagcgtacgcacgactcccatcgcgctgaagtggcgctgttctggcacggccttgcgtttcgcggcacgtcgttctgcacgcatatcgccgcctatttgctcgaccccacggaatcgcgccatacgctggcggacctgtcgcgccgctacggtctgccgccggtaccggaagccgaggacgtttacggcaagggcgcgaagttcaaggttcccgatcgcgacacgctggcgcgttacgtcggccgcaaggccgccctagtcgcgcggctcgttccgctgctcgaggcggatttggcggcctgcggcatgcgttcgcttttttacgacctggagctgccgctttcatccgaactcgccgtcatggagacggtcggcgtccgcgtcgacgcggcggcgctcgccgcctacggcgaggaattgcgcgaggcggcggcgaaagtcgagcgggagatttacgagctggccgggacgacgttcaacatcggatcgacgaaacagctcggcgaaattttgttcgataagctggggctgcccgtcgtcaagaaaacgaaaaccggctattccaccgacgcagacgtgctggaggaactggcgccgtaccatccgatcgtcgaaaagattttgcattaccgccaactgacgaaattgcagtcgacctacatcgaggggcttttgaaagaaatccgtccgcaaaccggtaaaatccatacgtattatcagcagacgatcgcggcgacggggcggctgagcagtcagtttcccaatcttcagaacattccgatccgtctcgaagaggggcggaaaatccgcaaggcgttcgttccgtcagaaccgggatggctgatgctcgccgccgactattcgcagatcgaactgcgcgtgctcgcgcacgtttccggcgacgaacggctgaaggaagcgtttcggacaggcatggacatccacacgaagaccgcgatggacgtgttcggcgtttccgaagaccgcgtcgacgcgcgcatgcggcggcaggcgaaggcggtcaatttcggcatcatctacggcatcagcgatttcggactggcgcaaaacctgaacatttcccgcaaggaggcggcggagttcatccggcaatatttcgccgtcttttcgggcgtcaaggcgtaccgcgagcggatcgtcgagcaggcgcgccgcgacggttacgtgacgaccctgctcggtcgcaggcgctatttgccggacatcaacgcgtcgaattacaacctccgctcgttcgcgaaacggacggcgatgaatacgccgatccagggcacggccgccgacatcatcaagaccgcgatggtgcgtctgacgcggcggatgcgcgacgtcggactgaagagccgcatgctgctgcaggttcacgacgagctcgtgtttgaagtgccgccggacgagctcgacgcgatgcgggagcttgtgacggacgtcatggagtcggcggtcccgctcgacgtgccgctgaaggtcgacgtcagctggggcgccgactggtacgcggcgaagtgagggaagcgggatcc

SEQ ID NO: 1351 - DNA, 2792 bp, Artificial Sequence
  Description of Artificial Sequence: Synthetic Caldibacillus cellulovorans CompA.2 DNA Polymerase E837M
atgaaatacctgctgccgaccgctgctgctggtctgctgctcctcgctgcccagccggcgatggccatgggcaaactgattctggtcgacggaaacagcgtcgccaaccgggcgttttacgccgtccggctgctcagcacgcgcggcggcctgcacacaaacgcggtgtacggattcgccaacatgttgctcaagctgatcgaggaggaacggccgacgcattttctcgtcgcgttcgacgcgggcaaggcgacgttccgtcatcgcgaatacgaggcctacaaggcgggtcgcctgcagacgccgcccgagctgtccgagcagtttccgtacatccgggagctcgtccgggcgttcggcgtcgcgtccggcgagctggaggaatacgaggcggacgacatgatcggtacgctggcgaaacgggcggaggccgagggcgtcgacacgctggtcgtcaccggcgaccgcgatttgctccagctcgtatcggaccgcgtgaccgtcgcgctgacgcgcaagggcatcacggaaacggagcggtacgacccggcgcgcatccgcgaggaatacggcttcgatcccgaccgcatccgcgacctcaaagggctgatgggcgacgcgtctgacaatcttcccggcgttcccggcgtcggtgagaaaaccgcactgaaactgctcaggcagtacggttcgctggagagcgtcctggaacacgcgtcggaaatcgccggaaagctcggtgaaaatctgcgggcgcacgccgacgccgcccgattgagcaagcggctggcgacgatcgactgcgcggtaccgttgcagtcgggatgggactggctgcgcctcggcgaaccggaccgcgccgcgctcgcctcgctgttgcggcagctcgaattcaagtcgctgttgaaacggctcggactcgacggcacgtccgccgatgccgacgtcgacggcgtccgttcctccgcgcggccggcggacgagaaacggccgagggccgtcgccgtcgctgaggagggcgtcgacgtccgctgtccggatcgcccggaagaagtcgaagaagcgctgtcgcggctggaagccgcccagtcggtcgtcgtcgaggtgacgggcgacaacccgcacgacggcgaagtgcgcggcgtcgcatggtgggacggacatacggcgtatttcattccgtttgaacggctggtgcagtccgacatgcggccgctggccgactggctcgccgacgcgcgtcggccgaagcgtacgcacgactcccatcgcgctgaagtggcgctgttctggcacggccttgcgtttcgcggcacgtcgttctgcacgcatatcgccgcctatttgctcgaccccacggaatcgcgccatacgctggcggacctgtcgcgccgctacggtctgccgccggtaccggaagccgaggacgtttacggcaagggcgcgaagttcaaggttcccgatcgcgacacgctggcgcgttacgtcggccgcaaggccgccctagtcgcgcggctcgttccgctgctcgaggcggatttggcggcctgcggcatgcgttcgcttttttacgacctggagctgccgctttcatccgaactcgccgtcatggagacggtcggcgtccgcgtcgacgcggcggcgctcgccgcctacggcgaggaattgcgcgaggcggcggcgaaagtcgagcgggagatttacgagctggccgggacgacgttcaacatcggatcgacgaaacagctcggcgaaattttgttcgataagctggggctgcccgtcgtcaagaaaacgaaaaccggctattccaccgacgcagacgtgctggaggaactggcgccgtaccatccgatcgtcgaaaagattttgcattaccgccaactgacgaaattgcagtcgacctacatcgaggggcttttgaaagaaatccgtccgcaaaccggtaaaatccatacgtattatcagcagacgatcgcggcgacggggcggctgagcagtcagtttcccaatcttcagaacattccgatccgtctcgaagaggggcggaaaatccgcaaggcgttcgttccgtcagaaccgggatggctgatgctcgccgccgactattcgcagatcgaactgcgcgtgctcgcgcacgtttccggcgacgaacggctgaaggaagcgtttcggacaggcatggacatccacacgaagaccgcgatggacgtgttcggcgtttccgaagaccgcgtcgacgcgcgcatgcggcggcaggcgaaggcggtcaatttcggcatcatctacggcatcagcgatttcggactggcgcaaaacctgaacatttcccgcaaggaggcggcggagttcatccggcaatatttcgccgtcttttcgggcgtcaaggcgtaccgcgagcggatcgtcgagcaggcgcgccgcgacggttacgtgacgaccctgctcggtcgcaggcgctatttgccggacatcaacgcgtcgaattacaacctccgctcgttcgcgatgcggacggcgatgaatacgccgatccagggcacggccgccgacatcatcaagaccgcgatggtgcgtctgacgcggcggatgcgcgacgtcggactgaagagccgcatgctgctgcaggttcacgacgagctcgtgtttgaagtgccgccggacgagctcgacgcgatgcgggagcttgtgacggacgtcatggagtcggcggtcccgctcgacgtgccgctgaaggtcgacgtcagctggggcgccgactggtacgcggcgaagtgagggaagcgggatcc

SEQ ID NO: 1352 - DNA, 2792 bp, Artificial Sequence
  Description of Artificial Sequence: Synthetic Caldibacillus cellulovorans CompA.2 DNA Polymerase E837F
atgaaatacctgctgccgaccgctgctgctggtctgctgctcctcgctgcccagccggcgatggccatgggcaaactgattctggtcgacggaaacagcgtcgccaaccgggcgttttacgccgtccggctgctcagcacgcgcggcggcctgcacacaaacgcggtgtacggattcgccaacatgttgctcaagctgatcgaggaggaacggccgacgcattttctcgtcgcgttcgacgcgggcaaggcgacgttccgtcatcgcgaatacgaggcctacaaggcgggtcgcctgcagacgccgcccgagctgtccgagcagtttccgtacatccgggagctcgtccgggcgttcggcgtcgcgtccggcgagctggaggaatacgaggcggacgacatgatcggtacgctggcgaaacgggcggaggccgagggcgtcgacacgctggtcgtcaccggcgaccgcgatttgctccagctcgtatcggaccgcgtgaccgtcgcgctgacgcgcaagggcatcacggaaacggagcggtacgacccggcgcgcatccgcgaggaatacggcttcgatcccgaccgcatccgcgacctcaaagggctgatgggcgacgcgtctgacaatcttcccggcgttcccggcgtcggtgagaaaaccgcactgaaactgctcaggcagtacggttcgctggagagcgtcctggaacacgcgtcggaaatcgccggaaagctcggtgaaaatctgcgggcgcacgccgacgccgcccgattgagcaagcggctggcgacgatcgactgcgcggtaccgttgcagtcgggatgggactggctgcgcctcggcgaaccggaccgcgccgcgctcgcctcgctgttgcggcagctcgaattcaagtcgctgttgaaacggctcggactcgacggcacgtccgccgatgccgacgtcgacggcgtccgttcctccgcgcggccggcggacgagaaacggccgagggccgtcgccgtcgctgaggagggcgtcgacgtccgctgtccggatcgcccggaagaagtcgaagaagcgctgtcgcggctggaagccgcccagtcggtcgtcgtcgaggtgacgggcgacaacccgcacgacggcgaagtgcgcggcgtcgcatggtgggacggacatacggcgtatttcattccgtttgaacggctggtgcagtccgacatgcggccgctggccgactggctcgccgacgcgcgtcggccgaagcgtacgcacgactcccatcgcgctgaagtggcgctgttctggcacggccttgcgtttcgcggcacgtcgttctgcacgcatatcgccgcctatttgctcgaccccacggaatcgcgccatacgctggcggacctgtcgcgccgctacggtctgccgccggtaccggaagccgaggacgtttacggcaagggcgcgaagttcaaggttcccgatcgcgacacgctggcgcgttacgtcggccgcaaggccgccctagtcgcgcggctcgttccgctgctcgaggcggatttggcggcctgcggcatgcgttcgcttttttacgacctggagctgccgctttcatccgaactcgccgtcatggagacggtcggcgtccgcgtcgacgcggcggcgctcgccgcctacggcgaggaattgcgcgaggcggcggcgaaagtcgagcgggagatttacgagctggccgggacgacgttcaacatcggatcgacgaaacagctcggcgaaattttgttcgataagctggggctgcccgtcgtcaagaaaacgaaaaccggctattccaccgacgcagacgtgctggaggaactggcgccgtaccatccgatcgtcgaaaagattttgcattaccgccaactgacgaaattgcagtcgacctacatcgaggggcttttgaaagaaatccgtccgcaaaccggtaaaatccatacgtattatcagcagacgatcgcggcgacggggcggctgagcagtcagtttcccaatcttcagaacattccgatccgtctcgaagaggggcggaaaatccgcaaggcgttcgttccgtcagaaccgggatggctgatgctcgccgccgactattcgcagatcgaactgcgcgtgctcgcgcacgtttccggcgacgaacggctgaaggaagcgtttcggacaggcatggacatccacacgaagaccgcgatggacgtgttcggcgtttccgaagaccgcgtcgacgcgcgcatgcggcggcaggcgaaggcggtcaatttcggcatcatctacggcatcagcgatttcggactggcgcaaaacctgaacatttcccgcaaggaggcggcggagttcatccggcaatatttcgccgtcttttcgggcgtcaaggcgtaccgcgagcggatcgtcgagcaggcgcgccgcgacggttacgtgacgaccctgctcggtcgcaggcgctatttgccggacatcaacgcgtcgaattacaacctccgctcgttcgcgtttcggacggcgatgaatacgccgatccagggcacggccgccgacatcatcaagaccgcgatggtgcgtctgacgcggcggatgcgcgacgtcggactgaagagccgcatgctgctgcaggttcacgacgagctcgtgtttgaagtgccgccggacgagctcgacgcgatgcgggagcttgtgacggacgtcatggagtcggcggtcccgctcgacgtgccgctgaaggtcgacgtcagctggggcgccgactggtacgcggcgaagtgagggaagcgggatcc

SEQ ID NO: 1353 - DNA, 2792 bp, Artificial Sequence
  Description of Artificial Sequence: Synthetic Caldibacillus cellulovorans CompA.2 DNA Polymerase E837P
atgaaatacctgctgccgaccgctgctgctggtctgctgctcctcgctgcccagccggcgatggccatgggcaaactgattctggtcgacggaaacagcgtcgccaaccgggcgttttacgccgtccggctgctcagcacgcgcggcggcctgcacacaaacgcggtgtacggattcgccaacatgttgctcaagctgatcgaggaggaacggccgacgcattttctcgtcgcgttcgacgcgggcaaggcgacgttccgtcatcgcgaatacgaggcctacaaggcgggtcgcctgcagacgccgcccgagctgtccgagcagtttccgtacatccgggagctcgtccgggcgttcggcgtcgcgtccggcgagctggaggaatacgaggcggacgacatgatcggtacgctggcgaaacgggcggaggccgagggcgtcgacacgctggtcgtcaccggcgaccgcgatttgctccagctcgtatcggaccgcgtgaccgtcgcgctgacgcgcaagggcatcacggaaacggagcggtacgacccggcgcgcatccgcgaggaatacggcttcgatcccgaccgcatccgcgacctcaaagggctgatgggcgacgcgtctgacaatcttcccggcgttcccggcgtcggtgagaaaaccgcactgaaactgctcaggcagtacggttcgctggagagcgtcctggaacacgcgtcggaaatcgccggaaagctcggtgaaaatctgcgggcgcacgccgacgccgcccgattgagcaagcggctggcgacgatcgactgcgcggtaccgttgcagtcgggatgggactggctgcgcctcggcgaaccggaccgcgccgcgctcgcctcgctgttgcggcagctcgaattcaagtcgctgttgaaacggctcggactcgacggcacgtccgccgatgccgacgtcgacggcgtccgttcctccgcgcggccggcggacgagaaacggccgagggccgtcgccgtcgctgaggagggcgtcgacgtccgctgtccggatcgcccggaagaagtcgaagaagcgctgtcgcggctggaagccgcccagtcggtcgtcgtcgaggtgacgggcgacaacccgcacgacggcgaagtgcgcggcgtcgcatggtgggacggacatacggcgtatttcattccgtttgaacggctggtgcagtccgacatgcggccgctggccgactggctcgccgacgcgcgtcggccgaagcgtacgcacgactcccatcgcgctgaagtggcgctgttctggcacggccttgcgtttcgcggcacgtcgttctgcacgcatatcgccgcctatttgctcgaccccacggaatcgcgccatacgctggcggacctgtcgcgccgctacggtctgccgccggtaccggaagccgaggacgtttacggcaagggcgcgaagttcaaggttcccgatcgcgacacgctggcgcgttacgtcggccgcaaggccgccctagtcgcgcggctcgttccgctgctcgaggcggatttggcggcctgcggcatgcgttcgcttttttacgacctggagctgccgctttcatccgaactcgccgtcatggagacggtcggcgtccgcgtcgacgcggcggcgctcgccgcctacggcgaggaattgcgcgaggcggcggcgaaagtcgagcgggagatttacgagctggccgggacgacgttcaacatcggatcgacgaaacagctcggcgaaattttgttcgataagctggggctgcccgtcgtcaagaaaacgaaaaccggctattccaccgacgcagacgtgctggaggaactggcgccgtaccatccgatcgtcgaaaagattttgcattaccgccaactgacgaaattgcagtcgacctacatcgaggggcttttgaaagaaatccgtccgcaaaccggtaaaatccatacgtattatcagcagacgatcgcggcgacggggcggctgagcagtcagtttcccaatcttcagaacattccgatccgtctcgaagaggggcggaaaatccgcaaggcgttcgttccgtcagaaccgggatggctgatgctcgccgccgactattcgcagatcgaactgcgcgtgctcgcgcacgtttccggcgacgaacggctgaaggaagcgtttcggacaggcatggacatccacacgaagaccgcgatggacgtgttcggcgtttccgaagaccgcgtcgacgcgcgcatgcggcggcaggcgaaggcggtcaatttcggcatcatctacggcatcagcgatttcggactggcgcaaaacctgaacatttcccgcaaggaggcggcggagttcatccggcaatatttcgccgtcttttcgggcgtcaaggcgtaccgcgagcggatcgtcgagcaggcgcgccgcgacggttacgtgacgaccctgctcggtcgcaggcgctatttgccggacatcaacgcgtcgaattacaacctccgctcgttcgcgcctcggacggcgatgaatacgccgatccagggcacggccgccgacatcatcaagaccgcgatggtgcgtctgacgcggcggatgcgcgacgtcggactgaagagccgcatgctgctgcaggttcacgacgagctcgtgtttgaagtgccgccggacgagctcgacgcgatgcgggagcttgtgacggacgtcatggagtcggcggtcccgctcgacgtgccgctgaaggtcgacgtcagctggggcgccgactggtacgcggcgaagtgagggaagcgggatcc

SEQ ID NO: 1354 - DNA, 2792 bp, Artificial Sequence
  Description of Artificial Sequence: Synthetic Caldibacillus cellulovorans CompA.2 DNA Polymerase E837S
atgaaatacctgctgccgaccgctgctgctggtctgctgctcctcgctgcccagccggcgatggccatgggcaaactgattctggtcgacggaaacagcgtcgccaaccgggcgttttacgccgtccggctgctcagcacgcgcggcggcctgcacacaaacgcggtgtacggattcgccaacatgttgctcaagctgatcgaggaggaacggccgacgcattttctcgtcgcgttcgacgcgggcaaggcgacgttccgtcatcgcgaatacgaggcctacaaggcgggtcgcctgcagacgccgcccgagctgtccgagcagtttccgtacatccgggagctcgtccgggcgttcggcgtcgcgtccggcgagctggaggaatacgaggcggacgacatgatcggtacgctggcgaaacgggcggaggccgagggcgtcgacacgctggtcgtcaccggcgaccgcgatttgctccagctcgtatcggaccgcgtgaccgtcgcgctgacgcgcaagggcatcacggaaacggagcggtacgacccggcgcgcatccgcgaggaatacggcttcgatcccgaccgcatccgcgacctcaaagggctgatgggcgacgcgtctgacaatcttcccggcgttcccggcgtcggtgagaaaaccgcactgaaactgctcaggcagtacggttcgctggagagcgtcctggaacacgcgtcggaaatcgccggaaagctcggtgaaaatctgcgggcgcacgccgacgccgcccgattgagcaagcggctggcgacgatcgactgcgcggtaccgttgcagtcgggatgggactggctgcgcctcggcgaaccggaccgcgccgcgctcgcctcgctgttgcggcagctcgaattcaagtcgctgttgaaacggctcggactcgacggcacgtccgccgatgccgacgtcgacggcgtccgttcctccgcgcggccggcggacgagaaacggccgagggccgtcgccgtcgctgaggagggcgtcgacgtccgctgtccggatcgcccggaagaagtcgaagaagcgctgtcgcggctggaagccgcccagtcggtcgtcgtcgaggtgacgggcgacaacccgcacgacggcgaagtgcgcggcgtcgcatggtgggacggacatacggcgtatttcattccgtttgaacggctggtgcagtccgacatgcggccgctggccgactggctcgccgacgcgcgtcggccgaagcgtacgcacgactcccatcgcgctgaagtggcgctgttctggcacggccttgcgtttcgcggcacgtcgttctgcacgcatatcgccgcctatttgctcgaccccacggaatcgcgccatacgctggcggacctgtcgcgccgctacggtctgccgccggtaccggaagccgaggacgtttacggcaagggcgcgaagttcaaggttcccgatcgcgacacgctggcgcgttacgtcggccgcaaggccgccctagtcgcgcggctcgttccgctgctcgaggcggatttggcggcctgcggcatgcgttcgcttttttacgacctggagctgccgctttcatccgaactcgccgtcatggagacggtcggcgtccgcgtcgacgcggcggcgctcgccgcctacggcgaggaattgcgcgaggcggcggcgaaagtcgagcgggagatttacgagctggccgggacgacgttcaacatcggatcgacgaaacagctcggcgaaattttgttcgataagctggggctgcccgtcgtcaagaaaacgaaaaccggctattccaccgacgcagacgtgctggaggaactggcgccgtaccatccgatcgtcgaaaagattttgcattaccgccaactgacgaaattgcagtcgacctacatcgaggggcttttgaaagaaatccgtccgcaaaccggtaaaatccatacgtattatcagcagacgatcgcggcgacggggcggctgagcagtcagtttcccaatcttcagaacattccgatccgtctcgaagaggggcggaaaatccgcaaggcgttcgttccgtcagaaccgggatggctgatgctcgccgccgactattcgcagatcgaactgcgcgtgctcgcgcacgtttccggcgacgaacggctgaaggaagcgtttcggacaggcatggacatccacacgaagaccgcgatggacgtgttcggcgtttccgaagaccgcgtcgacgcgcgcatgcggcggcaggcgaaggcggtcaatttcggcatcatctacggcatcagcgatttcggactggcgcaaaacctgaacatttcccgcaaggaggcggcggagttcatccggcaatatttcgccgtcttttcgggcgtcaaggcgtaccgcgagcggatcgtcgagcaggcgcgccgcgacggttacgtgacgaccctgctcggtcgcaggcgctatttgccggacatcaacgcgtcgaattacaacctccgctcgttcgcgtctcggacggcgatgaatacgccgatccagggcacggccgccgacatcatcaagaccgcgatggtgcgtctgacgcggcggatgcgcgacgtcggactgaagagccgcatgctgctgcaggttcacgacgagctcgtgtttgaagtgccgccggacgagctcgacgcgatgcgggagcttgtgacggacgtcatggagtcggcggtcccgctcgacgtgccgctgaaggtcgacgtcagctggggcgccgactggtacgcggcgaagtgagggaagcgggatcc

SEQ ID NO: 1355 - DNA, 2792 bp, Artificial Sequence
  Description of Artificial Sequence: Synthetic Caldibacillus cellulovorans CompA.2 DNA Polymerase E837T
atgaaatacctgctgccgaccgctgctgctggtctgctgctcctcgctgcccagccggcgatggccatgggcaaactgattctggtcgacggaaacagcgtcgccaaccgggcgttttacgccgtccggctgctcagcacgcgcggcggcctgcacacaaacgcggtgtacggattcgccaacatgttgctcaagctgatcgaggaggaacggccgacgcattttctcgtcgcgttcgacgcgggcaaggcgacgttccgtcatcgcgaatacgaggcctacaaggcgggtcgcctgcagacgccgcccgagctgtccgagcagtttccgtacatccgggagctcgtccgggcgttcggcgtcgcgtccggcgagctggaggaatacgaggcggacgacatgatcggtacgctggcgaaacgggcggaggccgagggcgtcgacacgctggtcgtcaccggcgaccgcgatttgctccagctcgtatcggaccgcgtgaccgtcgcgctgacgcgcaagggcatcacggaaacggagcggtacgacccggcgcgcatccgcgaggaatacggcttcgatcccgaccgcatccgcgacctcaaagggctgatgggcgacgcgtctgacaatcttcccggcgttcccggcgtcggtgagaaaaccgcactgaaactgctcaggcagtacggttcgctggagagcgtcctggaacacgcgtcggaaatcgccggaaagctcggtgaaaatctgcgggcgcacgccgacgccgcccgattgagcaagcggctggcgacgatcgactgcgcggtaccgttgcagtcgggatgggactggctgcgcctcggcgaaccggaccgcgccgcgctcgcctcgctgttgcggcagctcgaattcaagtcgctgttgaaacggctcggactcgacggcacgtccgccgatgccgacgtcgacggcgtccgttcctccgcgcggccggcggacgagaaacggccgagggccgtcgccgtcgctgaggagggcgtcgacgtccgctgtccggatcgcccggaagaagtcgaagaagcgctgtcgcggctggaagccgcccagtcggtcgtcgtcgaggtgacgggcgacaacccgcacgacggcgaagtgcgcggcgtcgcatggtgggacggacatacggcgtatttcattccgtttgaacggctggtgcagtccgacatgcggccgctggccgactggctcgccgacgcgcgtcggccgaagcgtacgcacgactcccatcgcgctgaagtggcgctgttctggcacggccttgcgtttcgcggcacgtcgttctgcacgcatatcgccgcctatttgctcgaccccacggaatcgcgccatacgctggcggacctgtcgcgccgctacggtctgccgccggtaccggaagccgaggacgtttacggcaagggcgcgaagttcaaggttcccgatcgcgacacgctggcgcgttacgtcggccgcaaggccgccctagtcgcgcggctcgttccgctgctcgaggcggatttggcggcctgcggcatgcgttcgcttttttacgacctggagctgccgctttcatccgaactcgccgtcatggagacggtcggcgtccgcgtcgacgcggcggcgctcgccgcctacggcgaggaattgcgcgaggcggcggcgaaagtcgagcgggagatttacgagctggccgggacgacgttcaacatcggatcgacgaaacagctcggcgaaattttgttcgataagctggggctgcccgtcgtcaagaaaacgaaaaccggctattccaccgacgcagacgtgctggaggaactggcgccgtaccatccgatcgtcgaaaagattttgcattaccgccaactgacgaaattgcagtcgacctacatcgaggggcttttgaaagaaatccgtccgcaaaccggtaaaatccatacgtattatcagcagacgatcgcggcgacggggcggctgagcagtcagtttcccaatcttcagaacattccgatccgtctcgaagaggggcggaaaatccgcaaggcgttcgttccgtcagaaccgggatggctgatgctcgccgccgactattcgcagatcgaactgcgcgtgctcgcgcacgtttccggcgacgaacggctgaaggaagcgtttcggacaggcatggacatccacacgaagaccgcgatggacgtgttcggcgtttccgaagaccgcgtcgacgcgcgcatgcggcggcaggcgaaggcggtcaatttcggcatcatctacggcatcagcgatttcggactggcgcaaaacctgaacatttcccgcaaggaggcggcggagttcatccggcaatatttcgccgtcttttcgggcgtcaaggcgtaccgcgagcggatcgtcgagcaggcgcgccgcgacggttacgtgacgaccctgctcggtcgcaggcgctatttgccggacatcaacgcgtcgaattacaacctccgctcgttcgcgactcggacggcgatgaatacgccgatccagggcacggccgccgacatcatcaagaccgcgatggtgcgtctgacgcggcggatgcgcgacgtcggactgaagagccgcatgctgctgcaggttcacgacgagctcgtgtttgaagtgccgccggacgagctcgacgcgatgcgggagcttgtgacggacgtcatggagtcggcggtcccgctcgacgtgccgctgaaggtcgacgtcagctggggcgccgactggtacgcggcgaagtgagggaagcgggatcc

SEQ ID NO: 1356 - DNA, 2792 bp, Artificial Sequence
  Description of Artificial Sequence: Synthetic Caldibacillus cellulovorans CompA.2 DNA Polymerase E837W
atgaaatacctgctgccgaccgctgctgctggtctgctgctcctcgctgcccagccggcgatggccatgggcaaactgattctggtcgacggaaacagcgtcgccaaccgggcgttttacgccgtccggctgctcagcacgcgcggcggcctgcacacaaacgcggtgtacggattcgccaacatgttgctcaagctgatcgaggaggaacggccgacgcattttctcgtcgcgttcgacgcgggcaaggcgacgttccgtcatcgcgaatacgaggcctacaaggcgggtcgcctgcagacgccgcccgagctgtccgagcagtttccgtacatccgggagctcgtccgggcgttcggcgtcgcgtccggcgagctggaggaatacgaggcggacgacatgatcggtacgctggcgaaacgggcggaggccgagggcgtcgacacgctggtcgtcaccggcgaccgcgatttgctccagctcgtatcggaccgcgtgaccgtcgcgctgacgcgcaagggcatcacggaaacggagcggtacgacccggcgcgcatccgcgaggaatacggcttcgatcccgaccgcatccgcgacctcaaagggctgatgggcgacgcgtctgacaatcttcccggcgttcccggcgtcggtgagaaaaccgcactgaaactgctcaggcagtacggttcgctggagagcgtcctggaacacgcgtcggaaatcgccggaaagctcggtgaaaatctgcgggcgcacgccgacgccgcccgattgagcaagcggctggcgacgatcgactgcgcggtaccgttgcagtcgggatgggactggctgcgcctcggcgaaccggaccgcgccgcgctcgcctcgctgttgcggcagctcgaattcaagtcgctgttgaaacggctcggactcgacggcacgtccgccgatgccgacgtcgacggcgtccgttcctccgcgcggccggcggacgagaaacggccgagggccgtcgccgtcgctgaggagggcgtcgacgtccgctgtccggatcgcccggaagaagtcgaagaagcgctgtcgcggctggaagccgcccagtcggtcgtcgtcgaggtgacgggcgacaacccgcacgacggcgaagtgcgcggcgtcgcatggtgggacggacatacggcgtatttcattccgtttgaacggctggtgcagtccgacatgcggccgctggccgactggctcgccgacgcgcgtcggccgaagcgtacgcacgactcccatcgcgctgaagtggcgctgttctggcacggccttgcgtttcgcggcacgtcgttctgcacgcatatcgccgcctatttgctcgaccccacggaatcgcgccatacgctggcggacctgtcgcgccgctacggtctgccgccggtaccggaagccgaggacgtttacggcaagggcgcgaagttcaaggttcccgatcgcgacacgctggcgcgttacgtcggccgcaaggccgccctagtcgcgcggctcgttccgctgctcgaggcggatttggcggcctgcggcatgcgttcgcttttttacgacctggagctgccgctttcatccgaactcgccgtcatggagacggtcggcgtccgcgtcgacgcggcggcgctcgccgcctacggcgaggaattgcgcgaggcggcggcgaaagtcgagcgggagatttacgagctggccgggacgacgttcaacatcggatcgacgaaacagctcggcgaaattttgttcgataagctggggctgcccgtcgtcaagaaaacgaaaaccggctattccaccgacgcagacgtgctggaggaactggcgccgtaccatccgatcgtcgaaaagattttgcattaccgccaactgacgaaattgcagtcgacctacatcgaggggcttttgaaagaaatccgtccgcaaaccggtaaaatccatacgtattatcagcagacgatcgcggcgacggggcggctgagcagtcagtttcccaatcttcagaacattccgatccgtctcgaagaggggcggaaaatccgcaaggcgttcgttccgtcagaaccgggatggctgatgctcgccgccgactattcgcagatcgaactgcgcgtgctcgcgcacgtttccggcgacgaacggctgaaggaagcgtttcggacaggcatggacatccacacgaagaccgcgatggacgtgttcggcgtttccgaagaccgcgtcgacgcgcgcatgcggcggcaggcgaaggcggtcaatttcggcatcatctacggcatcagcgatttcggactggcgcaaaacctgaacatttcccgcaaggaggcggcggagttcatccggcaatatttcgccgtcttttcgggcgtcaaggcgtaccgcgagcggatcgtcgagcaggcgcgccgcgacggttacgtgacgaccctgctcggtcgcaggcgctatttgccggacatcaacgcgtcgaattacaacctccgctcgttcgcgtggcggacggcgatgaatacgccgatccagggcacggccgccgacatcatcaagaccgcgatggtgcgtctgacgcggcggatgcgcgacgtcggactgaagagccgcatgctgctgcaggttcacgacgagctcgtgtttgaagtgccgccggacgagctcgacgcgatgcgggagcttgtgacggacgtcatggagtcggcggtcccgctcgacgtgccgctgaaggtcgacgtcagctggggcgccgactggtacgcggcgaagtgagggaagcgggatcc

SEQ ID NO: 1357 - DNA, 2792 bp, Artificial Sequence
  Description of Artificial Sequence: Synthetic Caldibacillus cellulovorans CompA.2 DNA Polymerase E837Y
atgaaatacctgctgccgaccgctgctgctggtctgctgctcctcgctgcccagccggcgatggccatgggcaaactgattctggtcgacggaaacagcgtcgccaaccgggcgttttacgccgtccggctgctcagcacgcgcggcggcctgcacacaaacgcggtgtacggattcgccaacatgttgctcaagctgatcgaggaggaacggccgacgcattttctcgtcgcgttcgacgcgggcaaggcgacgttccgtcatcgcgaatacgaggcctacaaggcgggtcgcctgcagacgccgcccgagctgtccgagcagtttccgtacatccgggagctcgtccgggcgttcggcgtcgcgtccggcgagctggaggaatacgaggcggacgacatgatcggtacgctggcgaaacgggcggaggccgagggcgtcgacacgctggtcgtcaccggcgaccgcgatttgctccagctcgtatcggaccgcgtgaccgtcgcgctgacgcgcaagggcatcacggaaacggagcggtacgacccggcgcgcatccgcgaggaatacggcttcgatcccgaccgcatccgcgacctcaaagggctgatgggcgacgcgtctgacaatcttcccggcgttcccggcgtcggtgagaaaaccgcactgaaactgctcaggcagtacggttcgctggagagcgtcctggaacacgcgtcggaaatcgccggaaagctcggtgaaaatctgcgggcgcacgccgacgccgcccgattgagcaagcggctggcgacgatcgactgcgcggtaccgttgcagtcgggatgggactggctgcgcctcggcgaaccggaccgcgccgcgctcgcctcgctgttgcggcagctcgaattcaagtcgctgttgaaacggctcggactcgacggcacgtccgccgatgccgacgtcgacggcgtccgttcctccgcgcggccggcggacgagaaacggccgagggccgtcgccgtcgctgaggagggcgtcgacgtccgctgtccggatcgcccggaagaagtcgaagaagcgctgtcgcggctggaagccgcccagtcggtcgtcgtcgaggtgacgggcgacaacccgcacgacggcgaagtgcgcggcgtcgcatggtgggacggacatacggcgtatttcattccgtttgaacggctggtgcagtccgacatgcggccgctggccgactggctcgccgacgcgcgtcggccgaagcgtacgcacgactcccatcgcgctgaagtggcgctgttctggcacggccttgcgtttcgcggcacgtcgttctgcacgcatatcgccgcctatttgctcgaccccacggaatcgcgccatacgctggcggacctgtcgcgccgctacggtctgccgccggtaccggaagccgaggacgtttacggcaagggcgcgaagttcaaggttcccgatcgcgacacgctggcgcgttacgtcggccgcaaggccgccctagtcgcgcggctcgttccgctgctcgaggcggatttggcggcctgcggcatgcgttcgcttttttacgacctggagctgccgctttcatccgaactcgccgtcatggagacggtcggcgtccgcgtcgacgcggcggcgctcgccgcctacggcgaggaattgcgcgaggcggcggcgaaagtcgagcgggagatttacgagctggccgggacgacgttcaacatcggatcgacgaaacagctcggcgaaattttgttcgataagctggggctgcccgtcgtcaagaaaacgaaaaccggctattccaccgacgcagacgtgctggaggaactggcgccgtaccatccgatcgtcgaaaagattttgcattaccgccaactgacgaaattgcagtcgacctacatcgaggggcttttgaaagaaatccgtccgcaaaccggtaaaatccatacgtattatcagcagacgatcgcggcgacggggcggctgagcagtcagtttcccaatcttcagaacattccgatccgtctcgaagaggggcggaaaatccgcaaggcgttcgttccgtcagaaccgggatggctgatgctcgccgccgactattcgcagatcgaactgcgcgtgctcgcgcacgtttccggcgacgaacggctgaaggaagcgtttcggacaggcatggacatccacacgaagaccgcgatggacgtgttcggcgtttccgaagaccgcgtcgacgcgcgcatgcggcggcaggcgaaggcggtcaatttcggcatcatctacggcatcagcgatttcggactggcgcaaaacctgaacatttcccgcaaggaggcggcggagttcatccggcaatatttcgccgtcttttcgggcgtcaaggcgtaccgcgagcggatcgtcgagcaggcgcgccgcgacggttacgtgacgaccctgctcggtcgcaggcgctatttgccggacatcaacgcgtcgaattacaacctccgctcgttcgcgtatcggacggcgatgaatacgccgatccagggcacggccgccgacatcatcaagaccgcgatggtgcgtctgacgcggcggatgcgcgacgtcggactgaagagccgcatgctgctgcaggttcacgacgagctcgtgtttgaagtgccgccggacgagctcgacgcgatgcgggagcttgtgacggacgtcatggagtcggcggtcccgctcgacgtgccgctgaaggtcgacgtcagctggggcgccgactggtacgcggcgaagtgagggaagcgggatcc

SEQ ID NO: 1358 - DNA, 2792 bp, Artificial Sequence
  Description of Artificial Sequence: Synthetic Caldibacillus cellulovorans CompA.2 DNA Polymerase E837V
atgaaatacctgctgccgaccgctgctgctggtctgctgctcctcgctgcccagccggcgatggccatgggcaaactgattctggtcgacggaaacagcgtcgccaaccgggcgttttacgccgtccggctgctcagcacgcgcggcggcctgcacacaaacgcggtgtacggattcgccaacatgttgctcaagctgatcgaggaggaacggccgacgcattttctcgtcgcgttcgacgcgggcaaggcgacgttccgtcatcgcgaatacgaggcctacaaggcgggtcgcctgcagacgccgcccgagctgtccgagcagtttccgtacatccgggagctcgtccgggcgttcggcgtcgcgtccggcgagctggaggaatacgaggcggacgacatgatcggtacgctggcgaaacgggcggaggccgagggcgtcgacacgctggtcgtcaccggcgaccgcgatttgctccagctcgtatcggaccgcgtgaccgtcgcgctgacgcgcaagggcatcacggaaacggagcggtacgacccggcgcgcatccgcgaggaatacggcttcgatcccgaccgcatccgcgacctcaaagggctgatgggcgacgcgtctgacaatcttcccggcgttcccggcgtcggtgagaaaaccgcactgaaactgctcaggcagtacggttcgctggagagcgtcctggaacacgcgtcggaaatcgccggaaagctcggtgaaaatctgcgggcgcacgccgacgccgcccgattgagcaagcggctggcgacgatcgactgcgcggtaccgttgcagtcgggatgggactggctgcgcctcggcgaaccggaccgcgccgcgctcgcctcgctgttgcggcagctcgaattcaagtcgctgttgaaacggctcggactcgacggcacgtccgccgatgccgacgtcgacggcgtccgttcctccgcgcggccggcggacgagaaacggccgagggccgtcgccgtcgctgaggagggcgtcgacgtccgctgtccggatcgcccggaagaagtcgaagaagcgctgtcgcggctggaagccgcccagtcggtcgtcgtcgaggtgacgggcgacaacccgcacgacggcgaagtgcgcggcgtcgcatggtgggacggacatacggcgtatttcattccgtttgaacggctggtgcagtccgacatgcggccgctggccgactggctcgccgacgcgcgtcggccgaagcgtacgcacgactcccatcgcgctgaagtggcgctgttctggcacggccttgcgtttcgcggcacgtcgttctgcacgcatatcgccgcctatttgctcgaccccacggaatcgcgccatacgctggcggacctgtcgcgccgctacggtctgccgccggtaccggaagccgaggacgtttacggcaagggcgcgaagttcaaggttcccgatcgcgacacgctggcgcgttacgtcggccgcaaggccgccctagtcgcgcggctcgttccgctgctcgaggcggatttggcggcctgcggcatgcgttcgcttttttacgacctggagctgccgctttcatccgaactcgccgtcatggagacggtcggcgtccgcgtcgacgcggcggcgctcgccgcctacggcgaggaattgcgcgaggcggcggcgaaagtcgagcgggagatttacgagctggccgggacgacgttcaacatcggatcgacgaaacagctcggcgaaattttgttcgataagctggggctgcccgtcgtcaagaaaacgaaaaccggctattccaccgacgcagacgtgctggaggaactggcgccgtaccatccgatcgtcgaaaagattttgcattaccgccaactgacgaaattgcagtcgacctacatcgaggggcttttgaaagaaatccgtccgcaaaccggtaaaatccatacgtattatcagcagacgatcgcggcgacggggcggctgagcagtcagtttcccaatcttcagaacattccgatccgtctcgaagaggggcggaaaatccgcaaggcgttcgttccgtcagaaccgggatggctgatgctcgccgccgactattcgcagatcgaactgcgcgtgctcgcgcacgtttccggcgacgaacggctgaaggaagcgtttcggacaggcatggacatccacacgaagaccgcgatggacgtgttcggcgtttccgaagaccgcgtcgacgcgcgcatgcggcggcaggcgaaggcggtcaatttcggcatcatctacggcatcagcgatttcggactggcgcaaaacctgaacatttcccgcaaggaggcggcggagttcatccggcaatatttcgccgtcttttcgggcgtcaaggcgtaccgcgagcggatcgtcgagcaggcgcgccgcgacggttacgtgacgaccctgctcggtcgcaggcgctatttgccggacatcaacgcgtcgaattacaacctccgctcgttcgcggttcggacggcgatgaatacgccgatccagggcacggccgccgacatcatcaagaccgcgatggtgcgtctgacgcggcggatgcgcgacgtcggactgaagagccgcatgctgctgcaggttcacgacgagctcgtgtttgaagtgccgccggacgagctcgacgcgatgcgggagcttgtgacggacgtcatggagtcggcggtcccgctcgacgtgccgctgaaggtcgacgtcagctggggcgccgactggtacgcggcgaagtgagggaagcgggatcc

SEQ ID NO: 1359 - DNA, 2792 bp, Artificial Sequence
  Description of Artificial Sequence: Synthetic Caldibacillus cellulovorans CompA.2 DNA Polymerase R838A
atgaaatacctgctgccgaccgctgctgctggtctgctgctcctcgctgcccagccggcgatggccatgggcaaactgattctggtcgacggaaacagcgtcgccaaccgggcgttttacgccgtccggctgctcagcacgcgcggcggcctgcacacaaacgcggtgtacggattcgccaacatgttgctcaagctgatcgaggaggaacggccgacgcattttctcgtcgcgttcgacgcgggcaaggcgacgttccgtcatcgcgaatacgaggcctacaaggcgggtcgcctgcagacgccgcccgagctgtccgagcagtttccgtacatccgggagctcgtccgggcgttcggcgtcgcgtccggcgagctggaggaatacgaggcggacgacatgatcggtacgctggcgaaacgggcggaggccgagggcgtcgacacgctggtcgtcaccggcgaccgcgatttgctccagctcgtatcggaccgcgtgaccgtcgcgctgacgcgcaagggcatcacggaaacggagcggtacgacccggcgcgcatccgcgaggaatacggcttcgatcccgaccgcatccgcgacctcaaagggctgatgggcgacgcgtctgacaatcttcccggcgttcccggcgtcggtgagaaaaccgcactgaaactgctcaggcagtacggttcgctggagagcgtcctggaacacgcgtcggaaatcgccggaaagctcggtgaaaatctgcgggcgcacgccgacgccgcccgattgagcaagcggctggcgacgatcgactgcgcggtaccgttgcagtcgggatgggactggctgcgcctcggcgaaccggaccgcgccgcgctcgcctcgctgttgcggcagctcgaattcaagtcgctgttgaaacggctcggactcgacggcacgtccgccgatgccgacgtcgacggcgtccgttcctccgcgcggccggcggacgagaaacggccgagggccgtcgccgtcgctgaggagggcgtcgacgtccgctgtccggatcgcccggaagaagtcgaagaagcgctgtcgcggctggaagccgcccagtcggtcgtcgtcgaggtgacgggcgacaacccgcacgacggcgaagtgcgcggcgtcgcatggtgggacggacatacggcgtatttcattccgtttgaacggctggtgcagtccgacatgcggccgctggccgactggctcgccgacgcgcgtcggccgaagcgtacgcacgactcccatcgcgctgaagtggcgctgttctggcacggccttgcgtttcgcggcacgtcgttctgcacgcatatcgccgcctatttgctcgaccccacggaatcgcgccatacgctggcggacctgtcgcgccgctacggtctgccgccggtaccggaagccgaggacgtttacggcaagggcgcgaagttcaaggttcccgatcgcgacacgctggcgcgttacgtcggccgcaaggccgccctagtcgcgcggctcgttccgctgctcgaggcggatttggcggcctgcggcatgcgttcgcttttttacgacctggagctgccgctttcatccgaactcgccgtcatggagacggtcggcgtccgcgtcgacgcggcggcgctcgccgcctacggcgaggaattgcgcgaggcggcggcgaaagtcgagcgggagatttacgagctggccgggacgacgttcaacatcggatcgacgaaacagctcggcgaaattttgttcgataagctggggctgcccgtcgtcaagaaaacgaaaaccggctattccaccgacgcagacgtgctggaggaactggcgccgtaccatccgatcgtcgaaaagattttgcattaccgccaactgacgaaattgcagtcgacctacatcgaggggcttttgaaagaaatccgtccgcaaaccggtaaaatccatacgtattatcagcagacgatcgcggcgacggggcggctgagcagtcagtttcccaatcttcagaacattccgatccgtctcgaagaggggcggaaaatccgcaaggcgttcgttccgtcagaaccgggatggctgatgctcgccgccgactattcgcagatcgaactgcgcgtgctcgcgcacgtttccggcgacgaacggctgaaggaagcgtttcggacaggcatggacatccacacgaagaccgcgatggacgtgttcggcgtttccgaagaccgcgtcgacgcgcgcatgcggcggcaggcgaaggcggtcaatttcggcatcatctacggcatcagcgatttcggactggcgcaaaacctgaacatttcccgcaaggaggcggcggagttcatccggcaatatttcgccgtcttttcgggcgtcaaggcgtaccgcgagcggatcgtcgagcaggcgcgccgcgacggttacgtgacgaccctgctcggtcgcaggcgctatttgccggacatcaacgcgtcgaattacaacctccgctcgttcgcggaggctacggcgatgaatacgccgatccagggcacggccgccgacatcatcaagaccgcgatggtgcgtctgacgcggcggatgcgcgacgtcggactgaagagccgcatgctgctgcaggttcacgacgagctcgtgtttgaagtgccgccggacgagctcgacgcgatgcgggagcttgtgacggacgtcatggagtcggcggtcccgctcgacgtgccgctgaaggtcgacgtcagctggggcgccgactggtacgcggcgaagtgagggaagcgggatcc

SEQ ID NO: 1360 - DNA, 2792 bp, Artificial Sequence
  Description of Artificial Sequence: Synthetic Caldibacillus cellulovorans CompA.2 DNA Polymerase R838N
atgaaatacctgctgccgaccgctgctgctggtctgctgctcctcgctgcccagccggcgatggccatgggcaaactgattctggtcgacggaaacagcgtcgccaaccgggcgttttacgccgtccggctgctcagcacgcgcggcggcctgcacacaaacgcggtgtacggattcgccaacatgttgctcaagctgatcgaggaggaacggccgacgcattttctcgtcgcgttcgacgcgggcaaggcgacgttccgtcatcgcgaatacgaggcctacaaggcgggtcgcctgcagacgccgcccgagctgtccgagcagtttccgtacatccgggagctcgtccgggcgttcggcgtcgcgtccggcgagctggaggaatacgaggcggacgacatgatcggtacgctggcgaaacgggcggaggccgagggcgtcgacacgctggtcgtcaccggcgaccgcgatttgctccagctcgtatcggaccgcgtgaccgtcgcgctgacgcgcaagggcatcacggaaacggagcggtacgacccggcgcgcatccgcgaggaatacggcttcgatcccgaccgcatccgcgacctcaaagggctgatgggcgacgcgtctgacaatcttcccggcgttcccggcgtcggtgagaaaaccgcactgaaactgctcaggcagtacggttcgctggagagcgtcctggaacacgcgtcggaaatcgccggaaagctcggtgaaaatctgcgggcgcacgccgacgccgcccgattgagcaagcggctggcgacgatcgactgcgcggtaccgttgcagtcgggatgggactggctgcgcctcggcgaaccggaccgcgccgcgctcgcctcgctgttgcggcagctcgaattcaagtcgctgttgaaacggctcggactcgacggcacgtccgccgatgccgacgtcgacggcgtccgttcctccgcgcggccggcggacgagaaacggccgagggccgtcgccgtcgctgaggagggcgtcgacgtccgctgtccggatcgcccggaagaagtcgaagaagcgctgtcgcggctggaagccgcccagtcggtcgtcgtcgaggtgacgggcgacaacccgcacgacggcgaagtgcgcggcgtcgcatggtgggacggacatacggcgtatttcattccgtttgaacggctggtgcagtccgacatgcggccgctggccgactggctcgccgacgcgcgtcggccgaagcgtacgcacgactcccatcgcgctgaagtggcgctgttctggcacggccttgcgtttcgcggcacgtcgttctgcacgcatatcgccgcctatttgctcgaccccacggaatcgcgccatacgctggcggacctgtcgcgccgctacggtctgccgccggtaccggaagccgaggacgtttacggcaagggcgcgaagttcaaggttcccgatcgcgacacgctggcgcgttacgtcggccgcaaggccgccctagtcgcgcggctcgttccgctgctcgaggcggatttggcggcctgcggcatgcgttcgcttttttacgacctggagctgccgctttcatccgaactcgccgtcatggagacggtcggcgtccgcgtcgacgcggcggcgctcgccgcctacggcgaggaattgcgcgaggcggcggcgaaagtcgagcgggagatttacgagctggccgggacgacgttcaacatcggatcgacgaaacagctcggcgaaattttgttcgataagctggggctgcccgtcgtcaagaaaacgaaaaccggctattccaccgacgcagacgtgctggaggaactggcgccgtaccatccgatcgtcgaaaagattttgcattaccgccaactgacgaaattgcagtcgacctacatcgaggggcttttgaaagaaatccgtccgcaaaccggtaaaatccatacgtattatcagcagacgatcgcggcgacggggcggctgagcagtcagtttcccaatcttcagaacattccgatccgtctcgaagaggggcggaaaatccgcaaggcgttcgttccgtcagaaccgggatggctgatgctcgccgccgactattcgcagatcgaactgcgcgtgctcgcgcacgtttccggcgacgaacggctgaaggaagcgtttcggacaggcatggacatccacacgaagaccgcgatggacgtgttcggcgtttccgaagaccgcgtcgacgcgcgcatgcggcggcaggcgaaggcggtcaatttcggcatcatctacggcatcagcgatttcggactggcgcaaaacctgaacatttcccgcaaggaggcggcggagttcatccggcaatatttcgccgtcttttcgggcgtcaaggcgtaccgcgagcggatcgtcgagcaggcgcgccgcgacggttacgtgacgaccctgctcggtcgcaggcgctatttgccggacatcaacgcgtcgaattacaacctccgctcgttcgcggagaatacggcgatgaatacgccgatccagggcacggccgccgacatcatcaagaccgcgatggtgcgtctgacgcggcggatgcgcgacgtcggactgaagagccgcatgctgctgcaggttcacgacgagctcgtgtttgaagtgccgccggacgagctcgacgcgatgcgggagcttgtgacggacgtcatggagtcggcggtcccgctcgacgtgccgctgaaggtcgacgtcagctggggcgccgactggtacgcggcgaagtgagggaagcgggatcc

SEQ ID NO: 1361 - DNA, 2792 bp, Artificial Sequence
  Description of Artificial Sequence: Synthetic Caldibacillus cellulovorans CompA.2 DNA Polymerase R838D
atgaaatacctgctgccgaccgctgctgctggtctgctgctcctcgctgcccagccggcgatggccatgggcaaactgattctggtcgacggaaacagcgtcgccaaccgggcgttttacgccgtccggctgctcagcacgcgcggcggcctgcacacaaacgcggtgtacggattcgccaacatgttgctcaagctgatcgaggaggaacggccgacgcattttctcgtcgcgttcgacgcgggcaaggcgacgttccgtcatcgcgaatacgaggcctacaaggcgggtcgcctgcagacgccgcccgagctgtccgagcagtttccgtacatccgggagctcgtccgggcgttcggcgtcgcgtccggcgagctggaggaatacgaggcggacgacatgatcggtacgctggcgaaacgggcggaggccgagggcgtcgacacgctggtcgtcaccggcgaccgcgatttgctccagctcgtatcggaccgcgtgaccgtcgcgctgacgcgcaagggcatcacggaaacggagcggtacgacccggcgcgcatccgcgaggaatacggcttcgatcccgaccgcatccgcgacctcaaagggctgatgggcgacgcgtctgacaatcttcccggcgttcccggcgtcggtgagaaaaccgcactgaaactgctcaggcagtacggttcgctggagagcgtcctggaacacgcgtcggaaatcgccggaaagctcggtgaaaatctgcgggcgcacgccgacgccgcccgattgagcaagcggctggcgacgatcgactgcgcggtaccgttgcagtcgggatgggactggctgcgcctcggcgaaccggaccgcgccgcgctcgcctcgctgttgcggcagctcgaattcaagtcgctgttgaaacggctcggactcgacggcacgtccgccgatgccgacgtcgacggcgtccgttcctccgcgcggccggcggacgagaaacggccgagggccgtcgccgtcgctgaggagggcgtcgacgtccgctgtccggatcgcccggaagaagtcgaagaagcgctgtcgcggctggaagccgcccagtcggtcgtcgtcgaggtgacgggcgacaacccgcacgacggcgaagtgcgcggcgtcgcatggtgggacggacatacggcgtatttcattccgtttgaacggctggtgcagtccgacatgcggccgctggccgactggctcgccgacgcgcgtcggccgaagcgtacgcacgactcccatcgcgctgaagtggcgctgttctggcacggccttgcgtttcgcggcacgtcgttctgcacgcatatcgccgcctatttgctcgaccccacggaatcgcgccatacgctggcggacctgtcgcgccgctacggtctgccgccggtaccggaagccgaggacgtttacggcaagggcgcgaagttcaaggttcccgatcgcgacacgctggcgcgttacgtcggccgcaaggccgccctagtcgcgcggctcgttccgctgctcgaggcggatttggcggcctgcggcatgcgttcgcttttttacgacctggagctgccgctttcatccgaactcgccgtcatggagacggtcggcgtccgcgtcgacgcggcggcgctcgccgcctacggcgaggaattgcgcgaggcggcggcgaaagtcgagcgggagatttacgagctggccgggacgacgttcaacatcggatcgacgaaacagctcggcgaaattttgttcgataagctggggctgcccgtcgtcaagaaaacgaaaaccggctattccaccgacgcagacgtgctggaggaactggcgccgtaccatccgatcgtcgaaaagattttgcattaccgccaactgacgaaattgcagtcgacctacatcgaggggcttttgaaagaaatccgtccgcaaaccggtaaaatccatacgtattatcagcagacgatcgcggcgacggggcggctgagcagtcagtttcccaatcttcagaacattccgatccgtctcgaagaggggcggaaaatccgcaaggcgttcgttccgtcagaaccgggatggctgatgctcgccgccgactattcgcagatcgaactgcgcgtgctcgcgcacgtttccggcgacgaacggctgaaggaagcgtttcggacaggcatggacatccacacgaagaccgcgatggacgtgttcggcgtttccgaagaccgcgtcgacgcgcgcatgcggcggcaggcgaaggcggtcaatttcggcatcatctacggcatcagcgatttcggactggcgcaaaacctgaacatttcccgcaaggaggcggcggagttcatccggcaatatttcgccgtcttttcgggcgtcaaggcgtaccgcgagcggatcgtcgagcaggcgcgccgcgacggttacgtgacgaccctgctcggtcgcaggcgctatttgccggacatcaacgcgtcgaattacaacctccgctcgttcgcggaggatacggcgatgaatacgccgatccagggcacggccgccgacatcatcaagaccgcgatggtgcgtctgacgcggcggatgcgcgacgtcggactgaagagccgcatgctgctgcaggttcacgacgagctcgtgtttgaagtgccgccggacgagctcgacgcgatgcgggagcttgtgacggacgtcatggagtcggcggtcccgctcgacgtgccgctgaaggtcgacgtcagctggggcgccgactggtacgcggcgaagtgagggaagcgggatcc

SEQ ID NO: 1362 - DNA, 2792 bp, Artificial Sequence
  Description of Artificial Sequence: Synthetic Caldibacillus cellulovorans CompA.2 DNA Polymerase R838C
atgaaatacctgctgccgaccgctgctgctggtctgctgctcctcgctgcccagccggcgatggccatgggcaaactgattctggtcgacggaaacagcgtcgccaaccgggcgttttacgccgtccggctgctcagcacgcgcggcggcctgcacacaaacgcggtgtacggattcgccaacatgttgctcaagctgatcgaggaggaacggccgacgcattttctcgtcgcgttcgacgcgggcaaggcgacgttccgtcatcgcgaatacgaggcctacaaggcgggtcgcctgcagacgccgcccgagctgtccgagcagtttccgtacatccgggagctcgtccgggcgttcggcgtcgcgtccggcgagctggaggaatacgaggcggacgacatgatcggtacgctggcgaaacgggcggaggccgagggcgtcgacacgctggtcgtcaccggcgaccgcgatttgctccagctcgtatcggaccgcgtgaccgtcgcgctgacgcgcaagggcatcacggaaacggagcggtacgacccggcgcgcatccgcgaggaatacggcttcgatcccgaccgcatccgcgacctcaaagggctgatgggcgacgcgtctgacaatcttcccggcgttcccggcgtcggtgagaaaaccgcactgaaactgctcaggcagtacggttcgctggagagcgtcctggaacacgcgtcggaaatcgccggaaagctcggtgaaaatctgcgggcgcacgccgacgccgcccgattgagcaagcggctggcgacgatcgactgcgcggtaccgttgcagtcgggatgggactggctgcgcctcggcgaaccggaccgcgccgcgctcgcctcgctgttgcggcagctcgaattcaagtcgctgttgaaacggctcggactcgacggcacgtccgccgatgccgacgtcgacggcgtccgttcctccgcgcggccggcggacgagaaacggccgagggccgtcgccgtcgctgaggagggcgtcgacgtccgctgtccggatcgcccggaagaagtcgaagaagcgctgtcgcggctggaagccgcccagtcggtcgtcgtcgaggtgacgggcgacaacccgcacgacggcgaagtgcgcggcgtcgcatggtgggacggacatacggcgtatttcattccgtttgaacggctggtgcagtccgacatgcggccgctggccgactggctcgccgacgcgcgtcggccgaagcgtacgcacgactcccatcgcgctgaagtggcgctgttctggcacggccttgcgtttcgcggcacgtcgttctgcacgcatatcgccgcctatttgctcgaccccacggaatcgcgccatacgctggcggacctgtcgcgccgctacggtctgccgccggtaccggaagccgaggacgtttacggcaagggcgcgaagttcaaggttcccgatcgcgacacgctggcgcgttacgtcggccgcaaggccgccctagtcgcgcggctcgttccgctgctcgaggcggatttggcggcctgcggcatgcgttcgcttttttacgacctggagctgccgctttcatccgaactcgccgtcatggagacggtcggcgtccgcgtcgacgcggcggcgctcgccgcctacggcgaggaattgcgcgaggcggcggcgaaagtcgagcgggagatttacgagctggccgggacgacgttcaacatcggatcgacgaaacagctcggcgaaattttgttcgataagctggggctgcccgtcgtcaagaaaacgaaaaccggctattccaccgacgcagacgtgctggaggaactggcgccgtaccatccgatcgtcgaaaagattttgcattaccgccaactgacgaaattgcagtcgacctacatcgaggggcttttgaaagaaatccgtccgcaaaccggtaaaatccatacgtattatcagcagacgatcgcggcgacggggcggctgagcagtcagtttcccaatcttcagaacattccgatccgtctcgaagaggggcggaaaatccgcaaggcgttcgttccgtcagaaccgggatggctgatgctcgccgccgactattcgcagatcgaactgcgcgtgctcgcgcacgtttccggcgacgaacggctgaaggaagcgtttcggacaggcatggacatccacacgaagaccgcgatggacgtgttcggcgtttccgaagaccgcgtcgacgcgcgcatgcggcggcaggcgaaggcggtcaatttcggcatcatctacggcatcagcgatttcggactggcgcaaaacctgaacatttcccgcaaggaggcggcggagttcatccggcaatatttcgccgtcttttcgggcgtcaaggcgtaccgcgagcggatcgtcgagcaggcgcgccgcgacggttacgtgacgaccctgctcggtcgcaggcgctatttgccggacatcaacgcgtcgaattacaacctccgctcgttcgcggagtgtacggcgatgaatacgccgatccagggcacggccgccgacatcatcaagaccgcgatggtgcgtctgacgcggcggatgcgcgacgtcggactgaagagccgcatgctgctgcaggttcacgacgagctcgtgtttgaagtgccgccggacgagctcgacgcgatgcgggagcttgtgacggacgtcatggagtcggcggtcccgctcgacgtgccgctgaaggtcgacgtcagctggggcgccgactggtacgcggcgaagtgagggaagcgggatcc

SEQ ID NO: 1363 - DNA, 2792 bp, Artificial Sequence
  Description of Artificial Sequence: Synthetic Caldibacillus cellulovorans CompA.2 DNA Polymerase R838E
atgaaatacctgctgccgaccgctgctgctggtctgctgctcctcgctgcccagccggcgatggccatgggcaaactgattctggtcgacggaaacagcgtcgccaaccgggcgttttacgccgtccggctgctcagcacgcgcggcggcctgcacacaaacgcggtgtacggattcgccaacatgttgctcaagctgatcgaggaggaacggccgacgcattttctcgtcgcgttcgacgcgggcaaggcgacgttccgtcatcgcgaatacgaggcctacaaggcgggtcgcctgcagacgccgcccgagctgtccgagcagtttccgtacatccgggagctcgtccgggcgttcggcgtcgcgtccggcgagctggaggaatacgaggcggacgacatgatcggtacgctggcgaaacgggcggaggccgagggcgtcgacacgctggtcgtcaccggcgaccgcgatttgctccagctcgtatcggaccgcgtgaccgtcgcgctgacgcgcaagggcatcacggaaacggagcggtacgacccggcgcgcatccgcgaggaatacggcttcgatcccgaccgcatccgcgacctcaaagggctgatgggcgacgcgtctgacaatcttcccggcgttcccggcgtcggtgagaaaaccgcactgaaactgctcaggcagtacggttcgctggagagcgtcctggaacacgcgtcggaaatcgccggaaagctcggtgaaaatctgcgggcgcacgccgacgccgcccgattgagcaagcggctggcgacgatcgactgcgcggtaccgttgcagtcgggatgggactggctgcgcctcggcgaaccggaccgcgccgcgctcgcctcgctgttgcggcagctcgaattcaagtcgctgttgaaacggctcggactcgacggcacgtccgccgatgccgacgtcgacggcgtccgttcctccgcgcggccggcggacgagaaacggccgagggccgtcgccgtcgctgaggagggcgtcgacgtccgctgtccggatcgcccggaagaagtcgaagaagcgctgtcgcggctggaagccgcccagtcggtcgtcgtcgaggtgacgggcgacaacccgcacgacggcgaagtgcgcggcgtcgcatggtgggacggacatacggcgtatttcattccgtttgaacggctggtgcagtccgacatgcggccgctggccgactggctcgccgacgcgcgtcggccgaagcgtacgcacgactcccatcgcgctgaagtggcgctgttctggcacggccttgcgtttcgcggcacgtcgttctgcacgcatatcgccgcctatttgctcgaccccacggaatcgcgccatacgctggcggacctgtcgcgccgctacggtctgccgccggtaccggaagccgaggacgtttacggcaagggcgcgaagttcaaggttcccgatcgcgacacgctggcgcgttacgtcggccgcaaggccgccctagtcgcgcggctcgttccgctgctcgaggcggatttggcggcctgcggcatgcgttcgcttttttacgacctggagctgccgctttcatccgaactcgccgtcatggagacggtcggcgtccgcgtcgacgcggcggcgctcgccgcctacggcgaggaattgcgcgaggcggcggcgaaagtcgagcgggagatttacgagctggccgggacgacgttcaacatcggatcgacgaaacagctcggcgaaattttgttcgataagctggggctgcccgtcgtcaagaaaacgaaaaccggctattccaccgacgcagacgtgctggaggaactggcgccgtaccatccgatcgtcgaaaagattttgcattaccgccaactgacgaaattgcagtcgacctacatcgaggggcttttgaaagaaatccgtccgcaaaccggtaaaatccatacgtattatcagcagacgatcgcggcgacggggcggctgagcagtcagtttcccaatcttcagaacattccgatccgtctcgaagaggggcggaaaatccgcaaggcgttcgttccgtcagaaccgggatggctgatgctcgccgccgactattcgcagatcgaactgcgcgtgctcgcgcacgtttccggcgacgaacggctgaaggaagcgtttcggacaggcatggacatccacacgaagaccgcgatggacgtgttcggcgtttccgaagaccgcgtcgacgcgcgcatgcggcggcaggcgaaggcggtcaatttcggcatcatctacggcatcagcgatttcggactggcgcaaaacctgaacatttcccgcaaggaggcggcggagttcatccggcaatatttcgccgtcttttcgggcgtcaaggcgtaccgcgagcggatcgtcgagcaggcgcgccgcgacggttacgtgacgaccctgctcggtcgcaggcgctatttgccggacatcaacgcgtcgaattacaacctccgctcgttcgcggaggaaacggcgatgaatacgccgatccagggcacggccgccgacatcatcaagaccgcgatggtgcgtctgacgcggcggatgcgcgacgtcggactgaagagccgcatgctgctgcaggttcacgacgagctcgtgtttgaagtgccgccggacgagctcgacgcgatgcgggagcttgtgacggacgtcatggagtcggcggtcccgctcgacgtgccgctgaaggtcgacgtcagctggggcgccgactggtacgcggcgaagtgagggaagcgggatcc

SEQ ID NO: 1364 - DNA, 2792 bp, Artificial Sequence
  Description of Artificial Sequence: Synthetic Caldibacillus cellulovorans CompA.2 DNA Polymerase R838Q
atgaaatacctgctgccgaccgctgctgctggtctgctgctcctcgctgcccagccggcgatggccatgggcaaactgattctggtcgacggaaacagcgtcgccaaccgggcgttttacgccgtccggctgctcagcacgcgcggcggcctgcacacaaacgcggtgtacggattcgccaacatgttgctcaagctgatcgaggaggaacggccgacgcattttctcgtcgcgttcgacgcgggcaaggcgacgttccgtcatcgcgaatacgaggcctacaaggcgggtcgcctgcagacgccgcccgagctgtccgagcagtttccgtacatccgggagctcgtccgggcgttcggcgtcgcgtccggcgagctggaggaatacgaggcggacgacatgatcggtacgctggcgaaacgggcggaggccgagggcgtcgacacgctggtcgtcaccggcgaccgcgatttgctccagctcgtatcggaccgcgtgaccgtcgcgctgacgcgcaagggcatcacggaaacggagcggtacgacccggcgcgcatccgcgaggaatacggcttcgatcccgaccgcatccgcgacctcaaagggctgatgggcgacgcgtctgacaatcttcccggcgttcccggcgtcggtgagaaaaccgcactgaaactgctcaggcagtacggttcgctggagagcgtcctggaacacgcgtcggaaatcgccggaaagctcggtgaaaatctgcgggcgcacgccgacgccgcccgattgagcaagcggctggcgacgatcgactgcgcggtaccgttgcagtcgggatgggactggctgcgcctcggcgaaccggaccgcgccgcgctcgcctcgctgttgcggcagctcgaattcaagtcgctgttgaaacggctcggactcgacggcacgtccgccgatgccgacgtcgacggcgtccgttcctccgcgcggccggcggacgagaaacggccgagggccgtcgccgtcgctgaggagggcgtcgacgtccgctgtccggatcgcccggaagaagtcgaagaagcgctgtcgcggctggaagccgcccagtcggtcgtcgtcgaggtgacgggcgacaacccgcacgacggcgaagtgcgcggcgtcgcatggtgggacggacatacggcgtatttcattccgtttgaacggctggtgcagtccgacatgcggccgctggccgactggctcgccgacgcgcgtcggccgaagcgtacgcacgactcccatcgcgctgaagtggcgctgttctggcacggccttgcgtttcgcggcacgtcgttctgcacgcatatcgccgcctatttgctcgaccccacggaatcgcgccatacgctggcggacctgtcgcgccgctacggtctgccgccggtaccggaagccgaggacgtttacggcaagggcgcgaagttcaaggttcccgatcgcgacacgctggcgcgttacgtcggccgcaaggccgccctagtcgcgcggctcgttccgctgctcgaggcggatttggcggcctgcggcatgcgttcgcttttttacgacctggagctgccgctttcatccgaactcgccgtcatggagacggtcggcgtccgcgtcgacgcggcggcgctcgccgcctacggcgaggaattgcgcgaggcggcggcgaaagtcgagcgggagatttacgagctggccgggacgacgttcaacatcggatcgacgaaacagctcggcgaaattttgttcgataagctggggctgcccgtcgtcaagaaaacgaaaaccggctattccaccgacgcagacgtgctggaggaactggcgccgtaccatccgatcgtcgaaaagattttgcattaccgccaactgacgaaattgcagtcgacctacatcgaggggcttttgaaagaaatccgtccgcaaaccggtaaaatccatacgtattatcagcagacgatcgcggcgacggggcggctgagcagtcagtttcccaatcttcagaacattccgatccgtctcgaagaggggcggaaaatccgcaaggcgttcgttccgtcagaaccgggatggctgatgctcgccgccgactattcgcagatcgaactgcgcgtgctcgcgcacgtttccggcgacgaacggctgaaggaagcgtttcggacaggcatggacatccacacgaagaccgcgatggacgtgttcggcgtttccgaagaccgcgtcgacgcgcgcatgcggcggcaggcgaaggcggtcaatttcggcatcatctacggcatcagcgatttcggactggcgcaaaacctgaacatttcccgcaaggaggcggcggagttcatccggcaatatttcgccgtcttttcgggcgtcaaggcgtaccgcgagcggatcgtcgagcaggcgcgccgcgacggttacgtgacgaccctgctcggtcgcaggcgctatttgccggacatcaacgcgtcgaattacaacctccgctcgttcgcggagcaaacggcgatgaatacgccgatccagggcacggccgccgacatcatcaagaccgcgatggtgcgtctgacgcggcggatgcgcgacgtcggactgaagagccgcatgctgctgcaggttcacgacgagctcgtgtttgaagtgccgccggacgagctcgacgcgatgcgggagcttgtgacggacgtcatggagtcggcggtcccgctcgacgtgccgctgaaggtcgacgtcagctggggcgccgactggtacgcggcgaagtgagggaagcgggatcc

SEQ ID NO: 1365 - DNA, 2792 bp, Artificial Sequence
  Description of Artificial Sequence: Synthetic Caldibacillus cellulovorans CompA.2 DNA Polymerase R838G
atgaaatacctgctgccgaccgctgctgctggtctgctgctcctcgctgcccagccggcgatggccatgggcaaactgattctggtcgacggaaacagcgtcgccaaccgggcgttttacgccgtccggctgctcagcacgcgcggcggcctgcacacaaacgcggtgtacggattcgccaacatgttgctcaagctgatcgaggaggaacggccgacgcattttctcgtcgcgttcgacgcgggcaaggcgacgttccgtcatcgcgaatacgaggcctacaaggcgggtcgcctgcagacgccgcccgagctgtccgagcagtttccgtacatccgggagctcgtccgggcgttcggcgtcgcgtccggcgagctggaggaatacgaggcggacgacatgatcggtacgctggcgaaacgggcggaggccgagggcgtcgacacgctggtcgtcaccggcgaccgcgatttgctccagctcgtatcggaccgcgtgaccgtcgcgctgacgcgcaagggcatcacggaaacggagcggtacgacccggcgcgcatccgcgaggaatacggcttcgatcccgaccgcatccgcgacctcaaagggctgatgggcgacgcgtctgacaatcttcccggcgttcccggcgtcggtgagaaaaccgcactgaaactgctcaggcagtacggttcgctggagagcgtcctggaacacgcgtcggaaatcgccggaaagctcggtgaaaatctgcgggcgcacgccgacgccgcccgattgagcaagcggctggcgacgatcgactgcgcggtaccgttgcagtcgggatgggactggctgcgcctcggcgaaccggaccgcgccgcgctcgcctcgctgttgcggcagctcgaattcaagtcgctgttgaaacggctcggactcgacggcacgtccgccgatgccgacgtcgacggcgtccgttcctccgcgcggccggcggacgagaaacggccgagggccgtcgccgtcgctgaggagggcgtcgacgtccgctgtccggatcgcccggaagaagtcgaagaagcgctgtcgcggctggaagccgcccagtcggtcgtcgtcgaggtgacgggcgacaacccgcacgacggcgaagtgcgcggcgtcgcatggtgggacggacatacggcgtatttcattccgtttgaacggctggtgcagtccgacatgcggccgctggccgactggctcgccgacgcgcgtcggccgaagcgtacgcacgactcccatcgcgctgaagtggcgctgttctggcacggccttgcgtttcgcggcacgtcgttctgcacgcatatcgccgcctatttgctcgaccccacggaatcgcgccatacgctggcggacctgtcgcgccgctacggtctgccgccggtaccggaagccgaggacgtttacggcaagggcgcgaagttcaaggttcccgatcgcgacacgctggcgcgttacgtcggccgcaaggccgccctagtcgcgcggctcgttccgctgctcgaggcggatttggcggcctgcggcatgcgttcgcttttttacgacctggagctgccgctttcatccgaactcgccgtcatggagacggtcggcgtccgcgtcgacgcggcggcgctcgccgcctacggcgaggaattgcgcgaggcggcggcgaaagtcgagcgggagatttacgagctggccgggacgacgttcaacatcggatcgacgaaacagctcggcgaaattttgttcgataagctggggctgcccgtcgtcaagaaaacgaaaaccggctattccaccgacgcagacgtgctggaggaactggcgccgtaccatccgatcgtcgaaaagattttgcattaccgccaactgacgaaattgcagtcgacctacatcgaggggcttttgaaagaaatccgtccgcaaaccggtaaaatccatacgtattatcagcagacgatcgcggcgacggggcggctgagcagtcagtttcccaatcttcagaacattccgatccgtctcgaagaggggcggaaaatccgcaaggcgttcgttccgtcagaaccgggatggctgatgctcgccgccgactattcgcagatcgaactgcgcgtgctcgcgcacgtttccggcgacgaacggctgaaggaagcgtttcggacaggcatggacatccacacgaagaccgcgatggacgtgttcggcgtttccgaagaccgcgtcgacgcgcgcatgcggcggcaggcgaaggcggtcaatttcggcatcatctacggcatcagcgatttcggactggcgcaaaacctgaacatttcccgcaaggaggcggcggagttcatccggcaatatttcgccgtcttttcgggcgtcaaggcgtaccgcgagcggatcgtcgagcaggcgcgccgcgacggttacgtgacgaccctgctcggtcgcaggcgctatttgccggacatcaacgcgtcgaattacaacctccgctcgttcgcggagggtacggcgatgaatacgccgatccagggcacggccgccgacatcatcaagaccgcgatggtgcgtctgacgcggcggatgcgcgacgtcggactgaagagccgcatgctgctgcaggttcacgacgagctcgtgtttgaagtgccgccggacgagctcgacgcgatgcgggagcttgtgacggacgtcatggagtcggcggtcccgctcgacgtgccgctgaaggtcgacgtcagctggggcgccgactggtacgcggcgaagtgagggaagcgggatcc

SEQ ID NO: 1366 - DNA, 2792 bp, Artificial Sequence
  Description of Artificial Sequence: Synthetic Caldibacillus cellulovorans CompA.2 DNA Polymerase R838H
atgaaatacctgctgccgaccgctgctgctggtctgctgctcctcgctgcccagccggcgatggccatgggcaaactgattctggtcgacggaaacagcgtcgccaaccgggcgttttacgccgtccggctgctcagcacgcgcggcggcctgcacacaaacgcggtgtacggattcgccaacatgttgctcaagctgatcgaggaggaacggccgacgcattttctcgtcgcgttcgacgcgggcaaggcgacgttccgtcatcgcgaatacgaggcctacaaggcgggtcgcctgcagacgccgcccgagctgtccgagcagtttccgtacatccgggagctcgtccgggcgttcggcgtcgcgtccggcgagctggaggaatacgaggcggacgacatgatcggtacgctggcgaaacgggcggaggccgagggcgtcgacacgctggtcgtcaccggcgaccgcgatttgctccagctcgtatcggaccgcgtgaccgtcgcgctgacgcgcaagggcatcacggaaacggagcggtacgacccggcgcgcatccgcgaggaatacggcttcgatcccgaccgcatccgcgacctcaaagggctgatgggcgacgcgtctgacaatcttcccggcgttcccggcgtcggtgagaaaaccgcactgaaactgctcaggcagtacggttcgctggagagcgtcctggaacacgcgtcggaaatcgccggaaagctcggtgaaaatctgcgggcgcacgccgacgccgcccgattgagcaagcggctggcgacgatcgactgcgcggtaccgttgcagtcgggatgggactggctgcgcctcggcgaaccggaccgcgccgcgctcgcctcgctgttgcggcagctcgaattcaagtcgctgttgaaacggctcggactcgacggcacgtccgccgatgccgacgtcgacggcgtccgttcctccgcgcggccggcggacgagaaacggccgagggccgtcgccgtcgctgaggagggcgtcgacgtccgctgtccggatcgcccggaagaagtcgaagaagcgctgtcgcggctggaagccgcccagtcggtcgtcgtcgaggtgacgggcgacaacccgcacgacggcgaagtgcgcggcgtcgcatggtgggacggacatacggcgtatttcattccgtttgaacggctggtgcagtccgacatgcggccgctggccgactggctcgccgacgcgcgtcggccgaagcgtacgcacgactcccatcgcgctgaagtggcgctgttctggcacggccttgcgtttcgcggcacgtcgttctgcacgcatatcgccgcctatttgctcgaccccacggaatcgcgccatacgctggcggacctgtcgcgccgctacggtctgccgccggtaccggaagccgaggacgtttacggcaagggcgcgaagttcaaggttcccgatcgcgacacgctggcgcgttacgtcggccgcaaggccgccctagtcgcgcggctcgttccgctgctcgaggcggatttggcggcctgcggcatgcgttcgcttttttacgacctggagctgccgctttcatccgaactcgccgtcatggagacggtcggcgtccgcgtcgacgcggcggcgctcgccgcctacggcgaggaattgcgcgaggcggcggcgaaagtcgagcgggagatttacgagctggccgggacgacgttcaacatcggatcgacgaaacagctcggcgaaattttgttcgataagctggggctgcccgtcgtcaagaaaacgaaaaccggctattccaccgacgcagacgtgctggaggaactggcgccgtaccatccgatcgtcgaaaagattttgcattaccgccaactgacgaaattgcagtcgacctacatcgaggggcttttgaaagaaatccgtccgcaaaccggtaaaatccatacgtattatcagcagacgatcgcggcgacggggcggctgagcagtcagtttcccaatcttcagaacattccgatccgtctcgaagaggggcggaaaatccgcaaggcgttcgttccgtcagaaccgggatggctgatgctcgccgccgactattcgcagatcgaactgcgcgtgctcgcgcacgtttccggcgacgaacggctgaaggaagcgtttcggacaggcatggacatccacacgaagaccgcgatggacgtgttcggcgtttccgaagaccgcgtcgacgcgcgcatgcggcggcaggcgaaggcggtcaatttcggcatcatctacggcatcagcgatttcggactggcgcaaaacctgaacatttcccgcaaggaggcggcggagttcatccggcaatatttcgccgtcttttcgggcgtcaaggcgtaccgcgagcggatcgtcgagcaggcgcgccgcgacggttacgtgacgaccctgctcggtcgcaggcgctatttgccggacatcaacgcgtcgaattacaacctccgctcgttcgcggagcatacggcgatgaatacgccgatccagggcacggccgccgacatcatcaagaccgcgatggtgcgtctgacgcggcggatgcgcgacgtcggactgaagagccgcatgctgctgcaggttcacgacgagctcgtgtttgaagtgccgccggacgagctcgacgcgatgcgggagcttgtgacggacgtcatggagtcggcggtcccgctcgacgtgccgctgaaggtcgacgtcagctggggcgccgactggtacgcggcgaagtgagggaagcgggatcc

SEQ ID NO: 1367 - DNA, 2792 bp, Artificial Sequence
  Description of Artificial Sequence: Synthetic Caldibacillus cellulovorans CompA.2 DNA Polymerase R838I
atgaaatacctgctgccgaccgctgctgctggtctgctgctcctcgctgcccagccggcgatggccatgggcaaactgattctggtcgacggaaacagcgtcgccaaccgggcgttttacgccgtccggctgctcagcacgcgcggcggcctgcacacaaacgcggtgtacggattcgccaacatgttgctcaagctgatcgaggaggaacggccgacgcattttctcgtcgcgttcgacgcgggcaaggcgacgttccgtcatcgcgaatacgaggcctacaaggcgggtcgcctgcagacgccgcccgagctgtccgagcagtttccgtacatccgggagctcgtccgggcgttcggcgtcgcgtccggcgagctggaggaatacgaggcggacgacatgatcggtacgctggcgaaacgggcggaggccgagggcgtcgacacgctggtcgtcaccggcgaccgcgatttgctccagctcgtatcggaccgcgtgaccgtcgcgctgacgcgcaagggcatcacggaaacggagcggtacgacccggcgcgcatccgcgaggaatacggcttcgatcccgaccgcatccgcgacctcaaagggctgatgggcgacgcgtctgacaatcttcccggcgttcccggcgtcggtgagaaaaccgcactgaaactgctcaggcagtacggttcgctggagagcgtcctggaacacgcgtcggaaatcgccggaaagctcggtgaaaatctgcgggcgcacgccgacgccgcccgattgagcaagcggctggcgacgatcgactgcgcggtaccgttgcagtcgggatgggactggctgcgcctcggcgaaccggaccgcgccgcgctcgcctcgctgttgcggcagctcgaattcaagtcgctgttgaaacggctcggactcgacggcacgtccgccgatgccgacgtcgacggcgtccgttcctccgcgcggccggcggacgagaaacggccgagggccgtcgccgtcgctgaggagggcgtcgacgtccgctgtccggatcgcccggaagaagtcgaagaagcgctgtcgcggctggaagccgcccagtcggtcgtcgtcgaggtgacgggcgacaacccgcacgacggcgaagtgcgcggcgtcgcatggtgggacggacatacggcgtatttcattccgtttgaacggctggtgcagtccgacatgcggccgctggccgactggctcgccgacgcgcgtcggccgaagcgtacgcacgactcccatcgcgctgaagtggcgctgttctggcacggccttgcgtttcgcggcacgtcgttctgcacgcatatcgccgcctatttgctcgaccccacggaatcgcgccatacgctggcggacctgtcgcgccgctacggtctgccgccggtaccggaagccgaggacgtttacggcaagggcgcgaagttcaaggttcccgatcgcgacacgctggcgcgttacgtcggccgcaaggccgccctagtcgcgcggctcgttccgctgctcgaggcggatttggcggcctgcggcatgcgttcgcttttttacgacctggagctgccgctttcatccgaactcgccgtcatggagacggtcggcgtccgcgtcgacgcggcggcgctcgccgcctacggcgaggaattgcgcgaggcggcggcgaaagtcgagcgggagatttacgagctggccgggacgacgttcaacatcggatcgacgaaacagctcggcgaaattttgttcgataagctggggctgcccgtcgtcaagaaaacgaaaaccggctattccaccgacgcagacgtgctggaggaactggcgccgtaccatccgatcgtcgaaaagattttgcattaccgccaactgacgaaattgcagtcgacctacatcgaggggcttttgaaagaaatccgtccgcaaaccggtaaaatccatacgtattatcagcagacgatcgcggcgacggggcggctgagcagtcagtttcccaatcttcagaacattccgatccgtctcgaagaggggcggaaaatccgcaaggcgttcgttccgtcagaaccgggatggctgatgctcgccgccgactattcgcagatcgaactgcgcgtgctcgcgcacgtttccggcgacgaacggctgaaggaagcgtttcggacaggcatggacatccacacgaagaccgcgatggacgtgttcggcgtttccgaagaccgcgtcgacgcgcgcatgcggcggcaggcgaaggcggtcaatttcggcatcatctacggcatcagcgatttcggactggcgcaaaacctgaacatttcccgcaaggaggcggcggagttcatccggcaatatttcgccgtcttttcgggcgtcaaggcgtaccgcgagcggatcgtcgagcaggcgcgccgcgacggttacgtgacgaccctgctcggtcgcaggcgctatttgccggacatcaacgcgtcgaattacaacctccgctcgttcgcggagattacggcgatgaatacgccgatccagggcacggccgccgacatcatcaagaccgcgatggtgcgtctgacgcggcggatgcgcgacgtcggactgaagagccgcatgctgctgcaggttcacgacgagctcgtgtttgaagtgccgccggacgagctcgacgcgatgcgggagcttgtgacggacgtcatggagtcggcggtcccgctcgacgtgccgctgaaggtcgacgtcagctggggcgccgactggtacgcggcgaagtgagggaagcgggatcc

SEQ ID NO: 1368 - DNA, 2792 bp, Artificial Sequence
  Description of Artificial Sequence: Synthetic Caldibacillus cellulovorans CompA.2 DNA Polymerase R838L
atgaaatacctgctgccgaccgctgctgctggtctgctgctcctcgctgcccagccggcgatggccatgggcaaactgattctggtcgacggaaacagcgtcgccaaccgggcgttttacgccgtccggctgctcagcacgcgcggcggcctgcacacaaacgcggtgtacggattcgccaacatgttgctcaagctgatcgaggaggaacggccgacgcattttctcgtcgcgttcgacgcgggcaaggcgacgttccgtcatcgcgaatacgaggcctacaaggcgggtcgcctgcagacgccgcccgagctgtccgagcagtttccgtacatccgggagctcgtccgggcgttcggcgtcgcgtccggcgagctggaggaatacgaggcggacgacatgatcggtacgctggcgaaacgggcggaggccgagggcgtcgacacgctggtcgtcaccggcgaccgcgatttgctccagctcgtatcggaccgcgtgaccgtcgcgctgacgcgcaagggcatcacggaaacggagcggtacgacccggcgcgcatccgcgaggaatacggcttcgatcccgaccgcatccgcgacctcaaagggctgatgggcgacgcgtctgacaatcttcccggcgttcccggcgtcggtgagaaaaccgcactgaaactgctcaggcagtacggttcgctggagagcgtcctggaacacgcgtcggaaatcgccggaaagctcggtgaaaatctgcgggcgcacgccgacgccgcccgattgagcaagcggctggcgacgatcgactgcgcggtaccgttgcagtcgggatgggactggctgcgcctcggcgaaccggaccgcgccgcgctcgcctcgctgttgcggcagctcgaattcaagtcgctgttgaaacggctcggactcgacggcacgtccgccgatgccgacgtcgacggcgtccgttcctccgcgcggccggcggacgagaaacggccgagggccgtcgccgtcgctgaggagggcgtcgacgtccgctgtccggatcgcccggaagaagtcgaagaagcgctgtcgcggctggaagccgcccagtcggtcgtcgtcgaggtgacgggcgacaacccgcacgacggcgaagtgcgcggcgtcgcatggtgggacggacatacggcgtatttcattccgtttgaacggctggtgcagtccgacatgcggccgctggccgactggctcgccgacgcgcgtcggccgaagcgtacgcacgactcccatcgcgctgaagtggcgctgttctggcacggccttgcgtttcgcggcacgtcgttctgcacgcatatcgccgcctatttgctcgaccccacggaatcgcgccatacgctggcggacctgtcgcgccgctacggtctgccgccggtaccggaagccgaggacgtttacggcaagggcgcgaagttcaaggttcccgatcgcgacacgctggcgcgttacgtcggccgcaaggccgccctagtcgcgcggctcgttccgctgctcgaggcggatttggcggcctgcggcatgcgttcgcttttttacgacctggagctgccgctttcatccgaactcgccgtcatggagacggtcggcgtccgcgtcgacgcggcggcgctcgccgcctacggcgaggaattgcgcgaggcggcggcgaaagtcgagcgggagatttacgagctggccgggacgacgttcaacatcggatcgacgaaacagctcggcgaaattttgttcgataagctggggctgcccgtcgtcaagaaaacgaaaaccggctattccaccgacgcagacgtgctggaggaactggcgccgtaccatccgatcgtcgaaaagattttgcattaccgccaactgacgaaattgcagtcgacctacatcgaggggcttttgaaagaaatccgtccgcaaaccggtaaaatccatacgtattatcagcagacgatcgcggcgacggggcggctgagcagtcagtttcccaatcttcagaacattccgatccgtctcgaagaggggcggaaaatccgcaaggcgttcgttccgtcagaaccgggatggctgatgctcgccgccgactattcgcagatcgaactgcgcgtgctcgcgcacgtttccggcgacgaacggctgaaggaagcgtttcggacaggcatggacatccacacgaagaccgcgatggacgtgttcggcgtttccgaagaccgcgtcgacgcgcgcatgcggcggcaggcgaaggcggtcaatttcggcatcatctacggcatcagcgatttcggactggcgcaaaacctgaacatttcccgcaaggaggcggcggagttcatccggcaatatttcgccgtcttttcgggcgtcaaggcgtaccgcgagcggatcgtcgagcaggcgcgccgcgacggttacgtgacgaccctgctcggtcgcaggcgctatttgccggacatcaacgcgtcgaattacaacctccgctcgttcgcggagcttacggcgatgaatacgccgatccagggcacggccgccgacatcatcaagaccgcgatggtgcgtctgacgcggcggatgcgcgacgtcggactgaagagccgcatgctgctgcaggttcacgacgagctcgtgtttgaagtgccgccggacgagctcgacgcgatgcgggagcttgtgacggacgtcatggagtcggcggtcccgctcgacgtgccgctgaaggtcgacgtcagctggggcgccgactggtacgcggcgaagtgagggaagcgggatcc

SEQ ID NO: 1369 - DNA, 2792 bp, Artificial Sequence
  Description of Artificial Sequence: Synthetic Caldibacillus cellulovorans CompA.2 DNA Polymerase R838K
atgaaatacctgctgccgaccgctgctgctggtctgctgctcctcgctgcccagccggcgatggccatgggcaaactgattctggtcgacggaaacagcgtcgccaaccgggcgttttacgccgtccggctgctcagcacgcgcggcggcctgcacacaaacgcggtgtacggattcgccaacatgttgctcaagctgatcgaggaggaacggccgacgcattttctcgtcgcgttcgacgcgggcaaggcgacgttccgtcatcgcgaatacgaggcctacaaggcgggtcgcctgcagacgccgcccgagctgtccgagcagtttccgtacatccgggagctcgtccgggcgttcggcgtcgcgtccggcgagctggaggaatacgaggcggacgacatgatcggtacgctggcgaaacgggcggaggccgagggcgtcgacacgctggtcgtcaccggcgaccgcgatttgctccagctcgtatcggaccgcgtgaccgtcgcgctgacgcgcaagggcatcacggaaacggagcggtacgacccggcgcgcatccgcgaggaatacggcttcgatcccgaccgcatccgcgacctcaaagggctgatgggcgacgcgtctgacaatcttcccggcgttcccggcgtcggtgagaaaaccgcactgaaactgctcaggcagtacggttcgctggagagcgtcctggaacacgcgtcggaaatcgccggaaagctcggtgaaaatctgcgggcgcacgccgacgccgcccgattgagcaagcggctggcgacgatcgactgcgcggtaccgttgcagtcgggatgggactggctgcgcctcggcgaaccggaccgcgccgcgctcgcctcgctgttgcggcagctcgaattcaagtcgctgttgaaacggctcggactcgacggcacgtccgccgatgccgacgtcgacggcgtccgttcctccgcgcggccggcggacgagaaacggccgagggccgtcgccgtcgctgaggagggcgtcgacgtccgctgtccggatcgcccggaagaagtcgaagaagcgctgtcgcggctggaagccgcccagtcggtcgtcgtcgaggtgacgggcgacaacccgcacgacggcgaagtgcgcggcgtcgcatggtgggacggacatacggcgtatttcattccgtttgaacggctggtgcagtccgacatgcggccgctggccgactggctcgccgacgcgcgtcggccgaagcgtacgcacgactcccatcgcgctgaagtggcgctgttctggcacggccttgcgtttcgcggcacgtcgttctgcacgcatatcgccgcctatttgctcgaccccacggaatcgcgccatacgctggcggacctgtcgcgccgctacggtctgccgccggtaccggaagccgaggacgtttacggcaagggcgcgaagttcaaggttcccgatcgcgacacgctggcgcgttacgtcggccgcaaggccgccctagtcgcgcggctcgttccgctgctcgaggcggatttggcggcctgcggcatgcgttcgcttttttacgacctggagctgccgctttcatccgaactcgccgtcatggagacggtcggcgtccgcgtcgacgcggcggcgctcgccgcctacggcgaggaattgcgcgaggcggcggcgaaagtcgagcgggagatttacgagctggccgggacgacgttcaacatcggatcgacgaaacagctcggcgaaattttgttcgataagctggggctgcccgtcgtcaagaaaacgaaaaccggctattccaccgacgcagacgtgctggaggaactggcgccgtaccatccgatcgtcgaaaagattttgcattaccgccaactgacgaaattgcagtcgacctacatcgaggggcttttgaaagaaatccgtccgcaaaccggtaaaatccatacgtattatcagcagacgatcgcggcgacggggcggctgagcagtcagtttcccaatcttcagaacattccgatccgtctcgaagaggggcggaaaatccgcaaggcgttcgttccgtcagaaccgggatggctgatgctcgccgccgactattcgcagatcgaactgcgcgtgctcgcgcacgtttccggcgacgaacggctgaaggaagcgtttcggacaggcatggacatccacacgaagaccgcgatggacgtgttcggcgtttccgaagaccgcgtcgacgcgcgcatgcggcggcaggcgaaggcggtcaatttcggcatcatctacggcatcagcgatttcggactggcgcaaaacctgaacatttcccgcaaggaggcggcggagttcatccggcaatatttcgccgtcttttcgggcgtcaaggcgtaccgcgagcggatcgtcgagcaggcgcgccgcgacggttacgtgacgaccctgctcggtcgcaggcgctatttgccggacatcaacgcgtcgaattacaacctccgctcgttcgcggagaaaacggcgatgaatacgccgatccagggcacggccgccgacatcatcaagaccgcgatggtgcgtctgacgcggcggatgcgcgacgtcggactgaagagccgcatgctgctgcaggttcacgacgagctcgtgtttgaagtgccgccggacgagctcgacgcgatgcgggagcttgtgacggacgtcatggagtcggcggtcccgctcgacgtgccgctgaaggtcgacgtcagctggggcgccgactggtacgcggcgaagtgagggaagcgggatcc

SEQ ID NO: 1370 - DNA, 2792 bp, Artificial Sequence
  Description of Artificial Sequence: Synthetic Caldibacillus cellulovorans CompA.2 DNA Polymerase R838M
atgaaatacctgctgccgaccgctgctgctggtctgctgctcctcgctgcccagccggcgatggccatgggcaaactgattctggtcgacggaaacagcgtcgccaaccgggcgttttacgccgtccggctgctcagcacgcgcggcggcctgcacacaaacgcggtgtacggattcgccaacatgttgctcaagctgatcgaggaggaacggccgacgcattttctcgtcgcgttcgacgcgggcaaggcgacgttccgtcatcgcgaatacgaggcctacaaggcgggtcgcctgcagacgccgcccgagctgtccgagcagtttccgtacatccgggagctcgtccgggcgttcggcgtcgcgtccggcgagctggaggaatacgaggcggacgacatgatcggtacgctggcgaaacgggcggaggccgagggcgtcgacacgctggtcgtcaccggcgaccgcgatttgctccagctcgtatcggaccgcgtgaccgtcgcgctgacgcgcaagggcatcacggaaacggagcggtacgacccggcgcgcatccgcgaggaatacggcttcgatcccgaccgcatccgcgacctcaaagggctgatgggcgacgcgtctgacaatcttcccggcgttcccggcgtcggtgagaaaaccgcactgaaactgctcaggcagtacggttcgctggagagcgtcctggaacacgcgtcggaaatcgccggaaagctcggtgaaaatctgcgggcgcacgccgacgccgcccgattgagcaagcggctggcgacgatcgactgcgcggtaccgttgcagtcgggatgggactggctgcgcctcggcgaaccggaccgcgccgcgctcgcctcgctgttgcggcagctcgaattcaagtcgctgttgaaacggctcggactcgacggcacgtccgccgatgccgacgtcgacggcgtccgttcctccgcgcggccggcggacgagaaacggccgagggccgtcgccgtcgctgaggagggcgtcgacgtccgctgtccggatcgcccggaagaagtcgaagaagcgctgtcgcggctggaagccgcccagtcggtcgtcgtcgaggtgacgggcgacaacccgcacgacggcgaagtgcgcggcgtcgcatggtgggacggacatacggcgtatttcattccgtttgaacggctggtgcagtccgacatgcggccgctggccgactggctcgccgacgcgcgtcggccgaagcgtacgcacgactcccatcgcgctgaagtggcgctgttctggcacggccttgcgtttcgcggcacgtcgttctgcacgcatatcgccgcctatttgctcgaccccacggaatcgcgccatacgctggcggacctgtcgcgccgctacggtctgccgccggtaccggaagccgaggacgtttacggcaagggcgcgaagttcaaggttcccgatcgcgacacgctggcgcgttacgtcggccgcaaggccgccctagtcgcgcggctcgttccgctgctcgaggcggatttggcggcctgcggcatgcgttcgcttttttacgacctggagctgccgctttcatccgaactcgccgtcatggagacggtcggcgtccgcgtcgacgcggcggcgctcgccgcctacggcgaggaattgcgcgaggcggcggcgaaagtcgagcgggagatttacgagctggccgggacgacgttcaacatcggatcgacgaaacagctcggcgaaattttgttcgataagctggggctgcccgtcgtcaagaaaacgaaaaccggctattccaccgacgcagacgtgctggaggaactggcgccgtaccatccgatcgtcgaaaagattttgcattaccgccaactgacgaaattgcagtcgacctacatcgaggggcttttgaaagaaatccgtccgcaaaccggtaaaatccatacgtattatcagcagacgatcgcggcgacggggcggctgagcagtcagtttcccaatcttcagaacattccgatccgtctcgaagaggggcggaaaatccgcaaggcgttcgttccgtcagaaccgggatggctgatgctcgccgccgactattcgcagatcgaactgcgcgtgctcgcgcacgtttccggcgacgaacggctgaaggaagcgtttcggacaggcatggacatccacacgaagaccgcgatggacgtgttcggcgtttccgaagaccgcgtcgacgcgcgcatgcggcggcaggcgaaggcggtcaatttcggcatcatctacggcatcagcgatttcggactggcgcaaaacctgaacatttcccgcaaggaggcggcggagttcatccggcaatatttcgccgtcttttcgggcgtcaaggcgtaccgcgagcggatcgtcgagcaggcgcgccgcgacggttacgtgacgaccctgctcggtcgcaggcgctatttgccggacatcaacgcgtcgaattacaacctccgctcgttcgcggagatgacggcgatgaatacgccgatccagggcacggccgccgacatcatcaagaccgcgatggtgcgtctgacgcggcggatgcgcgacgtcggactgaagagccgcatgctgctgcaggttcacgacgagctcgtgtttgaagtgccgccggacgagctcgacgcgatgcgggagcttgtgacggacgtcatggagtcggcggtcccgctcgacgtgccgctgaaggtcgacgtcagctggggcgccgactggtacgcggcgaagtgagggaagcgggatcc

SEQ ID NO: 1371 - DNA, 2792 bp, Artificial Sequence
  Description of Artificial Sequence: Synthetic Caldibacillus cellulovorans CompA.2 DNA Polymerase R838F
atgaaatacctgctgccgaccgctgctgctggtctgctgctcctcgctgcccagccggcgatggccatgggcaaactgattctggtcgacggaaacagcgtcgccaaccgggcgttttacgccgtccggctgctcagcacgcgcggcggcctgcacacaaacgcggtgtacggattcgccaacatgttgctcaagctgatcgaggaggaacggccgacgcattttctcgtcgcgttcgacgcgggcaaggcgacgttccgtcatcgcgaatacgaggcctacaaggcgggtcgcctgcagacgccgcccgagctgtccgagcagtttccgtacatccgggagctcgtccgggcgttcggcgtcgcgtccggcgagctggaggaatacgaggcggacgacatgatcggtacgctggcgaaacgggcggaggccgagggcgtcgacacgctggtcgtcaccggcgaccgcgatttgctccagctcgtatcggaccgcgtgaccgtcgcgctgacgcgcaagggcatcacggaaacggagcggtacgacccggcgcgcatccgcgaggaatacggcttcgatcccgaccgcatccgcgacctcaaagggctgatgggcgacgcgtctgacaatcttcccggcgttcccggcgtcggtgagaaaaccgcactgaaactgctcaggcagtacggttcgctggagagcgtcctggaacacgcgtcggaaatcgccggaaagctcggtgaaaatctgcgggcgcacgccgacgccgcccgattgagcaagcggctggcgacgatcgactgcgcggtaccgttgcagtcgggatgggactggctgcgcctcggcgaaccggaccgcgccgcgctcgcctcgctgttgcggcagctcgaattcaagtcgctgttgaaacggctcggactcgacggcacgtccgccgatgccgacgtcgacggcgtccgttcctccgcgcggccggcggacgagaaacggccgagggccgtcgccgtcgctgaggagggcgtcgacgtccgctgtccggatcgcccggaagaagtcgaagaagcgctgtcgcggctggaagccgcccagtcggtcgtcgtcgaggtgacgggcgacaacccgcacgacggcgaagtgcgcggcgtcgcatggtgggacggacatacggcgtatttcattccgtttgaacggctggtgcagtccgacatgcggccgctggccgactggctcgccgacgcgcgtcggccgaagcgtacgcacgactcccatcgcgctgaagtggcgctgttctggcacggccttgcgtttcgcggcacgtcgttctgcacgcatatcgccgcctatttgctcgaccccacggaatcgcgccatacgctggcggacctgtcgcgccgctacggtctgccgccggtaccggaagccgaggacgtttacggcaagggcgcgaagttcaaggttcccgatcgcgacacgctggcgcgttacgtcggccgcaaggccgccctagtcgcgcggctcgttccgctgctcgaggcggatttggcggcctgcggcatgcgttcgcttttttacgacctggagctgccgctttcatccgaactcgccgtcatggagacggtcggcgtccgcgtcgacgcggcggcgctcgccgcctacggcgaggaattgcgcgaggcggcggcgaaagtcgagcgggagatttacgagctggccgggacgacgttcaacatcggatcgacgaaacagctcggcgaaattttgttcgataagctggggctgcccgtcgtcaagaaaacgaaaaccggctattccaccgacgcagacgtgctggaggaactggcgccgtaccatccgatcgtcgaaaagattttgcattaccgccaactgacgaaattgcagtcgacctacatcgaggggcttttgaaagaaatccgtccgcaaaccggtaaaatccatacgtattatcagcagacgatcgcggcgacggggcggctgagcagtcagtttcccaatcttcagaacattccgatccgtctcgaagaggggcggaaaatccgcaaggcgttcgttccgtcagaaccgggatggctgatgctcgccgccgactattcgcagatcgaactgcgcgtgctcgcgcacgtttccggcgacgaacggctgaaggaagcgtttcggacaggcatggacatccacacgaagaccgcgatggacgtgttcggcgtttccgaagaccgcgtcgacgcgcgcatgcggcggcaggcgaaggcggtcaatttcggcatcatctacggcatcagcgatttcggactggcgcaaaacctgaacatttcccgcaaggaggcggcggagttcatccggcaatatttcgccgtcttttcgggcgtcaaggcgtaccgcgagcggatcgtcgagcaggcgcgccgcgacggttacgtgacgaccctgctcggtcgcaggcgctatttgccggacatcaacgcgtcgaattacaacctccgctcgttcgcggagtttacggcgatgaatacgccgatccagggcacggccgccgacatcatcaagaccgcgatggtgcgtctgacgcggcggatgcgcgacgtcggactgaagagccgcatgctgctgcaggttcacgacgagctcgtgtttgaagtgccgccggacgagctcgacgcgatgcgggagcttgtgacggacgtcatggagtcggcggtcccgctcgacgtgccgctgaaggtcgacgtcagctggggcgccgactggtacgcggcgaagtgagggaagcgggatcc

SEQ ID NO: 1372 - DNA, 2792 bp, Artificial Sequence
  Description of Artificial Sequence: Synthetic Caldibacillus cellulovorans CompA.2 DNA Polymerase R838P
atgaaatacctgctgccgaccgctgctgctggtctgctgctcctcgctgcccagccggcgatggccatgggcaaactgattctggtcgacggaaacagcgtcgccaaccgggcgttttacgccgtccggctgctcagcacgcgcggcggcctgcacacaaacgcggtgtacggattcgccaacatgttgctcaagctgatcgaggaggaacggccgacgcattttctcgtcgcgttcgacgcgggcaaggcgacgttccgtcatcgcgaatacgaggcctacaaggcgggtcgcctgcagacgccgcccgagctgtccgagcagtttccgtacatccgggagctcgtccgggcgttcggcgtcgcgtccggcgagctggaggaatacgaggcggacgacatgatcggtacgctggcgaaacgggcggaggccgagggcgtcgacacgctggtcgtcaccggcgaccgcgatttgctccagctcgtatcggaccgcgtgaccgtcgcgctgacgcgcaagggcatcacggaaacggagcggtacgacccggcgcgcatccgcgaggaatacggcttcgatcccgaccgcatccgcgacctcaaagggctgatgggcgacgcgtctgacaatcttcccggcgttcccggcgtcggtgagaaaaccgcactgaaactgctcaggcagtacggttcgctggagagcgtcctggaacacgcgtcggaaatcgccggaaagctcggtgaaaatctgcgggcgcacgccgacgccgcccgattgagcaagcggctggcgacgatcgactgcgcggtaccgttgcagtcgggatgggactggctgcgcctcggcgaaccggaccgcgccgcgctcgcctcgctgttgcggcagctcgaattcaagtcgctgttgaaacggctcggactcgacggcacgtccgccgatgccgacgtcgacggcgtccgttcctccgcgcggccggcggacgagaaacggccgagggccgtcgccgtcgctgaggagggcgtcgacgtccgctgtccggatcgcccggaagaagtcgaagaagcgctgtcgcggctggaagccgcccagtcggtcgtcgtcgaggtgacgggcgacaacccgcacgacggcgaagtgcgcggcgtcgcatggtgggacggacatacggcgtatttcattccgtttgaacggctggtgcagtccgacatgcggccgctggccgactggctcgccgacgcgcgtcggccgaagcgtacgcacgactcccatcgcgctgaagtggcgctgttctggcacggccttgcgtttcgcggcacgtcgttctgcacgcatatcgccgcctatttgctcgaccccacggaatcgcgccatacgctggcggacctgtcgcgccgctacggtctgccgccggtaccggaagccgaggacgtttacggcaagggcgcgaagttcaaggttcccgatcgcgacacgctggcgcgttacgtcggccgcaaggccgccctagtcgcgcggctcgttccgctgctcgaggcggatttggcggcctgcggcatgcgttcgcttttttacgacctggagctgccgctttcatccgaactcgccgtcatggagacggtcggcgtccgcgtcgacgcggcggcgctcgccgcctacggcgaggaattgcgcgaggcggcggcgaaagtcgagcgggagatttacgagctggccgggacgacgttcaacatcggatcgacgaaacagctcggcgaaattttgttcgataagctggggctgcccgtcgtcaagaaaacgaaaaccggctattccaccgacgcagacgtgctggaggaactggcgccgtaccatccgatcgtcgaaaagattttgcattaccgccaactgacgaaattgcagtcgacctacatcgaggggcttttgaaagaaatccgtccgcaaaccggtaaaatccatacgtattatcagcagacgatcgcggcgacggggcggctgagcagtcagtttcccaatcttcagaacattccgatccgtctcgaagaggggcggaaaatccgcaaggcgttcgttccgtcagaaccgggatggctgatgctcgccgccgactattcgcagatcgaactgcgcgtgctcgcgcacgtttccggcgacgaacggctgaaggaagcgtttcggacaggcatggacatccacacgaagaccgcgatggacgtgttcggcgtttccgaagaccgcgtcgacgcgcgcatgcggcggcaggcgaaggcggtcaatttcggcatcatctacggcatcagcgatttcggactggcgcaaaacctgaacatttcccgcaaggaggcggcggagttcatccggcaatatttcgccgtcttttcgggcgtcaaggcgtaccgcgagcggatcgtcgagcaggcgcgccgcgacggttacgtgacgaccctgctcggtcgcaggcgctatttgccggacatcaacgcgtcgaattacaacctccgctcgttcgcggagcctacggcgatgaatacgccgatccagggcacggccgccgacatcatcaagaccgcgatggtgcgtctgacgcggcggatgcgcgacgtcggactgaagagccgcatgctgctgcaggttcacgacgagctcgtgtttgaagtgccgccggacgagctcgacgcgatgcgggagcttgtgacggacgtcatggagtcggcggtcccgctcgacgtgccgctgaaggtcgacgtcagctggggcgccgactggtacgcggcgaagtgagggaagcgggatcc

SEQ ID NO: 1373 - DNA, 2792 bp, Artificial Sequence
  Description of Artificial Sequence: Synthetic Caldibacillus cellulovorans CompA.2 DNA Polymerase R838S
atgaaatacctgctgccgaccgctgctgctggtctgctgctcctcgctgcccagccggcgatggccatgggcaaactgattctggtcgacggaaacagcgtcgccaaccgggcgttttacgccgtccggctgctcagcacgcgcggcggcctgcacacaaacgcggtgtacggattcgccaacatgttgctcaagctgatcgaggaggaacggccgacgcattttctcgtcgcgttcgacgcgggcaaggcgacgttccgtcatcgcgaatacgaggcctacaaggcgggtcgcctgcagacgccgcccgagctgtccgagcagtttccgtacatccgggagctcgtccgggcgttcggcgtcgcgtccggcgagctggaggaatacgaggcggacgacatgatcggtacgctggcgaaacgggcggaggccgagggcgtcgacacgctggtcgtcaccggcgaccgcgatttgctccagctcgtatcggaccgcgtgaccgtcgcgctgacgcgcaagggcatcacggaaacggagcggtacgacccggcgcgcatccgcgaggaatacggcttcgatcccgaccgcatccgcgacctcaaagggctgatgggcgacgcgtctgacaatcttcccggcgttcccggcgtcggtgagaaaaccgcactgaaactgctcaggcagtacggttcgctggagagcgtcctggaacacgcgtcggaaatcgccggaaagctcggtgaaaatctgcgggcgcacgccgacgccgcccgattgagcaagcggctggcgacgatcgactgcgcggtaccgttgcagtcgggatgggactggctgcgcctcggcgaaccggaccgcgccgcgctcgcctcgctgttgcggcagctcgaattcaagtcgctgttgaaacggctcggactcgacggcacgtccgccgatgccgacgtcgacggcgtccgttcctccgcgcggccggcggacgagaaacggccgagggccgtcgccgtcgctgaggagggcgtcgacgtccgctgtccggatcgcccggaagaagtcgaagaagcgctgtcgcggctggaagccgcccagtcggtcgtcgtcgaggtgacgggcgacaacccgcacgacggcgaagtgcgcggcgtcgcatggtgggacggacatacggcgtatttcattccgtttgaacggctggtgcagtccgacatgcggccgctggccgactggctcgccgacgcgcgtcggccgaagcgtacgcacgactcccatcgcgctgaagtggcgctgttctggcacggccttgcgtttcgcggcacgtcgttctgcacgcatatcgccgcctatttgctcgaccccacggaatcgcgccatacgctggcggacctgtcgcgccgctacggtctgccgccggtaccggaagccgaggacgtttacggcaagggcgcgaagttcaaggttcccgatcgcgacacgctggcgcgttacgtcggccgcaaggccgccctagtcgcgcggctcgttccgctgctcgaggcggatttggcggcctgcggcatgcgttcgcttttttacgacctggagctgccgctttcatccgaactcgccgtcatggagacggtcggcgtccgcgtcgacgcggcggcgctcgccgcctacggcgaggaattgcgcgaggcggcggcgaaagtcgagcgggagatttacgagctggccgggacgacgttcaacatcggatcgacgaaacagctcggcgaaattttgttcgataagctggggctgcccgtcgtcaagaaaacgaaaaccggctattccaccgacgcagacgtgctggaggaactggcgccgtaccatccgatcgtcgaaaagattttgcattaccgccaactgacgaaattgcagtcgacctacatcgaggggcttttgaaagaaatccgtccgcaaaccggtaaaatccatacgtattatcagcagacgatcgcggcgacggggcggctgagcagtcagtttcccaatcttcagaacattccgatccgtctcgaagaggggcggaaaatccgcaaggcgttcgttccgtcagaaccgggatggctgatgctcgccgccgactattcgcagatcgaactgcgcgtgctcgcgcacgtttccggcgacgaacggctgaaggaagcgtttcggacaggcatggacatccacacgaagaccgcgatggacgtgttcggcgtttccgaagaccgcgtcgacgcgcgcatgcggcggcaggcgaaggcggtcaatttcggcatcatctacggcatcagcgatttcggactggcgcaaaacctgaacatttcccgcaaggaggcggcggagttcatccggcaatatttcgccgtcttttcgggcgtcaaggcgtaccgcgagcggatcgtcgagcaggcgcgccgcgacggttacgtgacgaccctgctcggtcgcaggcgctatttgccggacatcaacgcgtcgaattacaacctccgctcgttcgcggagtctacggcgatgaatacgccgatccagggcacggccgccgacatcatcaagaccgcgatggtgcgtctgacgcggcggatgcgcgacgtcggactgaagagccgcatgctgctgcaggttcacgacgagctcgtgtttgaagtgccgccggacgagctcgacgcgatgcgggagcttgtgacggacgtcatggagtcggcggtcccgctcgacgtgccgctgaaggtcgacgtcagctggggcgccgactggtacgcggcgaagtgagggaagcgggatcc

SEQ ID NO: 1374 - DNA, 2792 bp, Artificial Sequence
  Description of Artificial Sequence: Synthetic Caldibacillus cellulovorans CompA.2 DNA Polymerase R838T
atgaaatacctgctgccgaccgctgctgctggtctgctgctcctcgctgcccagccggcgatggccatgggcaaactgattctggtcgacggaaacagcgtcgccaaccgggcgttttacgccgtccggctgctcagcacgcgcggcggcctgcacacaaacgcggtgtacggattcgccaacatgttgctcaagctgatcgaggaggaacggccgacgcattttctcgtcgcgttcgacgcgggcaaggcgacgttccgtcatcgcgaatacgaggcctacaaggcgggtcgcctgcagacgccgcccgagctgtccgagcagtttccgtacatccgggagctcgtccgggcgttcggcgtcgcgtccggcgagctggaggaatacgaggcggacgacatgatcggtacgctggcgaaacgggcggaggccgagggcgtcgacacgctggtcgtcaccggcgaccgcgatttgctccagctcgtatcggaccgcgtgaccgtcgcgctgacgcgcaagggcatcacggaaacggagcggtacgacccggcgcgcatccgcgaggaatacggcttcgatcccgaccgcatccgcgacctcaaagggctgatgggcgacgcgtctgacaatcttcccggcgttcccggcgtcggtgagaaaaccgcactgaaactgctcaggcagtacggttcgctggagagcgtcctggaacacgcgtcggaaatcgccggaaagctcggtgaaaatctgcgggcgcacgccgacgccgcccgattgagcaagcggctggcgacgatcgactgcgcggtaccgttgcagtcgggatgggactggctgcgcctcggcgaaccggaccgcgccgcgctcgcctcgctgttgcggcagctcgaattcaagtcgctgttgaaacggctcggactcgacggcacgtccgccgatgccgacgtcgacggcgtccgttcctccgcgcggccggcggacgagaaacggccgagggccgtcgccgtcgctgaggagggcgtcgacgtccgctgtccggatcgcccggaagaagtcgaagaagcgctgtcgcggctggaagccgcccagtcggtcgtcgtcgaggtgacgggcgacaacccgcacgacggcgaagtgcgcggcgtcgcatggtgggacggacatacggcgtatttcattccgtttgaacggctggtgcagtccgacatgcggccgctggccgactggctcgccgacgcgcgtcggccgaagcgtacgcacgactcccatcgcgctgaagtggcgctgttctggcacggccttgcgtttcgcggcacgtcgttctgcacgcatatcgccgcctatttgctcgaccccacggaatcgcgccatacgctggcggacctgtcgcgccgctacggtctgccgccggtaccggaagccgaggacgtttacggcaagggcgcgaagttcaaggttcccgatcgcgacacgctggcgcgttacgtcggccgcaaggccgccctagtcgcgcggctcgttccgctgctcgaggcggatttggcggcctgcggcatgcgttcgcttttttacgacctggagctgccgctttcatccgaactcgccgtcatggagacggtcggcgtccgcgtcgacgcggcggcgctcgccgcctacggcgaggaattgcgcgaggcggcggcgaaagtcgagcgggagatttacgagctggccgggacgacgttcaacatcggatcgacgaaacagctcggcgaaattttgttcgataagctggggctgcccgtcgtcaagaaaacgaaaaccggctattccaccgacgcagacgtgctggaggaactggcgccgtaccatccgatcgtcgaaaagattttgcattaccgccaactgacgaaattgcagtcgacctacatcgaggggcttttgaaagaaatccgtccgcaaaccggtaaaatccatacgtattatcagcagacgatcgcggcgacggggcggctgagcagtcagtttcccaatcttcagaacattccgatccgtctcgaagaggggcggaaaatccgcaaggcgttcgttccgtcagaaccgggatggctgatgctcgccgccgactattcgcagatcgaactgcgcgtgctcgcgcacgtttccggcgacgaacggctgaaggaagcgtttcggacaggcatggacatccacacgaagaccgcgatggacgtgttcggcgtttccgaagaccgcgtcgacgcgcgcatgcggcggcaggcgaaggcggtcaatttcggcatcatctacggcatcagcgatttcggactggcgcaaaacctgaacatttcccgcaaggaggcggcggagttcatccggcaatatttcgccgtcttttcgggcgtcaaggcgtaccgcgagcggatcgtcgagcaggcgcgccgcgacggttacgtgacgaccctgctcggtcgcaggcgctatttgccggacatcaacgcgtcgaattacaacctccgctcgttcgcggagactacggcgatgaatacgccgatccagggcacggccgccgacatcatcaagaccgcgatggtgcgtctgacgcggcggatgcgcgacgtcggactgaagagccgcatgctgctgcaggttcacgacgagctcgtgtttgaagtgccgccggacgagctcgacgcgatgcgggagcttgtgacggacgtcatggagtcggcggtcccgctcgacgtgccgctgaaggtcgacgtcagctggggcgccgactggtacgcggcgaagtgagggaagcgggatcc

SEQ ID NO: 1375 - DNA, 2792 bp, Artificial Sequence
  Description of Artificial Sequence: Synthetic Caldibacillus cellulovorans CompA.2 DNA Polymerase R838W
atgaaatacctgctgccgaccgctgctgctggtctgctgctcctcgctgcccagccggcgatggccatgggcaaactgattctggtcgacggaaacagcgtcgccaaccgggcgttttacgccgtccggctgctcagcacgcgcggcggcctgcacacaaacgcggtgtacggattcgccaacatgttgctcaagctgatcgaggaggaacggccgacgcattttctcgtcgcgttcgacgcgggcaaggcgacgttccgtcatcgcgaatacgaggcctacaaggcgggtcgcctgcagacgccgcccgagctgtccgagcagtttccgtacatccgggagctcgtccgggcgttcggcgtcgcgtccggcgagctggaggaatacgaggcggacgacatgatcggtacgctggcgaaacgggcggaggccgagggcgtcgacacgctggtcgtcaccggcgaccgcgatttgctccagctcgtatcggaccgcgtgaccgtcgcgctgacgcgcaagggcatcacggaaacggagcggtacgacccggcgcgcatccgcgaggaatacggcttcgatcccgaccgcatccgcgacctcaaagggctgatgggcgacgcgtctgacaatcttcccggcgttcccggcgtcggtgagaaaaccgcactgaaactgctcaggcagtacggttcgctggagagcgtcctggaacacgcgtcggaaatcgccggaaagctcggtgaaaatctgcgggcgcacgccgacgccgcccgattgagcaagcggctggcgacgatcgactgcgcggtaccgttgcagtcgggatgggactggctgcgcctcggcgaaccggaccgcgccgcgctcgcctcgctgttgcggcagctcgaattcaagtcgctgttgaaacggctcggactcgacggcacgtccgccgatgccgacgtcgacggcgtccgttcctccgcgcggccggcggacgagaaacggccgagggccgtcgccgtcgctgaggagggcgtcgacgtccgctgtccggatcgcccggaagaagtcgaagaagcgctgtcgcggctggaagccgcccagtcggtcgtcgtcgaggtgacgggcgacaacccgcacgacggcgaagtgcgcggcgtcgcatggtgggacggacatacggcgtatttcattccgtttgaacggctggtgcagtccgacatgcggccgctggccgactggctcgccgacgcgcgtcggccgaagcgtacgcacgactcccatcgcgctgaagtggcgctgttctggcacggccttgcgtttcgcggcacgtcgttctgcacgcatatcgccgcctatttgctcgaccccacggaatcgcgccatacgctggcggacctgtcgcgccgctacggtctgccgccggtaccggaagccgaggacgtttacggcaagggcgcgaagttcaaggttcccgatcgcgacacgctggcgcgttacgtcggccgcaaggccgccctagtcgcgcggctcgttccgctgctcgaggcggatttggcggcctgcggcatgcgttcgcttttttacgacctggagctgccgctttcatccgaactcgccgtcatggagacggtcggcgtccgcgtcgacgcggcggcgctcgccgcctacggcgaggaattgcgcgaggcggcggcgaaagtcgagcgggagatttacgagctggccgggacgacgttcaacatcggatcgacgaaacagctcggcgaaattttgttcgataagctggggctgcccgtcgtcaagaaaacgaaaaccggctattccaccgacgcagacgtgctggaggaactggcgccgtaccatccgatcgtcgaaaagattttgcattaccgccaactgacgaaattgcagtcgacctacatcgaggggcttttgaaagaaatccgtccgcaaaccggtaaaatccatacgtattatcagcagacgatcgcggcgacggggcggctgagcagtcagtttcccaatcttcagaacattccgatccgtctcgaagaggggcggaaaatccgcaaggcgttcgttccgtcagaaccgggatggctgatgctcgccgccgactattcgcagatcgaactgcgcgtgctcgcgcacgtttccggcgacgaacggctgaaggaagcgtttcggacaggcatggacatccacacgaagaccgcgatggacgtgttcggcgtttccgaagaccgcgtcgacgcgcgcatgcggcggcaggcgaaggcggtcaatttcggcatcatctacggcatcagcgatttcggactggcgcaaaacctgaacatttcccgcaaggaggcggcggagttcatccggcaatatttcgccgtcttttcgggcgtcaaggcgtaccgcgagcggatcgtcgagcaggcgcgccgcgacggttacgtgacgaccctgctcggtcgcaggcgctatttgccggacatcaacgcgtcgaattacaacctccgctcgttcgcggagtggacggcgatgaatacgccgatccagggcacggccgccgacatcatcaagaccgcgatggtgcgtctgacgcggcggatgcgcgacgtcggactgaagagccgcatgctgctgcaggttcacgacgagctcgtgtttgaagtgccgccggacgagctcgacgcgatgcgggagcttgtgacggacgtcatggagtcggcggtcccgctcgacgtgccgctgaaggtcgacgtcagctggggcgccgactggtacgcggcgaagtgagggaagcgggatcc

SEQ ID NO: 1376 - DNA, 2792 bp, Artificial Sequence
  Description of Artificial Sequence: Synthetic Caldibacillus cellulovorans CompA.2 DNA Polymerase R838Y
atgaaatacctgctgccgaccgctgctgctggtctgctgctcctcgctgcccagccggcgatggccatgggcaaactgattctggtcgacggaaacagcgtcgccaaccgggcgttttacgccgtccggctgctcagcacgcgcggcggcctgcacacaaacgcggtgtacggattcgccaacatgttgctcaagctgatcgaggaggaacggccgacgcattttctcgtcgcgttcgacgcgggcaaggcgacgttccgtcatcgcgaatacgaggcctacaaggcgggtcgcctgcagacgccgcccgagctgtccgagcagtttccgtacatccgggagctcgtccgggcgttcggcgtcgcgtccggcgagctggaggaatacgaggcggacgacatgatcggtacgctggcgaaacgggcggaggccgagggcgtcgacacgctggtcgtcaccggcgaccgcgatttgctccagctcgtatcggaccgcgtgaccgtcgcgctgacgcgcaagggcatcacggaaacggagcggtacgacccggcgcgcatccgcgaggaatacggcttcgatcccgaccgcatccgcgacctcaaagggctgatgggcgacgcgtctgacaatcttcccggcgttcccggcgtcggtgagaaaaccgcactgaaactgctcaggcagtacggttcgctggagagcgtcctggaacacgcgtcggaaatcgccggaaagctcggtgaaaatctgcgggcgcacgccgacgccgcccgattgagcaagcggctggcgacgatcgactgcgcggtaccgttgcagtcgggatgggactggctgcgcctcggcgaaccggaccgcgccgcgctcgcctcgctgttgcggcagctcgaattcaagtcgctgttgaaacggctcggactcgacggcacgtccgccgatgccgacgtcgacggcgtccgttcctccgcgcggccggcggacgagaaacggccgagggccgtcgccgtcgctgaggagggcgtcgacgtccgctgtccggatcgcccggaagaagtcgaagaagcgctgtcgcggctggaagccgcccagtcggtcgtcgtcgaggtgacgggcgacaacccgcacgacggcgaagtgcgcggcgtcgcatggtgggacggacatacggcgtatttcattccgtttgaacggctggtgcagtccgacatgcggccgctggccgactggctcgccgacgcgcgtcggccgaagcgtacgcacgactcccatcgcgctgaagtggcgctgttctggcacggccttgcgtttcgcggcacgtcgttctgcacgcatatcgccgcctatttgctcgaccccacggaatcgcgccatacgctggcggacctgtcgcgccgctacggtctgccgccggtaccggaagccgaggacgtttacggcaagggcgcgaagttcaaggttcccgatcgcgacacgctggcgcgttacgtcggccgcaaggccgccctagtcgcgcggctcgttccgctgctcgaggcggatttggcggcctgcggcatgcgttcgcttttttacgacctggagctgccgctttcatccgaactcgccgtcatggagacggtcggcgtccgcgtcgacgcggcggcgctcgccgcctacggcgaggaattgcgcgaggcggcggcgaaagtcgagcgggagatttacgagctggccgggacgacgttcaacatcggatcgacgaaacagctcggcgaaattttgttcgataagctggggctgcccgtcgtcaagaaaacgaaaaccggctattccaccgacgcagacgtgctggaggaactggcgccgtaccatccgatcgtcgaaaagattttgcattaccgccaactgacgaaattgcagtcgacctacatcgaggggcttttgaaagaaatccgtccgcaaaccggtaaaatccatacgtattatcagcagacgatcgcggcgacggggcggctgagcagtcagtttcccaatcttcagaacattccgatccgtctcgaagaggggcggaaaatccgcaaggcgttcgttccgtcagaaccgggatggctgatgctcgccgccgactattcgcagatcgaactgcgcgtgctcgcgcacgtttccggcgacgaacggctgaaggaagcgtttcggacaggcatggacatccacacgaagaccgcgatggacgtgttcggcgtttccgaagaccgcgtcgacgcgcgcatgcggcggcaggcgaaggcggtcaatttcggcatcatctacggcatcagcgatttcggactggcgcaaaacctgaacatttcccgcaaggaggcggcggagttcatccggcaatatttcgccgtcttttcgggcgtcaaggcgtaccgcgagcggatcgtcgagcaggcgcgccgcgacggttacgtgacgaccctgctcggtcgcaggcgctatttgccggacatcaacgcgtcgaattacaacctccgctcgttcgcggagtatacggcgatgaatacgccgatccagggcacggccgccgacatcatcaagaccgcgatggtgcgtctgacgcggcggatgcgcgacgtcggactgaagagccgcatgctgctgcaggttcacgacgagctcgtgtttgaagtgccgccggacgagctcgacgcgatgcgggagcttgtgacggacgtcatggagtcggcggtcccgctcgacgtgccgctgaaggtcgacgtcagctggggcgccgactggtacgcggcgaagtgagggaagcgggatcc

SEQ ID NO: 1377 - DNA, 2792 bp, Artificial Sequence
  Description of Artificial Sequence: Synthetic Caldibacillus cellulovorans CompA.2 DNA Polymerase R838V
atgaaatacctgctgccgaccgctgctgctggtctgctgctcctcgctgcccagccggcgatggccatgggcaaactgattctggtcgacggaaacagcgtcgccaaccgggcgttttacgccgtccggctgctcagcacgcgcggcggcctgcacacaaacgcggtgtacggattcgccaacatgttgctcaagctgatcgaggaggaacggccgacgcattttctcgtcgcgttcgacgcgggcaaggcgacgttccgtcatcgcgaatacgaggcctacaaggcgggtcgcctgcagacgccgcccgagctgtccgagcagtttccgtacatccgggagctcgtccgggcgttcggcgtcgcgtccggcgagctggaggaatacgaggcggacgacatgatcggtacgctggcgaaacgggcggaggccgagggcgtcgacacgctggtcgtcaccggcgaccgcgatttgctccagctcgtatcggaccgcgtgaccgtcgcgctgacgcgcaagggcatcacggaaacggagcggtacgacccggcgcgcatccgcgaggaatacggcttcgatcccgaccgcatccgcgacctcaaagggctgatgggcgacgcgtctgacaatcttcccggcgttcccggcgtcggtgagaaaaccgcactgaaactgctcaggcagtacggttcgctggagagcgtcctggaacacgcgtcggaaatcgccggaaagctcggtgaaaatctgcgggcgcacgccgacgccgcccgattgagcaagcggctggcgacgatcgactgcgcggtaccgttgcagtcgggatgggactggctgcgcctcggcgaaccggaccgcgccgcgctcgcctcgctgttgcggcagctcgaattcaagtcgctgttgaaacggctcggactcgacggcacgtccgccgatgccgacgtcgacggcgtccgttcctccgcgcggccggcggacgagaaacggccgagggccgtcgccgtcgctgaggagggcgtcgacgtccgctgtccggatcgcccggaagaagtcgaagaagcgctgtcgcggctggaagccgcccagtcggtcgtcgtcgaggtgacgggcgacaacccgcacgacggcgaagtgcgcggcgtcgcatggtgggacggacatacggcgtatttcattccgtttgaacggctggtgcagtccgacatgcggccgctggccgactggctcgccgacgcgcgtcggccgaagcgtacgcacgactcccatcgcgctgaagtggcgctgttctggcacggccttgcgtttcgcggcacgtcgttctgcacgcatatcgccgcctatttgctcgaccccacggaatcgcgccatacgctggcggacctgtcgcgccgctacggtctgccgccggtaccggaagccgaggacgtttacggcaagggcgcgaagttcaaggttcccgatcgcgacacgctggcgcgttacgtcggccgcaaggccgccctagtcgcgcggctcgttccgctgctcgaggcggatttggcggcctgcggcatgcgttcgcttttttacgacctggagctgccgctttcatccgaactcgccgtcatggagacggtcggcgtccgcgtcgacgcggcggcgctcgccgcctacggcgaggaattgcgcgaggcggcggcgaaagtcgagcgggagatttacgagctggccgggacgacgttcaacatcggatcgacgaaacagctcggcgaaattttgttcgataagctggggctgcccgtcgtcaagaaaacgaaaaccggctattccaccgacgcagacgtgctggaggaactggcgccgtaccatccgatcgtcgaaaagattttgcattaccgccaactgacgaaattgcagtcgacctacatcgaggggcttttgaaagaaatccgtccgcaaaccggtaaaatccatacgtattatcagcagacgatcgcggcgacggggcggctgagcagtcagtttcccaatcttcagaacattccgatccgtctcgaagaggggcggaaaatccgcaaggcgttcgttccgtcagaaccgggatggctgatgctcgccgccgactattcgcagatcgaactgcgcgtgctcgcgcacgtttccggcgacgaacggctgaaggaagcgtttcggacaggcatggacatccacacgaagaccgcgatggacgtgttcggcgtttccgaagaccgcgtcgacgcgcgcatgcggcggcaggcgaaggcggtcaatttcggcatcatctacggcatcagcgatttcggactggcgcaaaacctgaacatttcccgcaaggaggcggcggagttcatccggcaatatttcgccgtcttttcgggcgtcaaggcgtaccgcgagcggatcgtcgagcaggcgcgccgcgacggttacgtgacgaccctgctcggtcgcaggcgctatttgccggacatcaacgcgtcgaattacaacctccgctcgttcgcggaggttacggcgatgaatacgccgatccagggcacggccgccgacatcatcaagaccgcgatggtgcgtctgacgcggcggatgcgcgacgtcggactgaagagccgcatgctgctgcaggttcacgacgagctcgtgtttgaagtgccgccggacgagctcgacgcgatgcgggagcttgtgacggacgtcatggagtcggcggtcccgctcgacgtgccgctgaaggtcgacgtcagctggggcgccgactggtacgcggcgaagtgagggaagcgggatcc

SEQ ID NO: 1378 - DNA, 2792 bp, Artificial Sequence
  Description of Artificial Sequence: Synthetic Caldibacillus cellulovorans CompA.2 DNA Polymerase Q628A
atgaaatacctgctgccgaccgctgctgctggtctgctgctcctcgctgcccagccggcgatggccatgggcaaactgattctggtcgacggaaacagcgtcgccaaccgggcgttttacgccgtccggctgctcagcacgcgcggcggcctgcacacaaacgcggtgtacggattcgccaacatgttgctcaagctgatcgaggaggaacggccgacgcattttctcgtcgcgttcgacgcgggcaaggcgacgttccgtcatcgcgaatacgaggcctacaaggcgggtcgcctgcagacgccgcccgagctgtccgagcagtttccgtacatccgggagctcgtccgggcgttcggcgtcgcgtccggcgagctggaggaatacgaggcggacgacatgatcggtacgctggcgaaacgggcggaggccgagggcgtcgacacgctggtcgtcaccggcgaccgcgatttgctccagctcgtatcggaccgcgtgaccgtcgcgctgacgcgcaagggcatcacggaaacggagcggtacgacccggcgcgcatccgcgaggaatacggcttcgatcccgaccgcatccgcgacctcaaagggctgatgggcgacgcgtctgacaatcttcccggcgttcccggcgtcggtgagaaaaccgcactgaaactgctcaggcagtacggttcgctggagagcgtcctggaacacgcgtcggaaatcgccggaaagctcggtgaaaatctgcgggcgcacgccgacgccgcccgattgagcaagcggctggcgacgatcgactgcgcggtaccgttgcagtcgggatgggactggctgcgcctcggcgaaccggaccgcgccgcgctcgcctcgctgttgcggcagctcgaattcaagtcgctgttgaaacggctcggactcgacggcacgtccgccgatgccgacgtcgacggcgtccgttcctccgcgcggccggcggacgagaaacggccgagggccgtcgccgtcgctgaggagggcgtcgacgtccgctgtccggatcgcccggaagaagtcgaagaagcgctgtcgcggctggaagccgcccagtcggtcgtcgtcgaggtgacgggcgacaacccgcacgacggcgaagtgcgcggcgtcgcatggtgggacggacatacggcgtatttcattccgtttgaacggctggtgcagtccgacatgcggccgctggccgactggctcgccgacgcgcgtcggccgaagcgtacgcacgactcccatcgcgctgaagtggcgctgttctggcacggccttgcgtttcgcggcacgtcgttctgcacgcatatcgccgcctatttgctcgaccccacggaatcgcgccatacgctggcggacctgtcgcgccgctacggtctgccgccggtaccggaagccgaggacgtttacggcaagggcgcgaagttcaaggttcccgatcgcgacacgctggcgcgttacgtcggccgcaaggccgccctagtcgcgcggctcgttccgctgctcgaggcggatttggcggcctgcggcatgcgttcgcttttttacgacctggagctgccgctttcatccgaactcgccgtcatggagacggtcggcgtccgcgtcgacgcggcggcgctcgccgcctacggcgaggaattgcgcgaggcggcggcgaaagtcgagcgggagatttacgagctggccgggacgacgttcaacatcggatcgacgaaacagctcggcgaaattttgttcgataagctggggctgcccgtcgtcaagaaaacgaaaaccggctattccaccgacgcagacgtgctggaggaactggcgccgtaccatccgatcgtcgaaaagattttgcattaccgcgctctgacgaaattgcagtcgacctacatcgaggggcttttgaaagaaatccgtccgcaaaccggtaaaatccatacgtattatcagcagacgatcgcggcgacggggcggctgagcagtcagtttcccaatcttcagaacattccgatccgtctcgaagaggggcggaaaatccgcaaggcgttcgttccgtcagaaccgggatggctgatgctcgccgccgactattcgcagatcgaactgcgcgtgctcgcgcacgtttccggcgacgaacggctgaaggaagcgtttcggacaggcatggacatccacacgaagaccgcgatggacgtgttcggcgtttccgaagaccgcgtcgacgcgcgcatgcggcggcaggcgaaggcggtcaatttcggcatcatctacggcatcagcgatttcggactggcgcaaaacctgaacatttcccgcaaggaggcggcggagttcatccggcaatatttcgccgtcttttcgggcgtcaaggcgtaccgcgagcggatcgtcgagcaggcgcgccgcgacggttacgtgacgaccctgctcggtcgcaggcgctatttgccggacatcaacgcgtcgaattacaacctccgctcgttcgcggagcggacggcgatgaatacgccgatccagggcacggccgccgacatcatcaagaccgcgatggtgcgtctgacgcggcggatgcgcgacgtcggactgaagagccgcatgctgctgcaggttcacgacgagctcgtgtttgaagtgccgccggacgagctcgacgcgatgcgggagcttgtgacggacgtcatggagtcggcggtcccgctcgacgtgccgctgaaggtcgacgtcagctggggcgccgactggtacgcggcgaagtgagggaagcgggatcc

SEQ ID NO: 1379 - DNA, 2792 bp, Artificial Sequence
  Description of Artificial Sequence: Synthetic Caldibacillus cellulovorans CompA.2 DNA Polymerase Q628C
atgaaatacctgctgccgaccgctgctgctggtctgctgctcctcgctgcccagccggcgatggccatgggcaaactgattctggtcgacggaaacagcgtcgccaaccgggcgttttacgccgtccggctgctcagcacgcgcggcggcctgcacacaaacgcggtgtacggattcgccaacatgttgctcaagctgatcgaggaggaacggccgacgcattttctcgtcgcgttcgacgcgggcaaggcgacgttccgtcatcgcgaatacgaggcctacaaggcgggtcgcctgcagacgccgcccgagctgtccgagcagtttccgtacatccgggagctcgtccgggcgttcggcgtcgcgtccggcgagctggaggaatacgaggcggacgacatgatcggtacgctggcgaaacgggcggaggccgagggcgtcgacacgctggtcgtcaccggcgaccgcgatttgctccagctcgtatcggaccgcgtgaccgtcgcgctgacgcgcaagggcatcacggaaacggagcggtacgacccggcgcgcatccgcgaggaatacggcttcgatcccgaccgcatccgcgacctcaaagggctgatgggcgacgcgtctgacaatcttcccggcgttcccggcgtcggtgagaaaaccgcactgaaactgctcaggcagtacggttcgctggagagcgtcctggaacacgcgtcggaaatcgccggaaagctcggtgaaaatctgcgggcgcacgccgacgccgcccgattgagcaagcggctggcgacgatcgactgcgcggtaccgttgcagtcgggatgggactggctgcgcctcggcgaaccggaccgcgccgcgctcgcctcgctgttgcggcagctcgaattcaagtcgctgttgaaacggctcggactcgacggcacgtccgccgatgccgacgtcgacggcgtccgttcctccgcgcggccggcggacgagaaacggccgagggccgtcgccgtcgctgaggagggcgtcgacgtccgctgtccggatcgcccggaagaagtcgaagaagcgctgtcgcggctggaagccgcccagtcggtcgtcgtcgaggtgacgggcgacaacccgcacgacggcgaagtgcgcggcgtcgcatggtgggacggacatacggcgtatttcattccgtttgaacggctggtgcagtccgacatgcggccgctggccgactggctcgccgacgcgcgtcggccgaagcgtacgcacgactcccatcgcgctgaagtggcgctgttctggcacggccttgcgtttcgcggcacgtcgttctgcacgcatatcgccgcctatttgctcgaccccacggaatcgcgccatacgctggcggacctgtcgcgccgctacggtctgccgccggtaccggaagccgaggacgtttacggcaagggcgcgaagttcaaggttcccgatcgcgacacgctggcgcgttacgtcggccgcaaggccgccctagtcgcgcggctcgttccgctgctcgaggcggatttggcggcctgcggcatgcgttcgcttttttacgacctggagctgccgctttcatccgaactcgccgtcatggagacggtcggcgtccgcgtcgacgcggcggcgctcgccgcctacggcgaggaattgcgcgaggcggcggcgaaagtcgagcgggagatttacgagctggccgggacgacgttcaacatcggatcgacgaaacagctcggcgaaattttgttcgataagctggggctgcccgtcgtcaagaaaacgaaaaccggctattccaccgacgcagacgtgctggaggaactggcgccgtaccatccgatcgtcgaaaagattttgcattaccgctgtctgacgaaattgcagtcgacctacatcgaggggcttttgaaagaaatccgtccgcaaaccggtaaaatccatacgtattatcagcagacgatcgcggcgacggggcggctgagcagtcagtttcccaatcttcagaacattccgatccgtctcgaagaggggcggaaaatccgcaaggcgttcgttccgtcagaaccgggatggctgatgctcgccgccgactattcgcagatcgaactgcgcgtgctcgcgcacgtttccggcgacgaacggctgaaggaagcgtttcggacaggcatggacatccacacgaagaccgcgatggacgtgttcggcgtttccgaagaccgcgtcgacgcgcgcatgcggcggcaggcgaaggcggtcaatttcggcatcatctacggcatcagcgatttcggactggcgcaaaacctgaacatttcccgcaaggaggcggcggagttcatccggcaatatttcgccgtcttttcgggcgtcaaggcgtaccgcgagcggatcgtcgagcaggcgcgccgcgacggttacgtgacgaccctgctcggtcgcaggcgctatttgccggacatcaacgcgtcgaattacaacctccgctcgttcgcggagcggacggcgatgaatacgccgatccagggcacggccgccgacatcatcaagaccgcgatggtgcgtctgacgcggcggatgcgcgacgtcggactgaagagccgcatgctgctgcaggttcacgacgagctcgtgtttgaagtgccgccggacgagctcgacgcgatgcgggagcttgtgacggacgtcatggagtcggcggtcccgctcgacgtgccgctgaaggtcgacgtcagctggggcgccgactggtacgcggcgaagtgagggaagcgggatcc

SEQ ID NO: 1380 - DNA, 2792 bp, Artificial Sequence
  Description of Artificial Sequence: Synthetic Caldibacillus cellulovorans CompA.2 DNA Polymerase Q628D
atgaaatacctgctgccgaccgctgctgctggtctgctgctcctcgctgcccagccggcgatggccatgggcaaactgattctggtcgacggaaacagcgtcgccaaccgggcgttttacgccgtccggctgctcagcacgcgcggcggcctgcacacaaacgcggtgtacggattcgccaacatgttgctcaagctgatcgaggaggaacggccgacgcattttctcgtcgcgttcgacgcgggcaaggcgacgttccgtcatcgcgaatacgaggcctacaaggcgggtcgcctgcagacgccgcccgagctgtccgagcagtttccgtacatccgggagctcgtccgggcgttcggcgtcgcgtccggcgagctggaggaatacgaggcggacgacatgatcggtacgctggcgaaacgggcggaggccgagggcgtcgacacgctggtcgtcaccggcgaccgcgatttgctccagctcgtatcggaccgcgtgaccgtcgcgctgacgcgcaagggcatcacggaaacggagcggtacgacccggcgcgcatccgcgaggaatacggcttcgatcccgaccgcatccgcgacctcaaagggctgatgggcgacgcgtctgacaatcttcccggcgttcccggcgtcggtgagaaaaccgcactgaaactgctcaggcagtacggttcgctggagagcgtcctggaacacgcgtcggaaatcgccggaaagctcggtgaaaatctgcgggcgcacgccgacgccgcccgattgagcaagcggctggcgacgatcgactgcgcggtaccgttgcagtcgggatgggactggctgcgcctcggcgaaccggaccgcgccgcgctcgcctcgctgttgcggcagctcgaattcaagtcgctgttgaaacggctcggactcgacggcacgtccgccgatgccgacgtcgacggcgtccgttcctccgcgcggccggcggacgagaaacggccgagggccgtcgccgtcgctgaggagggcgtcgacgtccgctgtccggatcgcccggaagaagtcgaagaagcgctgtcgcggctggaagccgcccagtcggtcgtcgtcgaggtgacgggcgacaacccgcacgacggcgaagtgcgcggcgtcgcatggtgggacggacatacggcgtatttcattccgtttgaacggctggtgcagtccgacatgcggccgctggccgactggctcgccgacgcgcgtcggccgaagcgtacgcacgactcccatcgcgctgaagtggcgctgttctggcacggccttgcgtttcgcggcacgtcgttctgcacgcatatcgccgcctatttgctcgaccccacggaatcgcgccatacgctggcggacctgtcgcgccgctacggtctgccgccggtaccggaagccgaggacgtttacggcaagggcgcgaagttcaaggttcccgatcgcgacacgctggcgcgttacgtcggccgcaaggccgccctagtcgcgcggctcgttccgctgctcgaggcggatttggcggcctgcggcatgcgttcgcttttttacgacctggagctgccgctttcatccgaactcgccgtcatggagacggtcggcgtccgcgtcgacgcggcggcgctcgccgcctacggcgaggaattgcgcgaggcggcggcgaaagtcgagcgggagatttacgagctggccgggacgacgttcaacatcggatcgacgaaacagctcggcgaaattttgttcgataagctggggctgcccgtcgtcaagaaaacgaaaaccggctattccaccgacgcagacgtgctggaggaactggcgccgtaccatccgatcgtcgaaaagattttgcattaccgcgatctgacgaaattgcagtcgacctacatcgaggggcttttgaaagaaatccgtccgcaaaccggtaaaatccatacgtattatcagcagacgatcgcggcgacggggcggctgagcagtcagtttcccaatcttcagaacattccgatccgtctcgaagaggggcggaaaatccgcaaggcgttcgttccgtcagaaccgggatggctgatgctcgccgccgactattcgcagatcgaactgcgcgtgctcgcgcacgtttccggcgacgaacggctgaaggaagcgtttcggacaggcatggacatccacacgaagaccgcgatggacgtgttcggcgtttccgaagaccgcgtcgacgcgcgcatgcggcggcaggcgaaggcggtcaatttcggcatcatctacggcatcagcgatttcggactggcgcaaaacctgaacatttcccgcaaggaggcggcggagttcatccggcaatatttcgccgtcttttcgggcgtcaaggcgtaccgcgagcggatcgtcgagcaggcgcgccgcgacggttacgtgacgaccctgctcggtcgcaggcgctatttgccggacatcaacgcgtcgaattacaacctccgctcgttcgcggagcggacggcgatgaatacgccgatccagggcacggccgccgacatcatcaagaccgcgatggtgcgtctgacgcggcggatgcgcgacgtcggactgaagagccgcatgctgctgcaggttcacgacgagctcgtgtttgaagtgccgccggacgagctcgacgcgatgcgggagcttgtgacggacgtcatggagtcggcggtcccgctcgacgtgccgctgaaggtcgacgtcagctggggcgccgactggtacgcggcgaagtgagggaagcgggatcc

SEQ ID NO: 1381 - DNA, 2792 bp, Artificial Sequence
  Description of Artificial Sequence: Synthetic Caldibacillus cellulovorans CompA.2 DNA Polymerase Q628F
atgaaatacctgctgccgaccgctgctgctggtctgctgctcctcgctgcccagccggcgatggccatgggcaaactgattctggtcgacggaaacagcgtcgccaaccgggcgttttacgccgtccggctgctcagcacgcgcggcggcctgcacacaaacgcggtgtacggattcgccaacatgttgctcaagctgatcgaggaggaacggccgacgcattttctcgtcgcgttcgacgcgggcaaggcgacgttccgtcatcgcgaatacgaggcctacaaggcgggtcgcctgcagacgccgcccgagctgtccgagcagtttccgtacatccgggagctcgtccgggcgttcggcgtcgcgtccggcgagctggaggaatacgaggcggacgacatgatcggtacgctggcgaaacgggcggaggccgagggcgtcgacacgctggtcgtcaccggcgaccgcgatttgctccagctcgtatcggaccgcgtgaccgtcgcgctgacgcgcaagggcatcacggaaacggagcggtacgacccggcgcgcatccgcgaggaatacggcttcgatcccgaccgcatccgcgacctcaaagggctgatgggcgacgcgtctgacaatcttcccggcgttcccggcgtcggtgagaaaaccgcactgaaactgctcaggcagtacggttcgctggagagcgtcctggaacacgcgtcggaaatcgccggaaagctcggtgaaaatctgcgggcgcacgccgacgccgcccgattgagcaagcggctggcgacgatcgactgcgcggtaccgttgcagtcgggatgggactggctgcgcctcggcgaaccggaccgcgccgcgctcgcctcgctgttgcggcagctcgaattcaagtcgctgttgaaacggctcggactcgacggcacgtccgccgatgccgacgtcgacggcgtccgttcctccgcgcggccggcggacgagaaacggccgagggccgtcgccgtcgctgaggagggcgtcgacgtccgctgtccggatcgcccggaagaagtcgaagaagcgctgtcgcggctggaagccgcccagtcggtcgtcgtcgaggtgacgggcgacaacccgcacgacggcgaagtgcgcggcgtcgcatggtgggacggacatacggcgtatttcattccgtttgaacggctggtgcagtccgacatgcggccgctggccgactggctcgccgacgcgcgtcggccgaagcgtacgcacgactcccatcgcgctgaagtggcgctgttctggcacggccttgcgtttcgcggcacgtcgttctgcacgcatatcgccgcctatttgctcgaccccacggaatcgcgccatacgctggcggacctgtcgcgccgctacggtctgccgccggtaccggaagccgaggacgtttacggcaagggcgcgaagttcaaggttcccgatcgcgacacgctggcgcgttacgtcggccgcaaggccgccctagtcgcgcggctcgttccgctgctcgaggcggatttggcggcctgcggcatgcgttcgcttttttacgacctggagctgccgctttcatccgaactcgccgtcatggagacggtcggcgtccgcgtcgacgcggcggcgctcgccgcctacggcgaggaattgcgcgaggcggcggcgaaagtcgagcgggagatttacgagctggccgggacgacgttcaacatcggatcgacgaaacagctcggcgaaattttgttcgataagctggggctgcccgtcgtcaagaaaacgaaaaccggctattccaccgacgcagacgtgctggaggaactggcgccgtaccatccgatcgtcgaaaagattttgcattaccgctttctgacgaaattgcagtcgacctacatcgaggggcttttgaaagaaatccgtccgcaaaccggtaaaatccatacgtattatcagcagacgatcgcggcgacggggcggctgagcagtcagtttcccaatcttcagaacattccgatccgtctcgaagaggggcggaaaatccgcaaggcgttcgttccgtcagaaccgggatggctgatgctcgccgccgactattcgcagatcgaactgcgcgtgctcgcgcacgtttccggcgacgaacggctgaaggaagcgtttcggacaggcatggacatccacacgaagaccgcgatggacgtgttcggcgtttccgaagaccgcgtcgacgcgcgcatgcggcggcaggcgaaggcggtcaatttcggcatcatctacggcatcagcgatttcggactggcgcaaaacctgaacatttcccgcaaggaggcggcggagttcatccggcaatatttcgccgtcttttcgggcgtcaaggcgtaccgcgagcggatcgtcgagcaggcgcgccgcgacggttacgtgacgaccctgctcggtcgcaggcgctatttgccggacatcaacgcgtcgaattacaacctccgctcgttcgcggagcggacggcgatgaatacgccgatccagggcacggccgccgacatcatcaagaccgcgatggtgcgtctgacgcggcggatgcgcgacgtcggactgaagagccgcatgctgctgcaggttcacgacgagctcgtgtttgaagtgccgccggacgagctcgacgcgatgcgggagcttgtgacggacgtcatggagtcggcggtcccgctcgacgtgccgctgaaggtcgacgtcagctggggcgccgactggtacgcggcgaagtgagggaagcgggatcc

SEQ ID NO: 1382 - DNA, 2792 bp, Artificial Sequence
  Description of Artificial Sequence: Synthetic Caldibacillus cellulovorans CompA.2 DNA Polymerase Q628G
atgaaatacctgctgccgaccgctgctgctggtctgctgctcctcgctgcccagccggcgatggccatgggcaaactgattctggtcgacggaaacagcgtcgccaaccgggcgttttacgccgtccggctgctcagcacgcgcggcggcctgcacacaaacgcggtgtacggattcgccaacatgttgctcaagctgatcgaggaggaacggccgacgcattttctcgtcgcgttcgacgcgggcaaggcgacgttccgtcatcgcgaatacgaggcctacaaggcgggtcgcctgcagacgccgcccgagctgtccgagcagtttccgtacatccgggagctcgtccgggcgttcggcgtcgcgtccggcgagctggaggaatacgaggcggacgacatgatcggtacgctggcgaaacgggcggaggccgagggcgtcgacacgctggtcgtcaccggcgaccgcgatttgctccagctcgtatcggaccgcgtgaccgtcgcgctgacgcgcaagggcatcacggaaacggagcggtacgacccggcgcgcatccgcgaggaatacggcttcgatcccgaccgcatccgcgacctcaaagggctgatgggcgacgcgtctgacaatcttcccggcgttcccggcgtcggtgagaaaaccgcactgaaactgctcaggcagtacggttcgctggagagcgtcctggaacacgcgtcggaaatcgccggaaagctcggtgaaaatctgcgggcgcacgccgacgccgcccgattgagcaagcggctggcgacgatcgactgcgcggtaccgttgcagtcgggatgggactggctgcgcctcggcgaaccggaccgcgccgcgctcgcctcgctgttgcggcagctcgaattcaagtcgctgttgaaacggctcggactcgacggcacgtccgccgatgccgacgtcgacggcgtccgttcctccgcgcggccggcggacgagaaacggccgagggccgtcgccgtcgctgaggagggcgtcgacgtccgctgtccggatcgcccggaagaagtcgaagaagcgctgtcgcggctggaagccgcccagtcggtcgtcgtcgaggtgacgggcgacaacccgcacgacggcgaagtgcgcggcgtcgcatggtgggacggacatacggcgtatttcattccgtttgaacggctggtgcagtccgacatgcggccgctggccgactggctcgccgacgcgcgtcggccgaagcgtacgcacgactcccatcgcgctgaagtggcgctgttctggcacggccttgcgtttcgcggcacgtcgttctgcacgcatatcgccgcctatttgctcgaccccacggaatcgcgccatacgctggcggacctgtcgcgccgctacggtctgccgccggtaccggaagccgaggacgtttacggcaagggcgcgaagttcaaggttcccgatcgcgacacgctggcgcgttacgtcggccgcaaggccgccctagtcgcgcggctcgttccgctgctcgaggcggatttggcggcctgcggcatgcgttcgcttttttacgacctggagctgccgctttcatccgaactcgccgtcatggagacggtcggcgtccgcgtcgacgcggcggcgctcgccgcctacggcgaggaattgcgcgaggcggcggcgaaagtcgagcgggagatttacgagctggccgggacgacgttcaacatcggatcgacgaaacagctcggcgaaattttgttcgataagctggggctgcccgtcgtcaagaaaacgaaaaccggctattccaccgacgcagacgtgctggaggaactggcgccgtaccatccgatcgtcgaaaagattttgcattaccgcggtctgacgaaattgcagtcgacctacatcgaggggcttttgaaagaaatccgtccgcaaaccggtaaaatccatacgtattatcagcagacgatcgcggcgacggggcggctgagcagtcagtttcccaatcttcagaacattccgatccgtctcgaagaggggcggaaaatccgcaaggcgttcgttccgtcagaaccgggatggctgatgctcgccgccgactattcgcagatcgaactgcgcgtgctcgcgcacgtttccggcgacgaacggctgaaggaagcgtttcggacaggcatggacatccacacgaagaccgcgatggacgtgttcggcgtttccgaagaccgcgtcgacgcgcgcatgcggcggcaggcgaaggcggtcaatttcggcatcatctacggcatcagcgatttcggactggcgcaaaacctgaacatttcccgcaaggaggcggcggagttcatccggcaatatttcgccgtcttttcgggcgtcaaggcgtaccgcgagcggatcgtcgagcaggcgcgccgcgacggttacgtgacgaccctgctcggtcgcaggcgctatttgccggacatcaacgcgtcgaattacaacctccgctcgttcgcggagcggacggcgatgaatacgccgatccagggcacggccgccgacatcatcaagaccgcgatggtgcgtctgacgcggcggatgcgcgacgtcggactgaagagccgcatgctgctgcaggttcacgacgagctcgtgtttgaagtgccgccggacgagctcgacgcgatgcgggagcttgtgacggacgtcatggagtcggcggtcccgctcgacgtgccgctgaaggtcgacgtcagctggggcgccgactggtacgcggcgaagtgagggaagcgggatcc

SEQ ID NO: 1383 - DNA, 2792 bp, Artificial Sequence
  Description of Artificial Sequence: Synthetic Caldibacillus cellulovorans CompA.2 DNA Polymerase Q628H
atgaaatacctgctgccgaccgctgctgctggtctgctgctcctcgctgcccagccggcgatggccatgggcaaactgattctggtcgacggaaacagcgtcgccaaccgggcgttttacgccgtccggctgctcagcacgcgcggcggcctgcacacaaacgcggtgtacggattcgccaacatgttgctcaagctgatcgaggaggaacggccgacgcattttctcgtcgcgttcgacgcgggcaaggcgacgttccgtcatcgcgaatacgaggcctacaaggcgggtcgcctgcagacgccgcccgagctgtccgagcagtttccgtacatccgggagctcgtccgggcgttcggcgtcgcgtccggcgagctggaggaatacgaggcggacgacatgatcggtacgctggcgaaacgggcggaggccgagggcgtcgacacgctggtcgtcaccggcgaccgcgatttgctccagctcgtatcggaccgcgtgaccgtcgcgctgacgcgcaagggcatcacggaaacggagcggtacgacccggcgcgcatccgcgaggaatacggcttcgatcccgaccgcatccgcgacctcaaagggctgatgggcgacgcgtctgacaatcttcccggcgttcccggcgtcggtgagaaaaccgcactgaaactgctcaggcagtacggttcgctggagagcgtcctggaacacgcgtcggaaatcgccggaaagctcggtgaaaatctgcgggcgcacgccgacgccgcccgattgagcaagcggctggcgacgatcgactgcgcggtaccgttgcagtcgggatgggactggctgcgcctcggcgaaccggaccgcgccgcgctcgcctcgctgttgcggcagctcgaattcaagtcgctgttgaaacggctcggactcgacggcacgtccgccgatgccgacgtcgacggcgtccgttcctccgcgcggccggcggacgagaaacggccgagggccgtcgccgtcgctgaggagggcgtcgacgtccgctgtccggatcgcccggaagaagtcgaagaagcgctgtcgcggctggaagccgcccagtcggtcgtcgtcgaggtgacgggcgacaacccgcacgacggcgaagtgcgcggcgtcgcatggtgggacggacatacggcgtatttcattccgtttgaacggctggtgcagtccgacatgcggccgctggccgactggctcgccgacgcgcgtcggccgaagcgtacgcacgactcccatcgcgctgaagtggcgctgttctggcacggccttgcgtttcgcggcacgtcgttctgcacgcatatcgccgcctatttgctcgaccccacggaatcgcgccatacgctggcggacctgtcgcgccgctacggtctgccgccggtaccggaagccgaggacgtttacggcaagggcgcgaagttcaaggttcccgatcgcgacacgctggcgcgttacgtcggccgcaaggccgccctagtcgcgcggctcgttccgctgctcgaggcggatttggcggcctgcggcatgcgttcgcttttttacgacctggagctgccgctttcatccgaactcgccgtcatggagacggtcggcgtccgcgtcgacgcggcggcgctcgccgcctacggcgaggaattgcgcgaggcggcggcgaaagtcgagcgggagatttacgagctggccgggacgacgttcaacatcggatcgacgaaacagctcggcgaaattttgttcgataagctggggctgcccgtcgtcaagaaaacgaaaaccggctattccaccgacgcagacgtgctggaggaactggcgccgtaccatccgatcgtcgaaaagattttgcattaccgccatctgacgaaattgcagtcgacctacatcgaggggcttttgaaagaaatccgtccgcaaaccggtaaaatccatacgtattatcagcagacgatcgcggcgacggggcggctgagcagtcagtttcccaatcttcagaacattccgatccgtctcgaagaggggcggaaaatccgcaaggcgttcgttccgtcagaaccgggatggctgatgctcgccgccgactattcgcagatcgaactgcgcgtgctcgcgcacgtttccggcgacgaacggctgaaggaagcgtttcggacaggcatggacatccacacgaagaccgcgatggacgtgttcggcgtttccgaagaccgcgtcgacgcgcgcatgcggcggcaggcgaaggcggtcaatttcggcatcatctacggcatcagcgatttcggactggcgcaaaacctgaacatttcccgcaaggaggcggcggagttcatccggcaatatttcgccgtcttttcgggcgtcaaggcgtaccgcgagcggatcgtcgagcaggcgcgccgcgacggttacgtgacgaccctgctcggtcgcaggcgctatttgccggacatcaacgcgtcgaattacaacctccgctcgttcgcggagcggacggcgatgaatacgccgatccagggcacggccgccgacatcatcaagaccgcgatggtgcgtctgacgcggcggatgcgcgacgtcggactgaagagccgcatgctgctgcaggttcacgacgagctcgtgtttgaagtgccgccggacgagctcgacgcgatgcgggagcttgtgacggacgtcatggagtcggcggtcccgctcgacgtgccgctgaaggtcgacgtcagctggggcgccgactggtacgcggcgaagtgagggaagcgggatcc

SEQ ID NO: 1384 - DNA, 2792 bp, Artificial Sequence
  Description of Artificial Sequence: Synthetic Caldibacillus cellulovorans CompA.2 DNA Polymerase Q628I
atgaaatacctgctgccgaccgctgctgctggtctgctgctcctcgctgcccagccggcgatggccatgggcaaactgattctggtcgacggaaacagcgtcgccaaccgggcgttttacgccgtccggctgctcagcacgcgcggcggcctgcacacaaacgcggtgtacggattcgccaacatgttgctcaagctgatcgaggaggaacggccgacgcattttctcgtcgcgttcgacgcgggcaaggcgacgttccgtcatcgcgaatacgaggcctacaaggcgggtcgcctgcagacgccgcccgagctgtccgagcagtttccgtacatccgggagctcgtccgggcgttcggcgtcgcgtccggcgagctggaggaatacgaggcggacgacatgatcggtacgctggcgaaacgggcggaggccgagggcgtcgacacgctggtcgtcaccggcgaccgcgatttgctccagctcgtatcggaccgcgtgaccgtcgcgctgacgcgcaagggcatcacggaaacggagcggtacgacccggcgcgcatccgcgaggaatacggcttcgatcccgaccgcatccgcgacctcaaagggctgatgggcgacgcgtctgacaatcttcccggcgttcccggcgtcggtgagaaaaccgcactgaaactgctcaggcagtacggttcgctggagagcgtcctggaacacgcgtcggaaatcgccggaaagctcggtgaaaatctgcgggcgcacgccgacgccgcccgattgagcaagcggctggcgacgatcgactgcgcggtaccgttgcagtcgggatgggactggctgcgcctcggcgaaccggaccgcgccgcgctcgcctcgctgttgcggcagctcgaattcaagtcgctgttgaaacggctcggactcgacggcacgtccgccgatgccgacgtcgacggcgtccgttcctccgcgcggccggcggacgagaaacggccgagggccgtcgccgtcgctgaggagggcgtcgacgtccgctgtccggatcgcccggaagaagtcgaagaagcgctgtcgcggctggaagccgcccagtcggtcgtcgtcgaggtgacgggcgacaacccgcacgacggcgaagtgcgcggcgtcgcatggtgggacggacatacggcgtatttcattccgtttgaacggctggtgcagtccgacatgcggccgctggccgactggctcgccgacgcgcgtcggccgaagcgtacgcacgactcccatcgcgctgaagtggcgctgttctggcacggccttgcgtttcgcggcacgtcgttctgcacgcatatcgccgcctatttgctcgaccccacggaatcgcgccatacgctggcggacctgtcgcgccgctacggtctgccgccggtaccggaagccgaggacgtttacggcaagggcgcgaagttcaaggttcccgatcgcgacacgctggcgcgttacgtcggccgcaaggccgccctagtcgcgcggctcgttccgctgctcgaggcggatttggcggcctgcggcatgcgttcgcttttttacgacctggagctgccgctttcatccgaactcgccgtcatggagacggtcggcgtccgcgtcgacgcggcggcgctcgccgcctacggcgaggaattgcgcgaggcggcggcgaaagtcgagcgggagatttacgagctggccgggacgacgttcaacatcggatcgacgaaacagctcggcgaaattttgttcgataagctggggctgcccgtcgtcaagaaaacgaaaaccggctattccaccgacgcagacgtgctggaggaactggcgccgtaccatccgatcgtcgaaaagattttgcattaccgcattctgacgaaattgcagtcgacctacatcgaggggcttttgaaagaaatccgtccgcaaaccggtaaaatccatacgtattatcagcagacgatcgcggcgacggggcggctgagcagtcagtttcccaatcttcagaacattccgatccgtctcgaagaggggcggaaaatccgcaaggcgttcgttccgtcagaaccgggatggctgatgctcgccgccgactattcgcagatcgaactgcgcgtgctcgcgcacgtttccggcgacgaacggctgaaggaagcgtttcggacaggcatggacatccacacgaagaccgcgatggacgtgttcggcgtttccgaagaccgcgtcgacgcgcgcatgcggcggcaggcgaaggcggtcaatttcggcatcatctacggcatcagcgatttcggactggcgcaaaacctgaacatttcccgcaaggaggcggcggagttcatccggcaatatttcgccgtcttttcgggcgtcaaggcgtaccgcgagcggatcgtcgagcaggcgcgccgcgacggttacgtgacgaccctgctcggtcgcaggcgctatttgccggacatcaacgcgtcgaattacaacctccgctcgttcgcggagcggacggcgatgaatacgccgatccagggcacggccgccgacatcatcaagaccgcgatggtgcgtctgacgcggcggatgcgcgacgtcggactgaagagccgcatgctgctgcaggttcacgacgagctcgtgtttgaagtgccgccggacgagctcgacgcgatgcgggagcttgtgacggacgtcatggagtcggcggtcccgctcgacgtgccgctgaaggtcgacgtcagctggggcgccgactggtacgcggcgaagtgagggaagcgggatcc

SEQ ID NO: 1385 - DNA, 2792 bp, Artificial Sequence
  Description of Artificial Sequence: Synthetic Caldibacillus cellulovorans CompA.2 DNA Polymerase Q628L
atgaaatacctgctgccgaccgctgctgctggtctgctgctcctcgctgcccagccggcgatggccatgggcaaactgattctggtcgacggaaacagcgtcgccaaccgggcgttttacgccgtccggctgctcagcacgcgcggcggcctgcacacaaacgcggtgtacggattcgccaacatgttgctcaagctgatcgaggaggaacggccgacgcattttctcgtcgcgttcgacgcgggcaaggcgacgttccgtcatcgcgaatacgaggcctacaaggcgggtcgcctgcagacgccgcccgagctgtccgagcagtttccgtacatccgggagctcgtccgggcgttcggcgtcgcgtccggcgagctggaggaatacgaggcggacgacatgatcggtacgctggcgaaacgggcggaggccgagggcgtcgacacgctggtcgtcaccggcgaccgcgatttgctccagctcgtatcggaccgcgtgaccgtcgcgctgacgcgcaagggcatcacggaaacggagcggtacgacccggcgcgcatccgcgaggaatacggcttcgatcccgaccgcatccgcgacctcaaagggctgatgggcgacgcgtctgacaatcttcccggcgttcccggcgtcggtgagaaaaccgcactgaaactgctcaggcagtacggttcgctggagagcgtcctggaacacgcgtcggaaatcgccggaaagctcggtgaaaatctgcgggcgcacgccgacgccgcccgattgagcaagcggctggcgacgatcgactgcgcggtaccgttgcagtcgggatgggactggctgcgcctcggcgaaccggaccgcgccgcgctcgcctcgctgttgcggcagctcgaattcaagtcgctgttgaaacggctcggactcgacggcacgtccgccgatgccgacgtcgacggcgtccgttcctccgcgcggccggcggacgagaaacggccgagggccgtcgccgtcgctgaggagggcgtcgacgtccgctgtccggatcgcccggaagaagtcgaagaagcgctgtcgcggctggaagccgcccagtcggtcgtcgtcgaggtgacgggcgacaacccgcacgacggcgaagtgcgcggcgtcgcatggtgggacggacatacggcgtatttcattccgtttgaacggctggtgcagtccgacatgcggccgctggccgactggctcgccgacgcgcgtcggccgaagcgtacgcacgactcccatcgcgctgaagtggcgctgttctggcacggccttgcgtttcgcggcacgtcgttctgcacgcatatcgccgcctatttgctcgaccccacggaatcgcgccatacgctggcggacctgtcgcgccgctacggtctgccgccggtaccggaagccgaggacgtttacggcaagggcgcgaagttcaaggttcccgatcgcgacacgctggcgcgttacgtcggccgcaaggccgccctagtcgcgcggctcgttccgctgctcgaggcggatttggcggcctgcggcatgcgttcgcttttttacgacctggagctgccgctttcatccgaactcgccgtcatggagacggtcggcgtccgcgtcgacgcggcggcgctcgccgcctacggcgaggaattgcgcgaggcggcggcgaaagtcgagcgggagatttacgagctggccgggacgacgttcaacatcggatcgacgaaacagctcggcgaaattttgttcgataagctggggctgcccgtcgtcaagaaaacgaaaaccggctattccaccgacgcagacgtgctggaggaactggcgccgtaccatccgatcgtcgaaaagattttgcattaccgccttctgacgaaattgcagtcgacctacatcgaggggcttttgaaagaaatccgtccgcaaaccggtaaaatccatacgtattatcagcagacgatcgcggcgacggggcggctgagcagtcagtttcccaatcttcagaacattccgatccgtctcgaagaggggcggaaaatccgcaaggcgttcgttccgtcagaaccgggatggctgatgctcgccgccgactattcgcagatcgaactgcgcgtgctcgcgcacgtttccggcgacgaacggctgaaggaagcgtttcggacaggcatggacatccacacgaagaccgcgatggacgtgttcggcgtttccgaagaccgcgtcgacgcgcgcatgcggcggcaggcgaaggcggtcaatttcggcatcatctacggcatcagcgatttcggactggcgcaaaacctgaacatttcccgcaaggaggcggcggagttcatccggcaatatttcgccgtcttttcgggcgtcaaggcgtaccgcgagcggatcgtcgagcaggcgcgccgcgacggttacgtgacgaccctgctcggtcgcaggcgctatttgccggacatcaacgcgtcgaattacaacctccgctcgttcgcggagcggacggcgatgaatacgccgatccagggcacggccgccgacatcatcaagaccgcgatggtgcgtctgacgcggcggatgcgcgacgtcggactgaagagccgcatgctgctgcaggttcacgacgagctcgtgtttgaagtgccgccggacgagctcgacgcgatgcgggagcttgtgacggacgtcatggagtcggcggtcccgctcgacgtgccgctgaaggtcgacgtcagctggggcgccgactggtacgcggcgaagtgagggaagcgggatcc

SEQ ID NO: 1386 - DNA, 2792 bp, Artificial Sequence
  Description of Artificial Sequence: Synthetic Caldibacillus cellulovorans CompA.2 DNA Polymerase Q628M
atgaaatacctgctgccgaccgctgctgctggtctgctgctcctcgctgcccagccggcgatggccatgggcaaactgattctggtcgacggaaacagcgtcgccaaccgggcgttttacgccgtccggctgctcagcacgcgcggcggcctgcacacaaacgcggtgtacggattcgccaacatgttgctcaagctgatcgaggaggaacggccgacgcattttctcgtcgcgttcgacgcgggcaaggcgacgttccgtcatcgcgaatacgaggcctacaaggcgggtcgcctgcagacgccgcccgagctgtccgagcagtttccgtacatccgggagctcgtccgggcgttcggcgtcgcgtccggcgagctggaggaatacgaggcggacgacatgatcggtacgctggcgaaacgggcggaggccgagggcgtcgacacgctggtcgtcaccggcgaccgcgatttgctccagctcgtatcggaccgcgtgaccgtcgcgctgacgcgcaagggcatcacggaaacggagcggtacgacccggcgcgcatccgcgaggaatacggcttcgatcccgaccgcatccgcgacctcaaagggctgatgggcgacgcgtctgacaatcttcccggcgttcccggcgtcggtgagaaaaccgcactgaaactgctcaggcagtacggttcgctggagagcgtcctggaacacgcgtcggaaatcgccggaaagctcggtgaaaatctgcgggcgcacgccgacgccgcccgattgagcaagcggctggcgacgatcgactgcgcggtaccgttgcagtcgggatgggactggctgcgcctcggcgaaccggaccgcgccgcgctcgcctcgctgttgcggcagctcgaattcaagtcgctgttgaaacggctcggactcgacggcacgtccgccgatgccgacgtcgacggcgtccgttcctccgcgcggccggcggacgagaaacggccgagggccgtcgccgtcgctgaggagggcgtcgacgtccgctgtccggatcgcccggaagaagtcgaagaagcgctgtcgcggctggaagccgcccagtcggtcgtcgtcgaggtgacgggcgacaacccgcacgacggcgaagtgcgcggcgtcgcatggtgggacggacatacggcgtatttcattccgtttgaacggctggtgcagtccgacatgcggccgctggccgactggctcgccgacgcgcgtcggccgaagcgtacgcacgactcccatcgcgctgaagtggcgctgttctggcacggccttgcgtttcgcggcacgtcgttctgcacgcatatcgccgcctatttgctcgaccccacggaatcgcgccatacgctggcggacctgtcgcgccgctacggtctgccgccggtaccggaagccgaggacgtttacggcaagggcgcgaagttcaaggttcccgatcgcgacacgctggcgcgttacgtcggccgcaaggccgccctagtcgcgcggctcgttccgctgctcgaggcggatttggcggcctgcggcatgcgttcgcttttttacgacctggagctgccgctttcatccgaactcgccgtcatggagacggtcggcgtccgcgtcgacgcggcggcgctcgccgcctacggcgaggaattgcgcgaggcggcggcgaaagtcgagcgggagatttacgagctggccgggacgacgttcaacatcggatcgacgaaacagctcggcgaaattttgttcgataagctggggctgcccgtcgtcaagaaaacgaaaaccggctattccaccgacgcagacgtgctggaggaactggcgccgtaccatccgatcgtcgaaaagattttgcattaccgcatgctgacgaaattgcagtcgacctacatcgaggggcttttgaaagaaatccgtccgcaaaccggtaaaatccatacgtattatcagcagacgatcgcggcgacggggcggctgagcagtcagtttcccaatcttcagaacattccgatccgtctcgaagaggggcggaaaatccgcaaggcgttcgttccgtcagaaccgggatggctgatgctcgccgccgactattcgcagatcgaactgcgcgtgctcgcgcacgtttccggcgacgaacggctgaaggaagcgtttcggacaggcatggacatccacacgaagaccgcgatggacgtgttcggcgtttccgaagaccgcgtcgacgcgcgcatgcggcggcaggcgaaggcggtcaatttcggcatcatctacggcatcagcgatttcggactggcgcaaaacctgaacatttcccgcaaggaggcggcggagttcatccggcaatatttcgccgtcttttcgggcgtcaaggcgtaccgcgagcggatcgtcgagcaggcgcgccgcgacggttacgtgacgaccctgctcggtcgcaggcgctatttgccggacatcaacgcgtcgaattacaacctccgctcgttcgcggagcggacggcgatgaatacgccgatccagggcacggccgccgacatcatcaagaccgcgatggtgcgtctgacgcggcggatgcgcgacgtcggactgaagagccgcatgctgctgcaggttcacgacgagctcgtgtttgaagtgccgccggacgagctcgacgcgatgcgggagcttgtgacggacgtcatggagtcggcggtcccgctcgacgtgccgctgaaggtcgacgtcagctggggcgccgactggtacgcggcgaagtgagggaagcgggatcc

SEQ ID NO: 1387 - DNA, 2792 bp, Artificial Sequence
  Description of Artificial Sequence: Synthetic Caldibacillus cellulovorans CompA.2 DNA Polymerase Q628N
atgaaatacctgctgccgaccgctgctgctggtctgctgctcctcgctgcccagccggcgatggccatgggcaaactgattctggtcgacggaaacagcgtcgccaaccgggcgttttacgccgtccggctgctcagcacgcgcggcggcctgcacacaaacgcggtgtacggattcgccaacatgttgctcaagctgatcgaggaggaacggccgacgcattttctcgtcgcgttcgacgcgggcaaggcgacgttccgtcatcgcgaatacgaggcctacaaggcgggtcgcctgcagacgccgcccgagctgtccgagcagtttccgtacatccgggagctcgtccgggcgttcggcgtcgcgtccggcgagctggaggaatacgaggcggacgacatgatcggtacgctggcgaaacgggcggaggccgagggcgtcgacacgctggtcgtcaccggcgaccgcgatttgctccagctcgtatcggaccgcgtgaccgtcgcgctgacgcgcaagggcatcacggaaacggagcggtacgacccggcgcgcatccgcgaggaatacggcttcgatcccgaccgcatccgcgacctcaaagggctgatgggcgacgcgtctgacaatcttcccggcgttcccggcgtcggtgagaaaaccgcactgaaactgctcaggcagtacggttcgctggagagcgtcctggaacacgcgtcggaaatcgccggaaagctcggtgaaaatctgcgggcgcacgccgacgccgcccgattgagcaagcggctggcgacgatcgactgcgcggtaccgttgcagtcgggatgggactggctgcgcctcggcgaaccggaccgcgccgcgctcgcctcgctgttgcggcagctcgaattcaagtcgctgttgaaacggctcggactcgacggcacgtccgccgatgccgacgtcgacggcgtccgttcctccgcgcggccggcggacgagaaacggccgagggccgtcgccgtcgctgaggagggcgtcgacgtccgctgtccggatcgcccggaagaagtcgaagaagcgctgtcgcggctggaagccgcccagtcggtcgtcgtcgaggtgacgggcgacaacccgcacgacggcgaagtgcgcggcgtcgcatggtgggacggacatacggcgtatttcattccgtttgaacggctggtgcagtccgacatgcggccgctggccgactggctcgccgacgcgcgtcggccgaagcgtacgcacgactcccatcgcgctgaagtggcgctgttctggcacggccttgcgtttcgcggcacgtcgttctgcacgcatatcgccgcctatttgctcgaccccacggaatcgcgccatacgctggcggacctgtcgcgccgctacggtctgccgccggtaccggaagccgaggacgtttacggcaagggcgcgaagttcaaggttcccgatcgcgacacgctggcgcgttacgtcggccgcaaggccgccctagtcgcgcggctcgttccgctgctcgaggcggatttggcggcctgcggcatgcgttcgcttttttacgacctggagctgccgctttcatccgaactcgccgtcatggagacggtcggcgtccgcgtcgacgcggcggcgctcgccgcctacggcgaggaattgcgcgaggcggcggcgaaagtcgagcgggagatttacgagctggccgggacgacgttcaacatcggatcgacgaaacagctcggcgaaattttgttcgataagctggggctgcccgtcgtcaagaaaacgaaaaccggctattccaccgacgcagacgtgctggaggaactggcgccgtaccatccgatcgtcgaaaagattttgcattaccgcaatctgacgaaattgcagtcgacctacatcgaggggcttttgaaagaaatccgtccgcaaaccggtaaaatccatacgtattatcagcagacgatcgcggcgacggggcggctgagcagtcagtttcccaatcttcagaacattccgatccgtctcgaagaggggcggaaaatccgcaaggcgttcgttccgtcagaaccgggatggctgatgctcgccgccgactattcgcagatcgaactgcgcgtgctcgcgcacgtttccggcgacgaacggctgaaggaagcgtttcggacaggcatggacatccacacgaagaccgcgatggacgtgttcggcgtttccgaagaccgcgtcgacgcgcgcatgcggcggcaggcgaaggcggtcaatttcggcatcatctacggcatcagcgatttcggactggcgcaaaacctgaacatttcccgcaaggaggcggcggagttcatccggcaatatttcgccgtcttttcgggcgtcaaggcgtaccgcgagcggatcgtcgagcaggcgcgccgcgacggttacgtgacgaccctgctcggtcgcaggcgctatttgccggacatcaacgcgtcgaattacaacctccgctcgttcgcggagcggacggcgatgaatacgccgatccagggcacggccgccgacatcatcaagaccgcgatggtgcgtctgacgcggcggatgcgcgacgtcggactgaagagccgcatgctgctgcaggttcacgacgagctcgtgtttgaagtgccgccggacgagctcgacgcgatgcgggagcttgtgacggacgtcatggagtcggcggtcccgctcgacgtgccgctgaaggtcgacgtcagctggggcgccgactggtacgcggcgaagtgagggaagcgggatcc

SEQ ID NO: 1388 - DNA, 2792 bp, Artificial Sequence
  Description of Artificial Sequence: Synthetic Caldibacillus cellulovorans CompA.2 DNA Polymerase Q628P
atgaaatacctgctgccgaccgctgctgctggtctgctgctcctcgctgcccagccggcgatggccatgggcaaactgattctggtcgacggaaacagcgtcgccaaccgggcgttttacgccgtccggctgctcagcacgcgcggcggcctgcacacaaacgcggtgtacggattcgccaacatgttgctcaagctgatcgaggaggaacggccgacgcattttctcgtcgcgttcgacgcgggcaaggcgacgttccgtcatcgcgaatacgaggcctacaaggcgggtcgcctgcagacgccgcccgagctgtccgagcagtttccgtacatccgggagctcgtccgggcgttcggcgtcgcgtccggcgagctggaggaatacgaggcggacgacatgatcggtacgctggcgaaacgggcggaggccgagggcgtcgacacgctggtcgtcaccggcgaccgcgatttgctccagctcgtatcggaccgcgtgaccgtcgcgctgacgcgcaagggcatcacggaaacggagcggtacgacccggcgcgcatccgcgaggaatacggcttcgatcccgaccgcatccgcgacctcaaagggctgatgggcgacgcgtctgacaatcttcccggcgttcccggcgtcggtgagaaaaccgcactgaaactgctcaggcagtacggttcgctggagagcgtcctggaacacgcgtcggaaatcgccggaaagctcggtgaaaatctgcgggcgcacgccgacgccgcccgattgagcaagcggctggcgacgatcgactgcgcggtaccgttgcagtcgggatgggactggctgcgcctcggcgaaccggaccgcgccgcgctcgcctcgctgttgcggcagctcgaattcaagtcgctgttgaaacggctcggactcgacggcacgtccgccgatgccgacgtcgacggcgtccgttcctccgcgcggccggcggacgagaaacggccgagggccgtcgccgtcgctgaggagggcgtcgacgtccgctgtccggatcgcccggaagaagtcgaagaagcgctgtcgcggctggaagccgcccagtcggtcgtcgtcgaggtgacgggcgacaacccgcacgacggcgaagtgcgcggcgtcgcatggtgggacggacatacggcgtatttcattccgtttgaacggctggtgcagtccgacatgcggccgctggccgactggctcgccgacgcgcgtcggccgaagcgtacgcacgactcccatcgcgctgaagtggcgctgttctggcacggccttgcgtttcgcggcacgtcgttctgcacgcatatcgccgcctatttgctcgaccccacggaatcgcgccatacgctggcggacctgtcgcgccgctacggtctgccgccggtaccggaagccgaggacgtttacggcaagggcgcgaagttcaaggttcccgatcgcgacacgctggcgcgttacgtcggccgcaaggccgccctagtcgcgcggctcgttccgctgctcgaggcggatttggcggcctgcggcatgcgttcgcttttttacgacctggagctgccgctttcatccgaactcgccgtcatggagacggtcggcgtccgcgtcgacgcggcggcgctcgccgcctacggcgaggaattgcgcgaggcggcggcgaaagtcgagcgggagatttacgagctggccgggacgacgttcaacatcggatcgacgaaacagctcggcgaaattttgttcgataagctggggctgcccgtcgtcaagaaaacgaaaaccggctattccaccgacgcagacgtgctggaggaactggcgccgtaccatccgatcgtcgaaaagattttgcattaccgccctctgacgaaattgcagtcgacctacatcgaggggcttttgaaagaaatccgtccgcaaaccggtaaaatccatacgtattatcagcagacgatcgcggcgacggggcggctgagcagtcagtttcccaatcttcagaacattccgatccgtctcgaagaggggcggaaaatccgcaaggcgttcgttccgtcagaaccgggatggctgatgctcgccgccgactattcgcagatcgaactgcgcgtgctcgcgcacgtttccggcgacgaacggctgaaggaagcgtttcggacaggcatggacatccacacgaagaccgcgatggacgtgttcggcgtttccgaagaccgcgtcgacgcgcgcatgcggcggcaggcgaaggcggtcaatttcggcatcatctacggcatcagcgatttcggactggcgcaaaacctgaacatttcccgcaaggaggcggcggagttcatccggcaatatttcgccgtcttttcgggcgtcaaggcgtaccgcgagcggatcgtcgagcaggcgcgccgcgacggttacgtgacgaccctgctcggtcgcaggcgctatttgccggacatcaacgcgtcgaattacaacctccgctcgttcgcggagcggacggcgatgaatacgccgatccagggcacggccgccgacatcatcaagaccgcgatggtgcgtctgacgcggcggatgcgcgacgtcggactgaagagccgcatgctgctgcaggttcacgacgagctcgtgtttgaagtgccgccggacgagctcgacgcgatgcgggagcttgtgacggacgtcatggagtcggcggtcccgctcgacgtgccgctgaaggtcgacgtcagctggggcgccgactggtacgcggcgaagtgagggaagcgggatcc

SEQ ID NO: 1389 - DNA, 2792 bp, Artificial Sequence
  Description of Artificial Sequence: Synthetic Caldibacillus cellulovorans CompA.2 DNA Polymerase Q628R
atgaaatacctgctgccgaccgctgctgctggtctgctgctcctcgctgcccagccggcgatggccatgggcaaactgattctggtcgacggaaacagcgtcgccaaccgggcgttttacgccgtccggctgctcagcacgcgcggcggcctgcacacaaacgcggtgtacggattcgccaacatgttgctcaagctgatcgaggaggaacggccgacgcattttctcgtcgcgttcgacgcgggcaaggcgacgttccgtcatcgcgaatacgaggcctacaaggcgggtcgcctgcagacgccgcccgagctgtccgagcagtttccgtacatccgggagctcgtccgggcgttcggcgtcgcgtccggcgagctggaggaatacgaggcggacgacatgatcggtacgctggcgaaacgggcggaggccgagggcgtcgacacgctggtcgtcaccggcgaccgcgatttgctccagctcgtatcggaccgcgtgaccgtcgcgctgacgcgcaagggcatcacggaaacggagcggtacgacccggcgcgcatccgcgaggaatacggcttcgatcccgaccgcatccgcgacctcaaagggctgatgggcgacgcgtctgacaatcttcccggcgttcccggcgtcggtgagaaaaccgcactgaaactgctcaggcagtacggttcgctggagagcgtcctggaacacgcgtcggaaatcgccggaaagctcggtgaaaatctgcgggcgcacgccgacgccgcccgattgagcaagcggctggcgacgatcgactgcgcggtaccgttgcagtcgggatgggactggctgcgcctcggcgaaccggaccgcgccgcgctcgcctcgctgttgcggcagctcgaattcaagtcgctgttgaaacggctcggactcgacggcacgtccgccgatgccgacgtcgacggcgtccgttcctccgcgcggccggcggacgagaaacggccgagggccgtcgccgtcgctgaggagggcgtcgacgtccgctgtccggatcgcccggaagaagtcgaagaagcgctgtcgcggctggaagccgcccagtcggtcgtcgtcgaggtgacgggcgacaacccgcacgacggcgaagtgcgcggcgtcgcatggtgggacggacatacggcgtatttcattccgtttgaacggctggtgcagtccgacatgcggccgctggccgactggctcgccgacgcgcgtcggccgaagcgtacgcacgactcccatcgcgctgaagtggcgctgttctggcacggccttgcgtttcgcggcacgtcgttctgcacgcatatcgccgcctatttgctcgaccccacggaatcgcgccatacgctggcggacctgtcgcgccgctacggtctgccgccggtaccggaagccgaggacgtttacggcaagggcgcgaagttcaaggttcccgatcgcgacacgctggcgcgttacgtcggccgcaaggccgccctagtcgcgcggctcgttccgctgctcgaggcggatttggcggcctgcggcatgcgttcgcttttttacgacctggagctgccgctttcatccgaactcgccgtcatggagacggtcggcgtccgcgtcgacgcggcggcgctcgccgcctacggcgaggaattgcgcgaggcggcggcgaaagtcgagcgggagatttacgagctggccgggacgacgttcaacatcggatcgacgaaacagctcggcgaaattttgttcgataagctggggctgcccgtcgtcaagaaaacgaaaaccggctattccaccgacgcagacgtgctggaggaactggcgccgtaccatccgatcgtcgaaaagattttgcattaccgccgtctgacgaaattgcagtcgacctacatcgaggggcttttgaaagaaatccgtccgcaaaccggtaaaatccatacgtattatcagcagacgatcgcggcgacggggcggctgagcagtcagtttcccaatcttcagaacattccgatccgtctcgaagaggggcggaaaatccgcaaggcgttcgttccgtcagaaccgggatggctgatgctcgccgccgactattcgcagatcgaactgcgcgtgctcgcgcacgtttccggcgacgaacggctgaaggaagcgtttcggacaggcatggacatccacacgaagaccgcgatggacgtgttcggcgtttccgaagaccgcgtcgacgcgcgcatgcggcggcaggcgaaggcggtcaatttcggcatcatctacggcatcagcgatttcggactggcgcaaaacctgaacatttcccgcaaggaggcggcggagttcatccggcaatatttcgccgtcttttcgggcgtcaaggcgtaccgcgagcggatcgtcgagcaggcgcgccgcgacggttacgtgacgaccctgctcggtcgcaggcgctatttgccggacatcaacgcgtcgaattacaacctccgctcgttcgcggagcggacggcgatgaatacgccgatccagggcacggccgccgacatcatcaagaccgcgatggtgcgtctgacgcggcggatgcgcgacgtcggactgaagagccgcatgctgctgcaggttcacgacgagctcgtgtttgaagtgccgccggacgagctcgacgcgatgcgggagcttgtgacggacgtcatggagtcggcggtcccgctcgacgtgccgctgaaggtcgacgtcagctggggcgccgactggtacgcggcgaagtgagggaagcgggatcc

SEQ ID NO: 1390 - DNA, 2792 bp, Artificial Sequence
  Description of Artificial Sequence: Synthetic Caldibacillus cellulovorans CompA.2 DNA Polymerase Q628S
atgaaatacctgctgccgaccgctgctgctggtctgctgctcctcgctgcccagccggcgatggccatgggcaaactgattctggtcgacggaaacagcgtcgccaaccgggcgttttacgccgtccggctgctcagcacgcgcggcggcctgcacacaaacgcggtgtacggattcgccaacatgttgctcaagctgatcgaggaggaacggccgacgcattttctcgtcgcgttcgacgcgggcaaggcgacgttccgtcatcgcgaatacgaggcctacaaggcgggtcgcctgcagacgccgcccgagctgtccgagcagtttccgtacatccgggagctcgtccgggcgttcggcgtcgcgtccggcgagctggaggaatacgaggcggacgacatgatcggtacgctggcgaaacgggcggaggccgagggcgtcgacacgctggtcgtcaccggcgaccgcgatttgctccagctcgtatcggaccgcgtgaccgtcgcgctgacgcgcaagggcatcacggaaacggagcggtacgacccggcgcgcatccgcgaggaatacggcttcgatcccgaccgcatccgcgacctcaaagggctgatgggcgacgcgtctgacaatcttcccggcgttcccggcgtcggtgagaaaaccgcactgaaactgctcaggcagtacggttcgctggagagcgtcctggaacacgcgtcggaaatcgccggaaagctcggtgaaaatctgcgggcgcacgccgacgccgcccgattgagcaagcggctggcgacgatcgactgcgcggtaccgttgcagtcgggatgggactggctgcgcctcggcgaaccggaccgcgccgcgctcgcctcgctgttgcggcagctcgaattcaagtcgctgttgaaacggctcggactcgacggcacgtccgccgatgccgacgtcgacggcgtccgttcctccgcgcggccggcggacgagaaacggccgagggccgtcgccgtcgctgaggagggcgtcgacgtccgctgtccggatcgcccggaagaagtcgaagaagcgctgtcgcggctggaagccgcccagtcggtcgtcgtcgaggtgacgggcgacaacccgcacgacggcgaagtgcgcggcgtcgcatggtgggacggacatacggcgtatttcattccgtttgaacggctggtgcagtccgacatgcggccgctggccgactggctcgccgacgcgcgtcggccgaagcgtacgcacgactcccatcgcgctgaagtggcgctgttctggcacggccttgcgtttcgcggcacgtcgttctgcacgcatatcgccgcctatttgctcgaccccacggaatcgcgccatacgctggcggacctgtcgcgccgctacggtctgccgccggtaccggaagccgaggacgtttacggcaagggcgcgaagttcaaggttcccgatcgcgacacgctggcgcgttacgtcggccgcaaggccgccctagtcgcgcggctcgttccgctgctcgaggcggatttggcggcctgcggcatgcgttcgcttttttacgacctggagctgccgctttcatccgaactcgccgtcatggagacggtcggcgtccgcgtcgacgcggcggcgctcgccgcctacggcgaggaattgcgcgaggcggcggcgaaagtcgagcgggagatttacgagctggccgggacgacgttcaacatcggatcgacgaaacagctcggcgaaattttgttcgataagctggggctgcccgtcgtcaagaaaacgaaaaccggctattccaccgacgcagacgtgctggaggaactggcgccgtaccatccgatcgtcgaaaagattttgcattaccgctctctgacgaaattgcagtcgacctacatcgaggggcttttgaaagaaatccgtccgcaaaccggtaaaatccatacgtattatcagcagacgatcgcggcgacggggcggctgagcagtcagtttcccaatcttcagaacattccgatccgtctcgaagaggggcggaaaatccgcaaggcgttcgttccgtcagaaccgggatggctgatgctcgccgccgactattcgcagatcgaactgcgcgtgctcgcgcacgtttccggcgacgaacggctgaaggaagcgtttcggacaggcatggacatccacacgaagaccgcgatggacgtgttcggcgtttccgaagaccgcgtcgacgcgcgcatgcggcggcaggcgaaggcggtcaatttcggcatcatctacggcatcagcgatttcggactggcgcaaaacctgaacatttcccgcaaggaggcggcggagttcatccggcaatatttcgccgtcttttcgggcgtcaaggcgtaccgcgagcggatcgtcgagcaggcgcgccgcgacggttacgtgacgaccctgctcggtcgcaggcgctatttgccggacatcaacgcgtcgaattacaacctccgctcgttcgcggagcggacggcgatgaatacgccgatccagggcacggccgccgacatcatcaagaccgcgatggtgcgtctgacgcggcggatgcgcgacgtcggactgaagagccgcatgctgctgcaggttcacgacgagctcgtgtttgaagtgccgccggacgagctcgacgcgatgcgggagcttgtgacggacgtcatggagtcggcggtcccgctcgacgtgccgctgaaggtcgacgtcagctggggcgccgactggtacgcggcgaagtgagggaagcgggatcc

SEQ ID NO: 1391 - DNA, 2792 bp, Artificial Sequence
  Description of Artificial Sequence: Synthetic Caldibacillus cellulovorans CompA.2 DNA Polymerase Q628T
atgaaatacctgctgccgaccgctgctgctggtctgctgctcctcgctgcccagccggcgatggccatgggcaaactgattctggtcgacggaaacagcgtcgccaaccgggcgttttacgccgtccggctgctcagcacgcgcggcggcctgcacacaaacgcggtgtacggattcgccaacatgttgctcaagctgatcgaggaggaacggccgacgcattttctcgtcgcgttcgacgcgggcaaggcgacgttccgtcatcgcgaatacgaggcctacaaggcgggtcgcctgcagacgccgcccgagctgtccgagcagtttccgtacatccgggagctcgtccgggcgttcggcgtcgcgtccggcgagctggaggaatacgaggcggacgacatgatcggtacgctggcgaaacgggcggaggccgagggcgtcgacacgctggtcgtcaccggcgaccgcgatttgctccagctcgtatcggaccgcgtgaccgtcgcgctgacgcgcaagggcatcacggaaacggagcggtacgacccggcgcgcatccgcgaggaatacggcttcgatcccgaccgcatccgcgacctcaaagggctgatgggcgacgcgtctgacaatcttcccggcgttcccggcgtcggtgagaaaaccgcactgaaactgctcaggcagtacggttcgctggagagcgtcctggaacacgcgtcggaaatcgccggaaagctcggtgaaaatctgcgggcgcacgccgacgccgcccgattgagcaagcggctggcgacgatcgactgcgcggtaccgttgcagtcgggatgggactggctgcgcctcggcgaaccggaccgcgccgcgctcgcctcgctgttgcggcagctcgaattcaagtcgctgttgaaacggctcggactcgacggcacgtccgccgatgccgacgtcgacggcgtccgttcctccgcgcggccggcggacgagaaacggccgagggccgtcgccgtcgctgaggagggcgtcgacgtccgctgtccggatcgcccggaagaagtcgaagaagcgctgtcgcggctggaagccgcccagtcggtcgtcgtcgaggtgacgggcgacaacccgcacgacggcgaagtgcgcggcgtcgcatggtgggacggacatacggcgtatttcattccgtttgaacggctggtgcagtccgacatgcggccgctggccgactggctcgccgacgcgcgtcggccgaagcgtacgcacgactcccatcgcgctgaagtggcgctgttctggcacggccttgcgtttcgcggcacgtcgttctgcacgcatatcgccgcctatttgctcgaccccacggaatcgcgccatacgctggcggacctgtcgcgccgctacggtctgccgccggtaccggaagccgaggacgtttacggcaagggcgcgaagttcaaggttcccgatcgcgacacgctggcgcgttacgtcggccgcaaggccgccctagtcgcgcggctcgttccgctgctcgaggcggatttggcggcctgcggcatgcgttcgcttttttacgacctggagctgccgctttcatccgaactcgccgtcatggagacggtcggcgtccgcgtcgacgcggcggcgctcgccgcctacggcgaggaattgcgcgaggcggcggcgaaagtcgagcgggagatttacgagctggccgggacgacgttcaacatcggatcgacgaaacagctcggcgaaattttgttcgataagctggggctgcccgtcgtcaagaaaacgaaaaccggctattccaccgacgcagacgtgctggaggaactggcgccgtaccatccgatcgtcgaaaagattttgcattaccgcactctgacgaaattgcagtcgacctacatcgaggggcttttgaaagaaatccgtccgcaaaccggtaaaatccatacgtattatcagcagacgatcgcggcgacggggcggctgagcagtcagtttcccaatcttcagaacattccgatccgtctcgaagaggggcggaaaatccgcaaggcgttcgttccgtcagaaccgggatggctgatgctcgccgccgactattcgcagatcgaactgcgcgtgctcgcgcacgtttccggcgacgaacggctgaaggaagcgtttcggacaggcatggacatccacacgaagaccgcgatggacgtgttcggcgtttccgaagaccgcgtcgacgcgcgcatgcggcggcaggcgaaggcggtcaatttcggcatcatctacggcatcagcgatttcggactggcgcaaaacctgaacatttcccgcaaggaggcggcggagttcatccggcaatatttcgccgtcttttcgggcgtcaaggcgtaccgcgagcggatcgtcgagcaggcgcgccgcgacggttacgtgacgaccctgctcggtcgcaggcgctatttgccggacatcaacgcgtcgaattacaacctccgctcgttcgcggagcggacggcgatgaatacgccgatccagggcacggccgccgacatcatcaagaccgcgatggtgcgtctgacgcggcggatgcgcgacgtcggactgaagagccgcatgctgctgcaggttcacgacgagctcgtgtttgaagtgccgccggacgagctcgacgcgatgcgggagcttgtgacggacgtcatggagtcggcggtcccgctcgacgtgccgctgaaggtcgacgtcagctggggcgccgactggtacgcggcgaagtgagggaagcgggatcc

SEQ ID NO: 1392 - DNA, 2792 bp, Artificial Sequence
  Description of Artificial Sequence: Synthetic Caldibacillus cellulovorans CompA.2 DNA Polymerase Q628V
atgaaatacctgctgccgaccgctgctgctggtctgctgctcctcgctgcccagccggcgatggccatgggcaaactgattctggtcgacggaaacagcgtcgccaaccgggcgttttacgccgtccggctgctcagcacgcgcggcggcctgcacacaaacgcggtgtacggattcgccaacatgttgctcaagctgatcgaggaggaacggccgacgcattttctcgtcgcgttcgacgcgggcaaggcgacgttccgtcatcgcgaatacgaggcctacaaggcgggtcgcctgcagacgccgcccgagctgtccgagcagtttccgtacatccgggagctcgtccgggcgttcggcgtcgcgtccggcgagctggaggaatacgaggcggacgacatgatcggtacgctggcgaaacgggcggaggccgagggcgtcgacacgctggtcgtcaccggcgaccgcgatttgctccagctcgtatcggaccgcgtgaccgtcgcgctgacgcgcaagggcatcacggaaacggagcggtacgacccggcgcgcatccgcgaggaatacggcttcgatcccgaccgcatccgcgacctcaaagggctgatgggcgacgcgtctgacaatcttcccggcgttcccggcgtcggtgagaaaaccgcactgaaactgctcaggcagtacggttcgctggagagcgtcctggaacacgcgtcggaaatcgccggaaagctcggtgaaaatctgcgggcgcacgccgacgccgcccgattgagcaagcggctggcgacgatcgactgcgcggtaccgttgcagtcgggatgggactggctgcgcctcggcgaaccggaccgcgccgcgctcgcctcgctgttgcggcagctcgaattcaagtcgctgttgaaacggctcggactcgacggcacgtccgccgatgccgacgtcgacggcgtccgttcctccgcgcggccggcggacgagaaacggccgagggccgtcgccgtcgctgaggagggcgtcgacgtccgctgtccggatcgcccggaagaagtcgaagaagcgctgtcgcggctggaagccgcccagtcggtcgtcgtcgaggtgacgggcgacaacccgcacgacggcgaagtgcgcggcgtcgcatggtgggacggacatacggcgtatttcattccgtttgaacggctggtgcagtccgacatgcggccgctggccgactggctcgccgacgcgcgtcggccgaagcgtacgcacgactcccatcgcgctgaagtggcgctgttctggcacggccttgcgtttcgcggcacgtcgttctgcacgcatatcgccgcctatttgctcgaccccacggaatcgcgccatacgctggcggacctgtcgcgccgctacggtctgccgccggtaccggaagccgaggacgtttacggcaagggcgcgaagttcaaggttcccgatcgcgacacgctggcgcgttacgtcggccgcaaggccgccctagtcgcgcggctcgttccgctgctcgaggcggatttggcggcctgcggcatgcgttcgcttttttacgacctggagctgccgctttcatccgaactcgccgtcatggagacggtcggcgtccgcgtcgacgcggcggcgctcgccgcctacggcgaggaattgcgcgaggcggcggcgaaagtcgagcgggagatttacgagctggccgggacgacgttcaacatcggatcgacgaaacagctcggcgaaattttgttcgataagctggggctgcccgtcgtcaagaaaacgaaaaccggctattccaccgacgcagacgtgctggaggaactggcgccgtaccatccgatcgtcgaaaagattttgcattaccgcgttctgacgaaattgcagtcgacctacatcgaggggcttttgaaagaaatccgtccgcaaaccggtaaaatccatacgtattatcagcagacgatcgcggcgacggggcggctgagcagtcagtttcccaatcttcagaacattccgatccgtctcgaagaggggcggaaaatccgcaaggcgttcgttccgtcagaaccgggatggctgatgctcgccgccgactattcgcagatcgaactgcgcgtgctcgcgcacgtttccggcgacgaacggctgaaggaagcgtttcggacaggcatggacatccacacgaagaccgcgatggacgtgttcggcgtttccgaagaccgcgtcgacgcgcgcatgcggcggcaggcgaaggcggtcaatttcggcatcatctacggcatcagcgatttcggactggcgcaaaacctgaacatttcccgcaaggaggcggcggagttcatccggcaatatttcgccgtcttttcgggcgtcaaggcgtaccgcgagcggatcgtcgagcaggcgcgccgcgacggttacgtgacgaccctgctcggtcgcaggcgctatttgccggacatcaacgcgtcgaattacaacctccgctcgttcgcggagcggacggcgatgaatacgccgatccagggcacggccgccgacatcatcaagaccgcgatggtgcgtctgacgcggcggatgcgcgacgtcggactgaagagccgcatgctgctgcaggttcacgacgagctcgtgtttgaagtgccgccggacgagctcgacgcgatgcgggagcttgtgacggacgtcatggagtcggcggtcccgctcgacgtgccgctgaaggtcgacgtcagctggggcgccgactggtacgcggcgaagtgagggaagcgggatcc

SEQ ID NO: 1393 - DNA, 2792 bp, Artificial Sequence
  Description of Artificial Sequence: Synthetic Caldibacillus cellulovorans CompA.2 DNA Polymerase Q628W
atgaaatacctgctgccgaccgctgctgctggtctgctgctcctcgctgcccagccggcgatggccatgggcaaactgattctggtcgacggaaacagcgtcgccaaccgggcgttttacgccgtccggctgctcagcacgcgcggcggcctgcacacaaacgcggtgtacggattcgccaacatgttgctcaagctgatcgaggaggaacggccgacgcattttctcgtcgcgttcgacgcgggcaaggcgacgttccgtcatcgcgaatacgaggcctacaaggcgggtcgcctgcagacgccgcccgagctgtccgagcagtttccgtacatccgggagctcgtccgggcgttcggcgtcgcgtccggcgagctggaggaatacgaggcggacgacatgatcggtacgctggcgaaacgggcggaggccgagggcgtcgacacgctggtcgtcaccggcgaccgcgatttgctccagctcgtatcggaccgcgtgaccgtcgcgctgacgcgcaagggcatcacggaaacggagcggtacgacccggcgcgcatccgcgaggaatacggcttcgatcccgaccgcatccgcgacctcaaagggctgatgggcgacgcgtctgacaatcttcccggcgttcccggcgtcggtgagaaaaccgcactgaaactgctcaggcagtacggttcgctggagagcgtcctggaacacgcgtcggaaatcgccggaaagctcggtgaaaatctgcgggcgcacgccgacgccgcccgattgagcaagcggctggcgacgatcgactgcgcggtaccgttgcagtcgggatgggactggctgcgcctcggcgaaccggaccgcgccgcgctcgcctcgctgttgcggcagctcgaattcaagtcgctgttgaaacggctcggactcgacggcacgtccgccgatgccgacgtcgacggcgtccgttcctccgcgcggccggcggacgagaaacggccgagggccgtcgccgtcgctgaggagggcgtcgacgtccgctgtccggatcgcccggaagaagtcgaagaagcgctgtcgcggctggaagccgcccagtcggtcgtcgtcgaggtgacgggcgacaacccgcacgacggcgaagtgcgcggcgtcgcatggtgggacggacatacggcgtatttcattccgtttgaacggctggtgcagtccgacatgcggccgctggccgactggctcgccgacgcgcgtcggccgaagcgtacgcacgactcccatcgcgctgaagtggcgctgttctggcacggccttgcgtttcgcggcacgtcgttctgcacgcatatcgccgcctatttgctcgaccccacggaatcgcgccatacgctggcggacctgtcgcgccgctacggtctgccgccggtaccggaagccgaggacgtttacggcaagggcgcgaagttcaaggttcccgatcgcgacacgctggcgcgttacgtcggccgcaaggccgccctagtcgcgcggctcgttccgctgctcgaggcggatttggcggcctgcggcatgcgttcgcttttttacgacctggagctgccgctttcatccgaactcgccgtcatggagacggtcggcgtccgcgtcgacgcggcggcgctcgccgcctacggcgaggaattgcgcgaggcggcggcgaaagtcgagcgggagatttacgagctggccgggacgacgttcaacatcggatcgacgaaacagctcggcgaaattttgttcgataagctggggctgcccgtcgtcaagaaaacgaaaaccggctattccaccgacgcagacgtgctggaggaactggcgccgtaccatccgatcgtcgaaaagattttgcattaccgctggctgacgaaattgcagtcgacctacatcgaggggcttttgaaagaaatccgtccgcaaaccggtaaaatccatacgtattatcagcagacgatcgcggcgacggggcggctgagcagtcagtttcccaatcttcagaacattccgatccgtctcgaagaggggcggaaaatccgcaaggcgttcgttccgtcagaaccgggatggctgatgctcgccgccgactattcgcagatcgaactgcgcgtgctcgcgcacgtttccggcgacgaacggctgaaggaagcgtttcggacaggcatggacatccacacgaagaccgcgatggacgtgttcggcgtttccgaagaccgcgtcgacgcgcgcatgcggcggcaggcgaaggcggtcaatttcggcatcatctacggcatcagcgatttcggactggcgcaaaacctgaacatttcccgcaaggaggcggcggagttcatccggcaatatttcgccgtcttttcgggcgtcaaggcgtaccgcgagcggatcgtcgagcaggcgcgccgcgacggttacgtgacgaccctgctcggtcgcaggcgctatttgccggacatcaacgcgtcgaattacaacctccgctcgttcgcggagcggacggcgatgaatacgccgatccagggcacggccgccgacatcatcaagaccgcgatggtgcgtctgacgcggcggatgcgcgacgtcggactgaagagccgcatgctgctgcaggttcacgacgagctcgtgtttgaagtgccgccggacgagctcgacgcgatgcgggagcttgtgacggacgtcatggagtcggcggtcccgctcgacgtgccgctgaaggtcgacgtcagctggggcgccgactggtacgcggcgaagtgagggaagcgggatcc

SEQ ID NO: 1394 - DNA, 2792 bp, Artificial Sequence
  Description of Artificial Sequence: Synthetic Caldibacillus cellulovorans CompA.2 DNA Polymerase Q628Y
atgaaatacctgctgccgaccgctgctgctggtctgctgctcctcgctgcccagccggcgatggccatgggcaaactgattctggtcgacggaaacagcgtcgccaaccgggcgttttacgccgtccggctgctcagcacgcgcggcggcctgcacacaaacgcggtgtacggattcgccaacatgttgctcaagctgatcgaggaggaacggccgacgcattttctcgtcgcgttcgacgcgggcaaggcgacgttccgtcatcgcgaatacgaggcctacaaggcgggtcgcctgcagacgccgcccgagctgtccgagcagtttccgtacatccgggagctcgtccgggcgttcggcgtcgcgtccggcgagctggaggaatacgaggcggacgacatgatcggtacgctggcgaaacgggcggaggccgagggcgtcgacacgctggtcgtcaccggcgaccgcgatttgctccagctcgtatcggaccgcgtgaccgtcgcgctgacgcgcaagggcatcacggaaacggagcggtacgacccggcgcgcatccgcgaggaatacggcttcgatcccgaccgcatccgcgacctcaaagggctgatgggcgacgcgtctgacaatcttcccggcgttcccggcgtcggtgagaaaaccgcactgaaactgctcaggcagtacggttcgctggagagcgtcctggaacacgcgtcggaaatcgccggaaagctcggtgaaaatctgcgggcgcacgccgacgccgcccgattgagcaagcggctggcgacgatcgactgcgcggtaccgttgcagtcgggatgggactggctgcgcctcggcgaaccggaccgcgccgcgctcgcctcgctgttgcggcagctcgaattcaagtcgctgttgaaacggctcggactcgacggcacgtccgccgatgccgacgtcgacggcgtccgttcctccgcgcggccggcggacgagaaacggccgagggccgtcgccgtcgctgaggagggcgtcgacgtccgctgtccggatcgcccggaagaagtcgaagaagcgctgtcgcggctggaagccgcccagtcggtcgtcgtcgaggtgacgggcgacaacccgcacgacggcgaagtgcgcggcgtcgcatggtgggacggacatacggcgtatttcattccgtttgaacggctggtgcagtccgacatgcggccgctggccgactggctcgccgacgcgcgtcggccgaagcgtacgcacgactcccatcgcgctgaagtggcgctgttctggcacggccttgcgtttcgcggcacgtcgttctgcacgcatatcgccgcctatttgctcgaccccacggaatcgcgccatacgctggcggacctgtcgcgccgctacggtctgccgccggtaccggaagccgaggacgtttacggcaagggcgcgaagttcaaggttcccgatcgcgacacgctggcgcgttacgtcggccgcaaggccgccctagtcgcgcggctcgttccgctgctcgaggcggatttggcggcctgcggcatgcgttcgcttttttacgacctggagctgccgctttcatccgaactcgccgtcatggagacggtcggcgtccgcgtcgacgcggcggcgctcgccgcctacggcgaggaattgcgcgaggcggcggcgaaagtcgagcgggagatttacgagctggccgggacgacgttcaacatcggatcgacgaaacagctcggcgaaattttgttcgataagctggggctgcccgtcgtcaagaaaacgaaaaccggctattccaccgacgcagacgtgctggaggaactggcgccgtaccatccgatcgtcgaaaagattttgcattaccgctatctgacgaaattgcagtcgacctacatcgaggggcttttgaaagaaatccgtccgcaaaccggtaaaatccatacgtattatcagcagacgatcgcggcgacggggcggctgagcagtcagtttcccaatcttcagaacattccgatccgtctcgaagaggggcggaaaatccgcaaggcgttcgttccgtcagaaccgggatggctgatgctcgccgccgactattcgcagatcgaactgcgcgtgctcgcgcacgtttccggcgacgaacggctgaaggaagcgtttcggacaggcatggacatccacacgaagaccgcgatggacgtgttcggcgtttccgaagaccgcgtcgacgcgcgcatgcggcggcaggcgaaggcggtcaatttcggcatcatctacggcatcagcgatttcggactggcgcaaaacctgaacatttcccgcaaggaggcggcggagttcatccggcaatatttcgccgtcttttcgggcgtcaaggcgtaccgcgagcggatcgtcgagcaggcgcgccgcgacggttacgtgacgaccctgctcggtcgcaggcgctatttgccggacatcaacgcgtcgaattacaacctccgctcgttcgcggagcggacggcgatgaatacgccgatccagggcacggccgccgacatcatcaagaccgcgatggtgcgtctgacgcggcggatgcgcgacgtcggactgaagagccgcatgctgctgcaggttcacgacgagctcgtgtttgaagtgccgccggacgagctcgacgcgatgcgggagcttgtgacggacgtcatggagtcggcggtcccgctcgacgtgccgctgaaggtcgacgtcagctggggcgccgactggtacgcggcgaagtgagggaagcgggatcc

SEQ ID NO: 1395 - DNA, 2792 bp, Artificial Sequence
  Description of Artificial Sequence: Synthetic Caldibacillus cellulovorans CompA.2 DNA Polymerase I659A
atgaaatacctgctgccgaccgctgctgctggtctgctgctcctcgctgcccagccggcgatggccatgggcaaactgattctggtcgacggaaacagcgtcgccaaccgggcgttttacgccgtccggctgctcagcacgcgcggcggcctgcacacaaacgcggtgtacggattcgccaacatgttgctcaagctgatcgaggaggaacggccgacgcattttctcgtcgcgttcgacgcgggcaaggcgacgttccgtcatcgcgaatacgaggcctacaaggcgggtcgcctgcagacgccgcccgagctgtccgagcagtttccgtacatccgggagctcgtccgggcgttcggcgtcgcgtccggcgagctggaggaatacgaggcggacgacatgatcggtacgctggcgaaacgggcggaggccgagggcgtcgacacgctggtcgtcaccggcgaccgcgatttgctccagctcgtatcggaccgcgtgaccgtcgcgctgacgcgcaagggcatcacggaaacggagcggtacgacccggcgcgcatccgcgaggaatacggcttcgatcccgaccgcatccgcgacctcaaagggctgatgggcgacgcgtctgacaatcttcccggcgttcccggcgtcggtgagaaaaccgcactgaaactgctcaggcagtacggttcgctggagagcgtcctggaacacgcgtcggaaatcgccggaaagctcggtgaaaatctgcgggcgcacgccgacgccgcccgattgagcaagcggctggcgacgatcgactgcgcggtaccgttgcagtcgggatgggactggctgcgcctcggcgaaccggaccgcgccgcgctcgcctcgctgttgcggcagctcgaattcaagtcgctgttgaaacggctcggactcgacggcacgtccgccgatgccgacgtcgacggcgtccgttcctccgcgcggccggcggacgagaaacggccgagggccgtcgccgtcgctgaggagggcgtcgacgtccgctgtccggatcgcccggaagaagtcgaagaagcgctgtcgcggctggaagccgcccagtcggtcgtcgtcgaggtgacgggcgacaacccgcacgacggcgaagtgcgcggcgtcgcatggtgggacggacatacggcgtatttcattccgtttgaacggctggtgcagtccgacatgcggccgctggccgactggctcgccgacgcgcgtcggccgaagcgtacgcacgactcccatcgcgctgaagtggcgctgttctggcacggccttgcgtttcgcggcacgtcgttctgcacgcatatcgccgcctatttgctcgaccccacggaatcgcgccatacgctggcggacctgtcgcgccgctacggtctgccgccggtaccggaagccgaggacgtttacggcaagggcgcgaagttcaaggttcccgatcgcgacacgctggcgcgttacgtcggccgcaaggccgccctagtcgcgcggctcgttccgctgctcgaggcggatttggcggcctgcggcatgcgttcgcttttttacgacctggagctgccgctttcatccgaactcgccgtcatggagacggtcggcgtccgcgtcgacgcggcggcgctcgccgcctacggcgaggaattgcgcgaggcggcggcgaaagtcgagcgggagatttacgagctggccgggacgacgttcaacatcggatcgacgaaacagctcggcgaaattttgttcgataagctggggctgcccgtcgtcaagaaaacgaaaaccggctattccaccgacgcagacgtgctggaggaactggcgccgtaccatccgatcgtcgaaaagattttgcattaccgccaactgacgaaattgcagtcgacctacatcgaggggcttttgaaagaaatccgtccgcaaaccggtaaaatccatacgtattatcagcagacggctgcggcgacggggcggctgagcagtcagtttcccaatcttcagaacattccgatccgtctcgaagaggggcggaaaatccgcaaggcgttcgttccgtcagaaccgggatggctgatgctcgccgccgactattcgcagatcgaactgcgcgtgctcgcgcacgtttccggcgacgaacggctgaaggaagcgtttcggacaggcatggacatccacacgaagaccgcgatggacgtgttcggcgtttccgaagaccgcgtcgacgcgcgcatgcggcggcaggcgaaggcggtcaatttcggcatcatctacggcatcagcgatttcggactggcgcaaaacctgaacatttcccgcaaggaggcggcggagttcatccggcaatatttcgccgtcttttcgggcgtcaaggcgtaccgcgagcggatcgtcgagcaggcgcgccgcgacggttacgtgacgaccctgctcggtcgcaggcgctatttgccggacatcaacgcgtcgaattacaacctccgctcgttcgcggagcggacggcgatgaatacgccgatccagggcacggccgccgacatcatcaagaccgcgatggtgcgtctgacgcggcggatgcgcgacgtcggactgaagagccgcatgctgctgcaggttcacgacgagctcgtgtttgaagtgccgccggacgagctcgacgcgatgcgggagcttgtgacggacgtcatggagtcggcggtcccgctcgacgtgccgctgaaggtcgacgtcagctggggcgccgactggtacgcggcgaagtgagggaagcgggatcc

SEQ ID NO: 1396 - DNA, 2792 bp, Artificial Sequence
  Description of Artificial Sequence: Synthetic Caldibacillus cellulovorans CompA.2 DNA Polymerase I659C
atgaaatacctgctgccgaccgctgctgctggtctgctgctcctcgctgcccagccggcgatggccatgggcaaactgattctggtcgacggaaacagcgtcgccaaccgggcgttttacgccgtccggctgctcagcacgcgcggcggcctgcacacaaacgcggtgtacggattcgccaacatgttgctcaagctgatcgaggaggaacggccgacgcattttctcgtcgcgttcgacgcgggcaaggcgacgttccgtcatcgcgaatacgaggcctacaaggcgggtcgcctgcagacgccgcccgagctgtccgagcagtttccgtacatccgggagctcgtccgggcgttcggcgtcgcgtccggcgagctggaggaatacgaggcggacgacatgatcggtacgctggcgaaacgggcggaggccgagggcgtcgacacgctggtcgtcaccggcgaccgcgatttgctccagctcgtatcggaccgcgtgaccgtcgcgctgacgcgcaagggcatcacggaaacggagcggtacgacccggcgcgcatccgcgaggaatacggcttcgatcccgaccgcatccgcgacctcaaagggctgatgggcgacgcgtctgacaatcttcccggcgttcccggcgtcggtgagaaaaccgcactgaaactgctcaggcagtacggttcgctggagagcgtcctggaacacgcgtcggaaatcgccggaaagctcggtgaaaatctgcgggcgcacgccgacgccgcccgattgagcaagcggctggcgacgatcgactgcgcggtaccgttgcagtcgggatgggactggctgcgcctcggcgaaccggaccgcgccgcgctcgcctcgctgttgcggcagctcgaattcaagtcgctgttgaaacggctcggactcgacggcacgtccgccgatgccgacgtcgacggcgtccgttcctccgcgcggccggcggacgagaaacggccgagggccgtcgccgtcgctgaggagggcgtcgacgtccgctgtccggatcgcccggaagaagtcgaagaagcgctgtcgcggctggaagccgcccagtcggtcgtcgtcgaggtgacgggcgacaacccgcacgacggcgaagtgcgcggcgtcgcatggtgggacggacatacggcgtatttcattccgtttgaacggctggtgcagtccgacatgcggccgctggccgactggctcgccgacgcgcgtcggccgaagcgtacgcacgactcccatcgcgctgaagtggcgctgttctggcacggccttgcgtttcgcggcacgtcgttctgcacgcatatcgccgcctatttgctcgaccccacggaatcgcgccatacgctggcggacctgtcgcgccgctacggtctgccgccggtaccggaagccgaggacgtttacggcaagggcgcgaagttcaaggttcccgatcgcgacacgctggcgcgttacgtcggccgcaaggccgccctagtcgcgcggctcgttccgctgctcgaggcggatttggcggcctgcggcatgcgttcgcttttttacgacctggagctgccgctttcatccgaactcgccgtcatggagacggtcggcgtccgcgtcgacgcggcggcgctcgccgcctacggcgaggaattgcgcgaggcggcggcgaaagtcgagcgggagatttacgagctggccgggacgacgttcaacatcggatcgacgaaacagctcggcgaaattttgttcgataagctggggctgcccgtcgtcaagaaaacgaaaaccggctattccaccgacgcagacgtgctggaggaactggcgccgtaccatccgatcgtcgaaaagattttgcattaccgccaactgacgaaattgcagtcgacctacatcgaggggcttttgaaagaaatccgtccgcaaaccggtaaaatccatacgtattatcagcagacgtgtgcggcgacggggcggctgagcagtcagtttcccaatcttcagaacattccgatccgtctcgaagaggggcggaaaatccgcaaggcgttcgttccgtcagaaccgggatggctgatgctcgccgccgactattcgcagatcgaactgcgcgtgctcgcgcacgtttccggcgacgaacggctgaaggaagcgtttcggacaggcatggacatccacacgaagaccgcgatggacgtgttcggcgtttccgaagaccgcgtcgacgcgcgcatgcggcggcaggcgaaggcggtcaatttcggcatcatctacggcatcagcgatttcggactggcgcaaaacctgaacatttcccgcaaggaggcggcggagttcatccggcaatatttcgccgtcttttcgggcgtcaaggcgtaccgcgagcggatcgtcgagcaggcgcgccgcgacggttacgtgacgaccctgctcggtcgcaggcgctatttgccggacatcaacgcgtcgaattacaacctccgctcgttcgcggagcggacggcgatgaatacgccgatccagggcacggccgccgacatcatcaagaccgcgatggtgcgtctgacgcggcggatgcgcgacgtcggactgaagagccgcatgctgctgcaggttcacgacgagctcgtgtttgaagtgccgccggacgagctcgacgcgatgcgggagcttgtgacggacgtcatggagtcggcggtcccgctcgacgtgccgctgaaggtcgacgtcagctggggcgccgactggtacgcggcgaagtgagggaagcgggatcc

SEQ ID NO: 1397 - DNA, 2792 bp, Artificial Sequence
  Description of Artificial Sequence: Synthetic Caldibacillus cellulovorans CompA.2 DNA Polymerase I659D
atgaaatacctgctgccgaccgctgctgctggtctgctgctcctcgctgcccagccggcgatggccatgggcaaactgattctggtcgacggaaacagcgtcgccaaccgggcgttttacgccgtccggctgctcagcacgcgcggcggcctgcacacaaacgcggtgtacggattcgccaacatgttgctcaagctgatcgaggaggaacggccgacgcattttctcgtcgcgttcgacgcgggcaaggcgacgttccgtcatcgcgaatacgaggcctacaaggcgggtcgcctgcagacgccgcccgagctgtccgagcagtttccgtacatccgggagctcgtccgggcgttcggcgtcgcgtccggcgagctggaggaatacgaggcggacgacatgatcggtacgctggcgaaacgggcggaggccgagggcgtcgacacgctggtcgtcaccggcgaccgcgatttgctccagctcgtatcggaccgcgtgaccgtcgcgctgacgcgcaagggcatcacggaaacggagcggtacgacccggcgcgcatccgcgaggaatacggcttcgatcccgaccgcatccgcgacctcaaagggctgatgggcgacgcgtctgacaatcttcccggcgttcccggcgtcggtgagaaaaccgcactgaaactgctcaggcagtacggttcgctggagagcgtcctggaacacgcgtcggaaatcgccggaaagctcggtgaaaatctgcgggcgcacgccgacgccgcccgattgagcaagcggctggcgacgatcgactgcgcggtaccgttgcagtcgggatgggactggctgcgcctcggcgaaccggaccgcgccgcgctcgcctcgctgttgcggcagctcgaattcaagtcgctgttgaaacggctcggactcgacggcacgtccgccgatgccgacgtcgacggcgtccgttcctccgcgcggccggcggacgagaaacggccgagggccgtcgccgtcgctgaggagggcgtcgacgtccgctgtccggatcgcccggaagaagtcgaagaagcgctgtcgcggctggaagccgcccagtcggtcgtcgtcgaggtgacgggcgacaacccgcacgacggcgaagtgcgcggcgtcgcatggtgggacggacatacggcgtatttcattccgtttgaacggctggtgcagtccgacatgcggccgctggccgactggctcgccgacgcgcgtcggccgaagcgtacgcacgactcccatcgcgctgaagtggcgctgttctggcacggccttgcgtttcgcggcacgtcgttctgcacgcatatcgccgcctatttgctcgaccccacggaatcgcgccatacgctggcggacctgtcgcgccgctacggtctgccgccggtaccggaagccgaggacgtttacggcaagggcgcgaagttcaaggttcccgatcgcgacacgctggcgcgttacgtcggccgcaaggccgccctagtcgcgcggctcgttccgctgctcgaggcggatttggcggcctgcggcatgcgttcgcttttttacgacctggagctgccgctttcatccgaactcgccgtcatggagacggtcggcgtccgcgtcgacgcggcggcgctcgccgcctacggcgaggaattgcgcgaggcggcggcgaaagtcgagcgggagatttacgagctggccgggacgacgttcaacatcggatcgacgaaacagctcggcgaaattttgttcgataagctggggctgcccgtcgtcaagaaaacgaaaaccggctattccaccgacgcagacgtgctggaggaactggcgccgtaccatccgatcgtcgaaaagattttgcattaccgccaactgacgaaattgcagtcgacctacatcgaggggcttttgaaagaaatccgtccgcaaaccggtaaaatccatacgtattatcagcagacggatgcggcgacggggcggctgagcagtcagtttcccaatcttcagaacattccgatccgtctcgaagaggggcggaaaatccgcaaggcgttcgttccgtcagaaccgggatggctgatgctcgccgccgactattcgcagatcgaactgcgcgtgctcgcgcacgtttccggcgacgaacggctgaaggaagcgtttcggacaggcatggacatccacacgaagaccgcgatggacgtgttcggcgtttccgaagaccgcgtcgacgcgcgcatgcggcggcaggcgaaggcggtcaatttcggcatcatctacggcatcagcgatttcggactggcgcaaaacctgaacatttcccgcaaggaggcggcggagttcatccggcaatatttcgccgtcttttcgggcgtcaaggcgtaccgcgagcggatcgtcgagcaggcgcgccgcgacggttacgtgacgaccctgctcggtcgcaggcgctatttgccggacatcaacgcgtcgaattacaacctccgctcgttcgcggagcggacggcgatgaatacgccgatccagggcacggccgccgacatcatcaagaccgcgatggtgcgtctgacgcggcggatgcgcgacgtcggactgaagagccgcatgctgctgcaggttcacgacgagctcgtgtttgaagtgccgccggacgagctcgacgcgatgcgggagcttgtgacggacgtcatggagtcggcggtcccgctcgacgtgccgctgaaggtcgacgtcagctggggcgccgactggtacgcggcgaagtgagggaagcgggatcc

SEQ ID NO: 1398 - DNA, 2792 bp, Artificial Sequence
  Description of Artificial Sequence: Synthetic Caldibacillus cellulovorans CompA.2 DNA Polymerase I659F
atgaaatacctgctgccgaccgctgctgctggtctgctgctcctcgctgcccagccggcgatggccatgggcaaactgattctggtcgacggaaacagcgtcgccaaccgggcgttttacgccgtccggctgctcagcacgcgcggcggcctgcacacaaacgcggtgtacggattcgccaacatgttgctcaagctgatcgaggaggaacggccgacgcattttctcgtcgcgttcgacgcgggcaaggcgacgttccgtcatcgcgaatacgaggcctacaaggcgggtcgcctgcagacgccgcccgagctgtccgagcagtttccgtacatccgggagctcgtccgggcgttcggcgtcgcgtccggcgagctggaggaatacgaggcggacgacatgatcggtacgctggcgaaacgggcggaggccgagggcgtcgacacgctggtcgtcaccggcgaccgcgatttgctccagctcgtatcggaccgcgtgaccgtcgcgctgacgcgcaagggcatcacggaaacggagcggtacgacccggcgcgcatccgcgaggaatacggcttcgatcccgaccgcatccgcgacctcaaagggctgatgggcgacgcgtctgacaatcttcccggcgttcccggcgtcggtgagaaaaccgcactgaaactgctcaggcagtacggttcgctggagagcgtcctggaacacgcgtcggaaatcgccggaaagctcggtgaaaatctgcgggcgcacgccgacgccgcccgattgagcaagcggctggcgacgatcgactgcgcggtaccgttgcagtcgggatgggactggctgcgcctcggcgaaccggaccgcgccgcgctcgcctcgctgttgcggcagctcgaattcaagtcgctgttgaaacggctcggactcgacggcacgtccgccgatgccgacgtcgacggcgtccgttcctccgcgcggccggcggacgagaaacggccgagggccgtcgccgtcgctgaggagggcgtcgacgtccgctgtccggatcgcccggaagaagtcgaagaagcgctgtcgcggctggaagccgcccagtcggtcgtcgtcgaggtgacgggcgacaacccgcacgacggcgaagtgcgcggcgtcgcatggtgggacggacatacggcgtatttcattccgtttgaacggctggtgcagtccgacatgcggccgctggccgactggctcgccgacgcgcgtcggccgaagcgtacgcacgactcccatcgcgctgaagtggcgctgttctggcacggccttgcgtttcgcggcacgtcgttctgcacgcatatcgccgcctatttgctcgaccccacggaatcgcgccatacgctggcggacctgtcgcgccgctacggtctgccgccggtaccggaagccgaggacgtttacggcaagggcgcgaagttcaaggttcccgatcgcgacacgctggcgcgttacgtcggccgcaaggccgccctagtcgcgcggctcgttccgctgctcgaggcggatttggcggcctgcggcatgcgttcgcttttttacgacctggagctgccgctttcatccgaactcgccgtcatggagacggtcggcgtccgcgtcgacgcggcggcgctcgccgcctacggcgaggaattgcgcgaggcggcggcgaaagtcgagcgggagatttacgagctggccgggacgacgttcaacatcggatcgacgaaacagctcggcgaaattttgttcgataagctggggctgcccgtcgtcaagaaaacgaaaaccggctattccaccgacgcagacgtgctggaggaactggcgccgtaccatccgatcgtcgaaaagattttgcattaccgccaactgacgaaattgcagtcgacctacatcgaggggcttttgaaagaaatccgtccgcaaaccggtaaaatccatacgtattatcagcagacgtttgcggcgacggggcggctgagcagtcagtttcccaatcttcagaacattccgatccgtctcgaagaggggcggaaaatccgcaaggcgttcgttccgtcagaaccgggatggctgatgctcgccgccgactattcgcagatcgaactgcgcgtgctcgcgcacgtttccggcgacgaacggctgaaggaagcgtttcggacaggcatggacatccacacgaagaccgcgatggacgtgttcggcgtttccgaagaccgcgtcgacgcgcgcatgcggcggcaggcgaaggcggtcaatttcggcatcatctacggcatcagcgatttcggactggcgcaaaacctgaacatttcccgcaaggaggcggcggagttcatccggcaatatttcgccgtcttttcgggcgtcaaggcgtaccgcgagcggatcgtcgagcaggcgcgccgcgacggttacgtgacgaccctgctcggtcgcaggcgctatttgccggacatcaacgcgtcgaattacaacctccgctcgttcgcggagcggacggcgatgaatacgccgatccagggcacggccgccgacatcatcaagaccgcgatggtgcgtctgacgcggcggatgcgcgacgtcggactgaagagccgcatgctgctgcaggttcacgacgagctcgtgtttgaagtgccgccggacgagctcgacgcgatgcgggagcttgtgacggacgtcatggagtcggcggtcccgctcgacgtgccgctgaaggtcgacgtcagctggggcgccgactggtacgcggcgaagtgagggaagcgggatcc

SEQ ID NO: 1399 - DNA, 2792 bp, Artificial Sequence
  Description of Artificial Sequence: Synthetic Caldibacillus cellulovorans CompA.2 DNA Polymerase I659G
atgaaatacctgctgccgaccgctgctgctggtctgctgctcctcgctgcccagccggcgatggccatgggcaaactgattctggtcgacggaaacagcgtcgccaaccgggcgttttacgccgtccggctgctcagcacgcgcggcggcctgcacacaaacgcggtgtacggattcgccaacatgttgctcaagctgatcgaggaggaacggccgacgcattttctcgtcgcgttcgacgcgggcaaggcgacgttccgtcatcgcgaatacgaggcctacaaggcgggtcgcctgcagacgccgcccgagctgtccgagcagtttccgtacatccgggagctcgtccgggcgttcggcgtcgcgtccggcgagctggaggaatacgaggcggacgacatgatcggtacgctggcgaaacgggcggaggccgagggcgtcgacacgctggtcgtcaccggcgaccgcgatttgctccagctcgtatcggaccgcgtgaccgtcgcgctgacgcgcaagggcatcacggaaacggagcggtacgacccggcgcgcatccgcgaggaatacggcttcgatcccgaccgcatccgcgacctcaaagggctgatgggcgacgcgtctgacaatcttcccggcgttcccggcgtcggtgagaaaaccgcactgaaactgctcaggcagtacggttcgctggagagcgtcctggaacacgcgtcggaaatcgccggaaagctcggtgaaaatctgcgggcgcacgccgacgccgcccgattgagcaagcggctggcgacgatcgactgcgcggtaccgttgcagtcgggatgggactggctgcgcctcggcgaaccggaccgcgccgcgctcgcctcgctgttgcggcagctcgaattcaagtcgctgttgaaacggctcggactcgacggcacgtccgccgatgccgacgtcgacggcgtccgttcctccgcgcggccggcggacgagaaacggccgagggccgtcgccgtcgctgaggagggcgtcgacgtccgctgtccggatcgcccggaagaagtcgaagaagcgctgtcgcggctggaagccgcccagtcggtcgtcgtcgaggtgacgggcgacaacccgcacgacggcgaagtgcgcggcgtcgcatggtgggacggacatacggcgtatttcattccgtttgaacggctggtgcagtccgacatgcggccgctggccgactggctcgccgacgcgcgtcggccgaagcgtacgcacgactcccatcgcgctgaagtggcgctgttctggcacggccttgcgtttcgcggcacgtcgttctgcacgcatatcgccgcctatttgctcgaccccacggaatcgcgccatacgctggcggacctgtcgcgccgctacggtctgccgccggtaccggaagccgaggacgtttacggcaagggcgcgaagttcaaggttcccgatcgcgacacgctggcgcgttacgtcggccgcaaggccgccctagtcgcgcggctcgttccgctgctcgaggcggatttggcggcctgcggcatgcgttcgcttttttacgacctggagctgccgctttcatccgaactcgccgtcatggagacggtcggcgtccgcgtcgacgcggcggcgctcgccgcctacggcgaggaattgcgcgaggcggcggcgaaagtcgagcgggagatttacgagctggccgggacgacgttcaacatcggatcgacgaaacagctcggcgaaattttgttcgataagctggggctgcccgtcgtcaagaaaacgaaaaccggctattccaccgacgcagacgtgctggaggaactggcgccgtaccatccgatcgtcgaaaagattttgcattaccgccaactgacgaaattgcagtcgacctacatcgaggggcttttgaaagaaatccgtccgcaaaccggtaaaatccatacgtattatcagcagacgggtgcggcgacggggcggctgagcagtcagtttcccaatcttcagaacattccgatccgtctcgaagaggggcggaaaatccgcaaggcgttcgttccgtcagaaccgggatggctgatgctcgccgccgactattcgcagatcgaactgcgcgtgctcgcgcacgtttccggcgacgaacggctgaaggaagcgtttcggacaggcatggacatccacacgaagaccgcgatggacgtgttcggcgtttccgaagaccgcgtcgacgcgcgcatgcggcggcaggcgaaggcggtcaatttcggcatcatctacggcatcagcgatttcggactggcgcaaaacctgaacatttcccgcaaggaggcggcggagttcatccggcaatatttcgccgtcttttcgggcgtcaaggcgtaccgcgagcggatcgtcgagcaggcgcgccgcgacggttacgtgacgaccctgctcggtcgcaggcgctatttgccggacatcaacgcgtcgaattacaacctccgctcgttcgcggagcggacggcgatgaatacgccgatccagggcacggccgccgacatcatcaagaccgcgatggtgcgtctgacgcggcggatgcgcgacgtcggactgaagagccgcatgctgctgcaggttcacgacgagctcgtgtttgaagtgccgccggacgagctcgacgcgatgcgggagcttgtgacggacgtcatggagtcggcggtcccgctcgacgtgccgctgaaggtcgacgtcagctggggcgccgactggtacgcggcgaagtgagggaagcgggatcc

SEQ ID NO: 1400 - DNA, 2792 bp, Artificial Sequence
  Description of Artificial Sequence: Synthetic Caldibacillus cellulovorans CompA.2 DNA Polymerase I659H
atgaaatacctgctgccgaccgctgctgctggtctgctgctcctcgctgcccagccggcgatggccatgggcaaactgattctggtcgacggaaacagcgtcgccaaccgggcgttttacgccgtccggctgctcagcacgcgcggcggcctgcacacaaacgcggtgtacggattcgccaacatgttgctcaagctgatcgaggaggaacggccgacgcattttctcgtcgcgttcgacgcgggcaaggcgacgttccgtcatcgcgaatacgaggcctacaaggcgggtcgcctgcagacgccgcccgagctgtccgagcagtttccgtacatccgggagctcgtccgggcgttcggcgtcgcgtccggcgagctggaggaatacgaggcggacgacatgatcggtacgctggcgaaacgggcggaggccgagggcgtcgacacgctggtcgtcaccggcgaccgcgatttgctccagctcgtatcggaccgcgtgaccgtcgcgctgacgcgcaagggcatcacggaaacggagcggtacgacccggcgcgcatccgcgaggaatacggcttcgatcccgaccgcatccgcgacctcaaagggctgatgggcgacgcgtctgacaatcttcccggcgttcccggcgtcggtgagaaaaccgcactgaaactgctcaggcagtacggttcgctggagagcgtcctggaacacgcgtcggaaatcgccggaaagctcggtgaaaatctgcgggcgcacgccgacgccgcccgattgagcaagcggctggcgacgatcgactgcgcggtaccgttgcagtcgggatgggactggctgcgcctcggcgaaccggaccgcgccgcgctcgcctcgctgttgcggcagctcgaattcaagtcgctgttgaaacggctcggactcgacggcacgtccgccgatgccgacgtcgacggcgtccgttcctccgcgcggccggcggacgagaaacggccgagggccgtcgccgtcgctgaggagggcgtcgacgtccgctgtccggatcgcccggaagaagtcgaagaagcgctgtcgcggctggaagccgcccagtcggtcgtcgtcgaggtgacgggcgacaacccgcacgacggcgaagtgcgcggcgtcgcatggtgggacggacatacggcgtatttcattccgtttgaacggctggtgcagtccgacatgcggccgctggccgactggctcgccgacgcgcgtcggccgaagcgtacgcacgactcccatcgcgctgaagtggcgctgttctggcacggccttgcgtttcgcggcacgtcgttctgcacgcatatcgccgcctatttgctcgaccccacggaatcgcgccatacgctggcggacctgtcgcgccgctacggtctgccgccggtaccggaagccgaggacgtttacggcaagggcgcgaagttcaaggttcccgatcgcgacacgctggcgcgttacgtcggccgcaaggccgccctagtcgcgcggctcgttccgctgctcgaggcggatttggcggcctgcggcatgcgttcgcttttttacgacctggagctgccgctttcatccgaactcgccgtcatggagacggtcggcgtccgcgtcgacgcggcggcgctcgccgcctacggcgaggaattgcgcgaggcggcggcgaaagtcgagcgggagatttacgagctggccgggacgacgttcaacatcggatcgacgaaacagctcggcgaaattttgttcgataagctggggctgcccgtcgtcaagaaaacgaaaaccggctattccaccgacgcagacgtgctggaggaactggcgccgtaccatccgatcgtcgaaaagattttgcattaccgccaactgacgaaattgcagtcgacctacatcgaggggcttttgaaagaaatccgtccgcaaaccggtaaaatccatacgtattatcagcagacgcatgcggcgacggggcggctgagcagtcagtttcccaatcttcagaacattccgatccgtctcgaagaggggcggaaaatccgcaaggcgttcgttccgtcagaaccgggatggctgatgctcgccgccgactattcgcagatcgaactgcgcgtgctcgcgcacgtttccggcgacgaacggctgaaggaagcgtttcggacaggcatggacatccacacgaagaccgcgatggacgtgttcggcgtttccgaagaccgcgtcgacgcgcgcatgcggcggcaggcgaaggcggtcaatttcggcatcatctacggcatcagcgatttcggactggcgcaaaacctgaacatttcccgcaaggaggcggcggagttcatccggcaatatttcgccgtcttttcgggcgtcaaggcgtaccgcgagcggatcgtcgagcaggcgcgccgcgacggttacgtgacgaccctgctcggtcgcaggcgctatttgccggacatcaacgcgtcgaattacaacctccgctcgttcgcggagcggacggcgatgaatacgccgatccagggcacggccgccgacatcatcaagaccgcgatggtgcgtctgacgcggcggatgcgcgacgtcggactgaagagccgcatgctgctgcaggttcacgacgagctcgtgtttgaagtgccgccggacgagctcgacgcgatgcgggagcttgtgacggacgtcatggagtcggcggtcccgctcgacgtgccgctgaaggtcgacgtcagctggggcgccgactggtacgcggcgaagtgagggaagcgggatcc

SEQ ID NO: 1401 - DNA, 2792 bp, Artificial Sequence
  Description of Artificial Sequence: Synthetic Caldibacillus cellulovorans CompA.2 DNA Polymerase I659L
atgaaatacctgctgccgaccgctgctgctggtctgctgctcctcgctgcccagccggcgatggccatgggcaaactgattctggtcgacggaaacagcgtcgccaaccgggcgttttacgccgtccggctgctcagcacgcgcggcggcctgcacacaaacgcggtgtacggattcgccaacatgttgctcaagctgatcgaggaggaacggccgacgcattttctcgtcgcgttcgacgcgggcaaggcgacgttccgtcatcgcgaatacgaggcctacaaggcgggtcgcctgcagacgccgcccgagctgtccgagcagtttccgtacatccgggagctcgtccgggcgttcggcgtcgcgtccggcgagctggaggaatacgaggcggacgacatgatcggtacgctggcgaaacgggcggaggccgagggcgtcgacacgctggtcgtcaccggcgaccgcgatttgctccagctcgtatcggaccgcgtgaccgtcgcgctgacgcgcaagggcatcacggaaacggagcggtacgacccggcgcgcatccgcgaggaatacggcttcgatcccgaccgcatccgcgacctcaaagggctgatgggcgacgcgtctgacaatcttcccggcgttcccggcgtcggtgagaaaaccgcactgaaactgctcaggcagtacggttcgctggagagcgtcctggaacacgcgtcggaaatcgccggaaagctcggtgaaaatctgcgggcgcacgccgacgccgcccgattgagcaagcggctggcgacgatcgactgcgcggtaccgttgcagtcgggatgggactggctgcgcctcggcgaaccggaccgcgccgcgctcgcctcgctgttgcggcagctcgaattcaagtcgctgttgaaacggctcggactcgacggcacgtccgccgatgccgacgtcgacggcgtccgttcctccgcgcggccggcggacgagaaacggccgagggccgtcgccgtcgctgaggagggcgtcgacgtccgctgtccggatcgcccggaagaagtcgaagaagcgctgtcgcggctggaagccgcccagtcggtcgtcgtcgaggtgacgggcgacaacccgcacgacggcgaagtgcgcggcgtcgcatggtgggacggacatacggcgtatttcattccgtttgaacggctggtgcagtccgacatgcggccgctggccgactggctcgccgacgcgcgtcggccgaagcgtacgcacgactcccatcgcgctgaagtggcgctgttctggcacggccttgcgtttcgcggcacgtcgttctgcacgcatatcgccgcctatttgctcgaccccacggaatcgcgccatacgctggcggacctgtcgcgccgctacggtctgccgccggtaccggaagccgaggacgtttacggcaagggcgcgaagttcaaggttcccgatcgcgacacgctggcgcgttacgtcggccgcaaggccgccctagtcgcgcggctcgttccgctgctcgaggcggatttggcggcctgcggcatgcgttcgcttttttacgacctggagctgccgctttcatccgaactcgccgtcatggagacggtcggcgtccgcgtcgacgcggcggcgctcgccgcctacggcgaggaattgcgcgaggcggcggcgaaagtcgagcgggagatttacgagctggccgggacgacgttcaacatcggatcgacgaaacagctcggcgaaattttgttcgataagctggggctgcccgtcgtcaagaaaacgaaaaccggctattccaccgacgcagacgtgctggaggaactggcgccgtaccatccgatcgtcgaaaagattttgcattaccgccaactgacgaaattgcagtcgacctacatcgaggggcttttgaaagaaatccgtccgcaaaccggtaaaatccatacgtattatcagcagacgcttgcggcgacggggcggctgagcagtcagtttcccaatcttcagaacattccgatccgtctcgaagaggggcggaaaatccgcaaggcgttcgttccgtcagaaccgggatggctgatgctcgccgccgactattcgcagatcgaactgcgcgtgctcgcgcacgtttccggcgacgaacggctgaaggaagcgtttcggacaggcatggacatccacacgaagaccgcgatggacgtgttcggcgtttccgaagaccgcgtcgacgcgcgcatgcggcggcaggcgaaggcggtcaatttcggcatcatctacggcatcagcgatttcggactggcgcaaaacctgaacatttcccgcaaggaggcggcggagttcatccggcaatatttcgccgtcttttcgggcgtcaaggcgtaccgcgagcggatcgtcgagcaggcgcgccgcgacggttacgtgacgaccctgctcggtcgcaggcgctatttgccggacatcaacgcgtcgaattacaacctccgctcgttcgcggagcggacggcgatgaatacgccgatccagggcacggccgccgacatcatcaagaccgcgatggtgcgtctgacgcggcggatgcgcgacgtcggactgaagagccgcatgctgctgcaggttcacgacgagctcgtgtttgaagtgccgccggacgagctcgacgcgatgcgggagcttgtgacggacgtcatggagtcggcggtcccgctcgacgtgccgctgaaggtcgacgtcagctggggcgccgactggtacgcggcgaagtgagggaagcgggatcc

SEQ ID NO: 1402 - DNA, 2792 bp, Artificial Sequence
  Description of Artificial Sequence: Synthetic Caldibacillus cellulovorans CompA.2 DNA Polymerase I659M
atgaaatacctgctgccgaccgctgctgctggtctgctgctcctcgctgcccagccggcgatggccatgggcaaactgattctggtcgacggaaacagcgtcgccaaccgggcgttttacgccgtccggctgctcagcacgcgcggcggcctgcacacaaacgcggtgtacggattcgccaacatgttgctcaagctgatcgaggaggaacggccgacgcattttctcgtcgcgttcgacgcgggcaaggcgacgttccgtcatcgcgaatacgaggcctacaaggcgggtcgcctgcagacgccgcccgagctgtccgagcagtttccgtacatccgggagctcgtccgggcgttcggcgtcgcgtccggcgagctggaggaatacgaggcggacgacatgatcggtacgctggcgaaacgggcggaggccgagggcgtcgacacgctggtcgtcaccggcgaccgcgatttgctccagctcgtatcggaccgcgtgaccgtcgcgctgacgcgcaagggcatcacggaaacggagcggtacgacccggcgcgcatccgcgaggaatacggcttcgatcccgaccgcatccgcgacctcaaagggctgatgggcgacgcgtctgacaatcttcccggcgttcccggcgtcggtgagaaaaccgcactgaaactgctcaggcagtacggttcgctggagagcgtcctggaacacgcgtcggaaatcgccggaaagctcggtgaaaatctgcgggcgcacgccgacgccgcccgattgagcaagcggctggcgacgatcgactgcgcggtaccgttgcagtcgggatgggactggctgcgcctcggcgaaccggaccgcgccgcgctcgcctcgctgttgcggcagctcgaattcaagtcgctgttgaaacggctcggactcgacggcacgtccgccgatgccgacgtcgacggcgtccgttcctccgcgcggccggcggacgagaaacggccgagggccgtcgccgtcgctgaggagggcgtcgacgtccgctgtccggatcgcccggaagaagtcgaagaagcgctgtcgcggctggaagccgcccagtcggtcgtcgtcgaggtgacgggcgacaacccgcacgacggcgaagtgcgcggcgtcgcatggtgggacggacatacggcgtatttcattccgtttgaacggctggtgcagtccgacatgcggccgctggccgactggctcgccgacgcgcgtcggccgaagcgtacgcacgactcccatcgcgctgaagtggcgctgttctggcacggccttgcgtttcgcggcacgtcgttctgcacgcatatcgccgcctatttgctcgaccccacggaatcgcgccatacgctggcggacctgtcgcgccgctacggtctgccgccggtaccggaagccgaggacgtttacggcaagggcgcgaagttcaaggttcccgatcgcgacacgctggcgcgttacgtcggccgcaaggccgccctagtcgcgcggctcgttccgctgctcgaggcggatttggcggcctgcggcatgcgttcgcttttttacgacctggagctgccgctttcatccgaactcgccgtcatggagacggtcggcgtccgcgtcgacgcggcggcgctcgccgcctacggcgaggaattgcgcgaggcggcggcgaaagtcgagcgggagatttacgagctggccgggacgacgttcaacatcggatcgacgaaacagctcggcgaaattttgttcgataagctggggctgcccgtcgtcaagaaaacgaaaaccggctattccaccgacgcagacgtgctggaggaactggcgccgtaccatccgatcgtcgaaaagattttgcattaccgccaactgacgaaattgcagtcgacctacatcgaggggcttttgaaagaaatccgtccgcaaaccggtaaaatccatacgtattatcagcagacgatggcggcgacggggcggctgagcagtcagtttcccaatcttcagaacattccgatccgtctcgaagaggggcggaaaatccgcaaggcgttcgttccgtcagaaccgggatggctgatgctcgccgccgactattcgcagatcgaactgcgcgtgctcgcgcacgtttccggcgacgaacggctgaaggaagcgtttcggacaggcatggacatccacacgaagaccgcgatggacgtgttcggcgtttccgaagaccgcgtcgacgcgcgcatgcggcggcaggcgaaggcggtcaatttcggcatcatctacggcatcagcgatttcggactggcgcaaaacctgaacatttcccgcaaggaggcggcggagttcatccggcaatatttcgccgtcttttcgggcgtcaaggcgtaccgcgagcggatcgtcgagcaggcgcgccgcgacggttacgtgacgaccctgctcggtcgcaggcgctatttgccggacatcaacgcgtcgaattacaacctccgctcgttcgcggagcggacggcgatgaatacgccgatccagggcacggccgccgacatcatcaagaccgcgatggtgcgtctgacgcggcggatgcgcgacgtcggactgaagagccgcatgctgctgcaggttcacgacgagctcgtgtttgaagtgccgccggacgagctcgacgcgatgcgggagcttgtgacggacgtcatggagtcggcggtcccgctcgacgtgccgctgaaggtcgacgtcagctggggcgccgactggtacgcggcgaagtgagggaagcgggatcc

SEQ ID NO: 1403 - DNA, 2792 bp, Artificial Sequence
  Description of Artificial Sequence: Synthetic Caldibacillus cellulovorans CompA.2 DNA Polymerase I659N
atgaaatacctgctgccgaccgctgctgctggtctgctgctcctcgctgcccagccggcgatggccatgggcaaactgattctggtcgacggaaacagcgtcgccaaccgggcgttttacgccgtccggctgctcagcacgcgcggcggcctgcacacaaacgcggtgtacggattcgccaacatgttgctcaagctgatcgaggaggaacggccgacgcattttctcgtcgcgttcgacgcgggcaaggcgacgttccgtcatcgcgaatacgaggcctacaaggcgggtcgcctgcagacgccgcccgagctgtccgagcagtttccgtacatccgggagctcgtccgggcgttcggcgtcgcgtccggcgagctggaggaatacgaggcggacgacatgatcggtacgctggcgaaacgggcggaggccgagggcgtcgacacgctggtcgtcaccggcgaccgcgatttgctccagctcgtatcggaccgcgtgaccgtcgcgctgacgcgcaagggcatcacggaaacggagcggtacgacccggcgcgcatccgcgaggaatacggcttcgatcccgaccgcatccgcgacctcaaagggctgatgggcgacgcgtctgacaatcttcccggcgttcccggcgtcggtgagaaaaccgcactgaaactgctcaggcagtacggttcgctggagagcgtcctggaacacgcgtcggaaatcgccggaaagctcggtgaaaatctgcgggcgcacgccgacgccgcccgattgagcaagcggctggcgacgatcgactgcgcggtaccgttgcagtcgggatgggactggctgcgcctcggcgaaccggaccgcgccgcgctcgcctcgctgttgcggcagctcgaattcaagtcgctgttgaaacggctcggactcgacggcacgtccgccgatgccgacgtcgacggcgtccgttcctccgcgcggccggcggacgagaaacggccgagggccgtcgccgtcgctgaggagggcgtcgacgtccgctgtccggatcgcccggaagaagtcgaagaagcgctgtcgcggctggaagccgcccagtcggtcgtcgtcgaggtgacgggcgacaacccgcacgacggcgaagtgcgcggcgtcgcatggtgggacggacatacggcgtatttcattccgtttgaacggctggtgcagtccgacatgcggccgctggccgactggctcgccgacgcgcgtcggccgaagcgtacgcacgactcccatcgcgctgaagtggcgctgttctggcacggccttgcgtttcgcggcacgtcgttctgcacgcatatcgccgcctatttgctcgaccccacggaatcgcgccatacgctggcggacctgtcgcgccgctacggtctgccgccggtaccggaagccgaggacgtttacggcaagggcgcgaagttcaaggttcccgatcgcgacacgctggcgcgttacgtcggccgcaaggccgccctagtcgcgcggctcgttccgctgctcgaggcggatttggcggcctgcggcatgcgttcgcttttttacgacctggagctgccgctttcatccgaactcgccgtcatggagacggtcggcgtccgcgtcgacgcggcggcgctcgccgcctacggcgaggaattgcgcgaggcggcggcgaaagtcgagcgggagatttacgagctggccgggacgacgttcaacatcggatcgacgaaacagctcggcgaaattttgttcgataagctggggctgcccgtcgtcaagaaaacgaaaaccggctattccaccgacgcagacgtgctggaggaactggcgccgtaccatccgatcgtcgaaaagattttgcattaccgccaactgacgaaattgcagtcgacctacatcgaggggcttttgaaagaaatccgtccgcaaaccggtaaaatccatacgtattatcagcagacgaatgcggcgacggggcggctgagcagtcagtttcccaatcttcagaacattccgatccgtctcgaagaggggcggaaaatccgcaaggcgttcgttccgtcagaaccgggatggctgatgctcgccgccgactattcgcagatcgaactgcgcgtgctcgcgcacgtttccggcgacgaacggctgaaggaagcgtttcggacaggcatggacatccacacgaagaccgcgatggacgtgttcggcgtttccgaagaccgcgtcgacgcgcgcatgcggcggcaggcgaaggcggtcaatttcggcatcatctacggcatcagcgatttcggactggcgcaaaacctgaacatttcccgcaaggaggcggcggagttcatccggcaatatttcgccgtcttttcgggcgtcaaggcgtaccgcgagcggatcgtcgagcaggcgcgccgcgacggttacgtgacgaccctgctcggtcgcaggcgctatttgccggacatcaacgcgtcgaattacaacctccgctcgttcgcggagcggacggcgatgaatacgccgatccagggcacggccgccgacatcatcaagaccgcgatggtgcgtctgacgcggcggatgcgcgacgtcggactgaagagccgcatgctgctgcaggttcacgacgagctcgtgtttgaagtgccgccggacgagctcgacgcgatgcgggagcttgtgacggacgtcatggagtcggcggtcccgctcgacgtgccgctgaaggtcgacgtcagctggggcgccgactggtacgcggcgaagtgagggaagcgggatcc

SEQ ID NO: 1404 - DNA, 2792 bp, Artificial Sequence
  Description of Artificial Sequence: Synthetic Caldibacillus cellulovorans CompA.2 DNA Polymerase I659P
atgaaatacctgctgccgaccgctgctgctggtctgctgctcctcgctgcccagccggcgatggccatgggcaaactgattctggtcgacggaaacagcgtcgccaaccgggcgttttacgccgtccggctgctcagcacgcgcggcggcctgcacacaaacgcggtgtacggattcgccaacatgttgctcaagctgatcgaggaggaacggccgacgcattttctcgtcgcgttcgacgcgggcaaggcgacgttccgtcatcgcgaatacgaggcctacaaggcgggtcgcctgcagacgccgcccgagctgtccgagcagtttccgtacatccgggagctcgtccgggcgttcggcgtcgcgtccggcgagctggaggaatacgaggcggacgacatgatcggtacgctggcgaaacgggcggaggccgagggcgtcgacacgctggtcgtcaccggcgaccgcgatttgctccagctcgtatcggaccgcgtgaccgtcgcgctgacgcgcaagggcatcacggaaacggagcggtacgacccggcgcgcatccgcgaggaatacggcttcgatcccgaccgcatccgcgacctcaaagggctgatgggcgacgcgtctgacaatcttcccggcgttcccggcgtcggtgagaaaaccgcactgaaactgctcaggcagtacggttcgctggagagcgtcctggaacacgcgtcggaaatcgccggaaagctcggtgaaaatctgcgggcgcacgccgacgccgcccgattgagcaagcggctggcgacgatcgactgcgcggtaccgttgcagtcgggatgggactggctgcgcctcggcgaaccggaccgcgccgcgctcgcctcgctgttgcggcagctcgaattcaagtcgctgttgaaacggctcggactcgacggcacgtccgccgatgccgacgtcgacggcgtccgttcctccgcgcggccggcggacgagaaacggccgagggccgtcgccgtcgctgaggagggcgtcgacgtccgctgtccggatcgcccggaagaagtcgaagaagcgctgtcgcggctggaagccgcccagtcggtcgtcgtcgaggtgacgggcgacaacccgcacgacggcgaagtgcgcggcgtcgcatggtgggacggacatacggcgtatttcattccgtttgaacggctggtgcagtccgacatgcggccgctggccgactggctcgccgacgcgcgtcggccgaagcgtacgcacgactcccatcgcgctgaagtggcgctgttctggcacggccttgcgtttcgcggcacgtcgttctgcacgcatatcgccgcctatttgctcgaccccacggaatcgcgccatacgctggcggacctgtcgcgccgctacggtctgccgccggtaccggaagccgaggacgtttacggcaagggcgcgaagttcaaggttcccgatcgcgacacgctggcgcgttacgtcggccgcaaggccgccctagtcgcgcggctcgttccgctgctcgaggcggatttggcggcctgcggcatgcgttcgcttttttacgacctggagctgccgctttcatccgaactcgccgtcatggagacggtcggcgtccgcgtcgacgcggcggcgctcgccgcctacggcgaggaattgcgcgaggcggcggcgaaagtcgagcgggagatttacgagctggccgggacgacgttcaacatcggatcgacgaaacagctcggcgaaattttgttcgataagctggggctgcccgtcgtcaagaaaacgaaaaccggctattccaccgacgcagacgtgctggaggaactggcgccgtaccatccgatcgtcgaaaagattttgcattaccgccaactgacgaaattgcagtcgacctacatcgaggggcttttgaaagaaatccgtccgcaaaccggtaaaatccatacgtattatcagcagacgcctgcggcgacggggcggctgagcagtcagtttcccaatcttcagaacattccgatccgtctcgaagaggggcggaaaatccgcaaggcgttcgttccgtcagaaccgggatggctgatgctcgccgccgactattcgcagatcgaactgcgcgtgctcgcgcacgtttccggcgacgaacggctgaaggaagcgtttcggacaggcatggacatccacacgaagaccgcgatggacgtgttcggcgtttccgaagaccgcgtcgacgcgcgcatgcggcggcaggcgaaggcggtcaatttcggcatcatctacggcatcagcgatttcggactggcgcaaaacctgaacatttcccgcaaggaggcggcggagttcatccggcaatatttcgccgtcttttcgggcgtcaaggcgtaccgcgagcggatcgtcgagcaggcgcgccgcgacggttacgtgacgaccctgctcggtcgcaggcgctatttgccggacatcaacgcgtcgaattacaacctccgctcgttcgcggagcggacggcgatgaatacgccgatccagggcacggccgccgacatcatcaagaccgcgatggtgcgtctgacgcggcggatgcgcgacgtcggactgaagagccgcatgctgctgcaggttcacgacgagctcgtgtttgaagtgccgccggacgagctcgacgcgatgcgggagcttgtgacggacgtcatggagtcggcggtcccgctcgacgtgccgctgaaggtcgacgtcagctggggcgccgactggtacgcggcgaagtgagggaagcgggatcc

SEQ ID NO: 1405 - DNA, 2792 bp, Artificial Sequence
  Description of Artificial Sequence: Synthetic Caldibacillus cellulovorans CompA.2 DNA Polymerase I659Q
atgaaatacctgctgccgaccgctgctgctggtctgctgctcctcgctgcccagccggcgatggccatgggcaaactgattctggtcgacggaaacagcgtcgccaaccgggcgttttacgccgtccggctgctcagcacgcgcggcggcctgcacacaaacgcggtgtacggattcgccaacatgttgctcaagctgatcgaggaggaacggccgacgcattttctcgtcgcgttcgacgcgggcaaggcgacgttccgtcatcgcgaatacgaggcctacaaggcgggtcgcctgcagacgccgcccgagctgtccgagcagtttccgtacatccgggagctcgtccgggcgttcggcgtcgcgtccggcgagctggaggaatacgaggcggacgacatgatcggtacgctggcgaaacgggcggaggccgagggcgtcgacacgctggtcgtcaccggcgaccgcgatttgctccagctcgtatcggaccgcgtgaccgtcgcgctgacgcgcaagggcatcacggaaacggagcggtacgacccggcgcgcatccgcgaggaatacggcttcgatcccgaccgcatccgcgacctcaaagggctgatgggcgacgcgtctgacaatcttcccggcgttcccggcgtcggtgagaaaaccgcactgaaactgctcaggcagtacggttcgctggagagcgtcctggaacacgcgtcggaaatcgccggaaagctcggtgaaaatctgcgggcgcacgccgacgccgcccgattgagcaagcggctggcgacgatcgactgcgcggtaccgttgcagtcgggatgggactggctgcgcctcggcgaaccggaccgcgccgcgctcgcctcgctgttgcggcagctcgaattcaagtcgctgttgaaacggctcggactcgacggcacgtccgccgatgccgacgtcgacggcgtccgttcctccgcgcggccggcggacgagaaacggccgagggccgtcgccgtcgctgaggagggcgtcgacgtccgctgtccggatcgcccggaagaagtcgaagaagcgctgtcgcggctggaagccgcccagtcggtcgtcgtcgaggtgacgggcgacaacccgcacgacggcgaagtgcgcggcgtcgcatggtgggacggacatacggcgtatttcattccgtttgaacggctggtgcagtccgacatgcggccgctggccgactggctcgccgacgcgcgtcggccgaagcgtacgcacgactcccatcgcgctgaagtggcgctgttctggcacggccttgcgtttcgcggcacgtcgttctgcacgcatatcgccgcctatttgctcgaccccacggaatcgcgccatacgctggcggacctgtcgcgccgctacggtctgccgccggtaccggaagccgaggacgtttacggcaagggcgcgaagttcaaggttcccgatcgcgacacgctggcgcgttacgtcggccgcaaggccgccctagtcgcgcggctcgttccgctgctcgaggcggatttggcggcctgcggcatgcgttcgcttttttacgacctggagctgccgctttcatccgaactcgccgtcatggagacggtcggcgtccgcgtcgacgcggcggcgctcgccgcctacggcgaggaattgcgcgaggcggcggcgaaagtcgagcgggagatttacgagctggccgggacgacgttcaacatcggatcgacgaaacagctcggcgaaattttgttcgataagctggggctgcccgtcgtcaagaaaacgaaaaccggctattccaccgacgcagacgtgctggaggaactggcgccgtaccatccgatcgtcgaaaagattttgcattaccgccaactgacgaaattgcagtcgacctacatcgaggggcttttgaaagaaatccgtccgcaaaccggtaaaatccatacgtattatcagcagacgcaagcggcgacggggcggctgagcagtcagtttcccaatcttcagaacattccgatccgtctcgaagaggggcggaaaatccgcaaggcgttcgttccgtcagaaccgggatggctgatgctcgccgccgactattcgcagatcgaactgcgcgtgctcgcgcacgtttccggcgacgaacggctgaaggaagcgtttcggacaggcatggacatccacacgaagaccgcgatggacgtgttcggcgtttccgaagaccgcgtcgacgcgcgcatgcggcggcaggcgaaggcggtcaatttcggcatcatctacggcatcagcgatttcggactggcgcaaaacctgaacatttcccgcaaggaggcggcggagttcatccggcaatatttcgccgtcttttcgggcgtcaaggcgtaccgcgagcggatcgtcgagcaggcgcgccgcgacggttacgtgacgaccctgctcggtcgcaggcgctatttgccggacatcaacgcgtcgaattacaacctccgctcgttcgcggagcggacggcgatgaatacgccgatccagggcacggccgccgacatcatcaagaccgcgatggtgcgtctgacgcggcggatgcgcgacgtcggactgaagagccgcatgctgctgcaggttcacgacgagctcgtgtttgaagtgccgccggacgagctcgacgcgatgcgggagcttgtgacggacgtcatggagtcggcggtcccgctcgacgtgccgctgaaggtcgacgtcagctggggcgccgactggtacgcggcgaagtgagggaagcgggatcc

SEQ ID NO: 1406 - DNA, 2792 bp, Artificial Sequence
  Description of Artificial Sequence: Synthetic Caldibacillus cellulovorans CompA.2 DNA Polymerase I659R
atgaaatacctgctgccgaccgctgctgctggtctgctgctcctcgctgcccagccggcgatggccatgggcaaactgattctggtcgacggaaacagcgtcgccaaccgggcgttttacgccgtccggctgctcagcacgcgcggcggcctgcacacaaacgcggtgtacggattcgccaacatgttgctcaagctgatcgaggaggaacggccgacgcattttctcgtcgcgttcgacgcgggcaaggcgacgttccgtcatcgcgaatacgaggcctacaaggcgggtcgcctgcagacgccgcccgagctgtccgagcagtttccgtacatccgggagctcgtccgggcgttcggcgtcgcgtccggcgagctggaggaatacgaggcggacgacatgatcggtacgctggcgaaacgggcggaggccgagggcgtcgacacgctggtcgtcaccggcgaccgcgatttgctccagctcgtatcggaccgcgtgaccgtcgcgctgacgcgcaagggcatcacggaaacggagcggtacgacccggcgcgcatccgcgaggaatacggcttcgatcccgaccgcatccgcgacctcaaagggctgatgggcgacgcgtctgacaatcttcccggcgttcccggcgtcggtgagaaaaccgcactgaaactgctcaggcagtacggttcgctggagagcgtcctggaacacgcgtcggaaatcgccggaaagctcggtgaaaatctgcgggcgcacgccgacgccgcccgattgagcaagcggctggcgacgatcgactgcgcggtaccgttgcagtcgggatgggactggctgcgcctcggcgaaccggaccgcgccgcgctcgcctcgctgttgcggcagctcgaattcaagtcgctgttgaaacggctcggactcgacggcacgtccgccgatgccgacgtcgacggcgtccgttcctccgcgcggccggcggacgagaaacggccgagggccgtcgccgtcgctgaggagggcgtcgacgtccgctgtccggatcgcccggaagaagtcgaagaagcgctgtcgcggctggaagccgcccagtcggtcgtcgtcgaggtgacgggcgacaacccgcacgacggcgaagtgcgcggcgtcgcatggtgggacggacatacggcgtatttcattccgtttgaacggctggtgcagtccgacatgcggccgctggccgactggctcgccgacgcgcgtcggccgaagcgtacgcacgactcccatcgcgctgaagtggcgctgttctggcacggccttgcgtttcgcggcacgtcgttctgcacgcatatcgccgcctatttgctcgaccccacggaatcgcgccatacgctggcggacctgtcgcgccgctacggtctgccgccggtaccggaagccgaggacgtttacggcaagggcgcgaagttcaaggttcccgatcgcgacacgctggcgcgttacgtcggccgcaaggccgccctagtcgcgcggctcgttccgctgctcgaggcggatttggcggcctgcggcatgcgttcgcttttttacgacctggagctgccgctttcatccgaactcgccgtcatggagacggtcggcgtccgcgtcgacgcggcggcgctcgccgcctacggcgaggaattgcgcgaggcggcggcgaaagtcgagcgggagatttacgagctggccgggacgacgttcaacatcggatcgacgaaacagctcggcgaaattttgttcgataagctggggctgcccgtcgtcaagaaaacgaaaaccggctattccaccgacgcagacgtgctggaggaactggcgccgtaccatccgatcgtcgaaaagattttgcattaccgccaactgacgaaattgcagtcgacctacatcgaggggcttttgaaagaaatccgtccgcaaaccggtaaaatccatacgtattatcagcagacgcgtgcggcgacggggcggctgagcagtcagtttcccaatcttcagaacattccgatccgtctcgaagaggggcggaaaatccgcaaggcgttcgttccgtcagaaccgggatggctgatgctcgccgccgactattcgcagatcgaactgcgcgtgctcgcgcacgtttccggcgacgaacggctgaaggaagcgtttcggacaggcatggacatccacacgaagaccgcgatggacgtgttcggcgtttccgaagaccgcgtcgacgcgcgcatgcggcggcaggcgaaggcggtcaatttcggcatcatctacggcatcagcgatttcggactggcgcaaaacctgaacatttcccgcaaggaggcggcggagttcatccggcaatatttcgccgtcttttcgggcgtcaaggcgtaccgcgagcggatcgtcgagcaggcgcgccgcgacggttacgtgacgaccctgctcggtcgcaggcgctatttgccggacatcaacgcgtcgaattacaacctccgctcgttcgcggagcggacggcgatgaatacgccgatccagggcacggccgccgacatcatcaagaccgcgatggtgcgtctgacgcggcggatgcgcgacgtcggactgaagagccgcatgctgctgcaggttcacgacgagctcgtgtttgaagtgccgccggacgagctcgacgcgatgcgggagcttgtgacggacgtcatggagtcggcggtcccgctcgacgtgccgctgaaggtcgacgtcagctggggcgccgactggtacgcggcgaagtgagggaagcgggatcc

SEQ ID NO: 1407 - DNA, 2792 bp, Artificial Sequence
  Description of Artificial Sequence: Synthetic Caldibacillus cellulovorans CompA.2 DNA Polymerase I659S
atgaaatacctgctgccgaccgctgctgctggtctgctgctcctcgctgcccagccggcgatggccatgggcaaactgattctggtcgacggaaacagcgtcgccaaccgggcgttttacgccgtccggctgctcagcacgcgcggcggcctgcacacaaacgcggtgtacggattcgccaacatgttgctcaagctgatcgaggaggaacggccgacgcattttctcgtcgcgttcgacgcgggcaaggcgacgttccgtcatcgcgaatacgaggcctacaaggcgggtcgcctgcagacgccgcccgagctgtccgagcagtttccgtacatccgggagctcgtccgggcgttcggcgtcgcgtccggcgagctggaggaatacgaggcggacgacatgatcggtacgctggcgaaacgggcggaggccgagggcgtcgacacgctggtcgtcaccggcgaccgcgatttgctccagctcgtatcggaccgcgtgaccgtcgcgctgacgcgcaagggcatcacggaaacggagcggtacgacccggcgcgcatccgcgaggaatacggcttcgatcccgaccgcatccgcgacctcaaagggctgatgggcgacgcgtctgacaatcttcccggcgttcccggcgtcggtgagaaaaccgcactgaaactgctcaggcagtacggttcgctggagagcgtcctggaacacgcgtcggaaatcgccggaaagctcggtgaaaatctgcgggcgcacgccgacgccgcccgattgagcaagcggctggcgacgatcgactgcgcggtaccgttgcagtcgggatgggactggctgcgcctcggcgaaccggaccgcgccgcgctcgcctcgctgttgcggcagctcgaattcaagtcgctgttgaaacggctcggactcgacggcacgtccgccgatgccgacgtcgacggcgtccgttcctccgcgcggccggcggacgagaaacggccgagggccgtcgccgtcgctgaggagggcgtcgacgtccgctgtccggatcgcccggaagaagtcgaagaagcgctgtcgcggctggaagccgcccagtcggtcgtcgtcgaggtgacgggcgacaacccgcacgacggcgaagtgcgcggcgtcgcatggtgggacggacatacggcgtatttcattccgtttgaacggctggtgcagtccgacatgcggccgctggccgactggctcgccgacgcgcgtcggccgaagcgtacgcacgactcccatcgcgctgaagtggcgctgttctggcacggccttgcgtttcgcggcacgtcgttctgcacgcatatcgccgcctatttgctcgaccccacggaatcgcgccatacgctggcggacctgtcgcgccgctacggtctgccgccggtaccggaagccgaggacgtttacggcaagggcgcgaagttcaaggttcccgatcgcgacacgctggcgcgttacgtcggccgcaaggccgccctagtcgcgcggctcgttccgctgctcgaggcggatttggcggcctgcggcatgcgttcgcttttttacgacctggagctgccgctttcatccgaactcgccgtcatggagacggtcggcgtccgcgtcgacgcggcggcgctcgccgcctacggcgaggaattgcgcgaggcggcggcgaaagtcgagcgggagatttacgagctggccgggacgacgttcaacatcggatcgacgaaacagctcggcgaaattttgttcgataagctggggctgcccgtcgtcaagaaaacgaaaaccggctattccaccgacgcagacgtgctggaggaactggcgccgtaccatccgatcgtcgaaaagattttgcattaccgccaactgacgaaattgcagtcgacctacatcgaggggcttttgaaagaaatccgtccgcaaaccggtaaaatccatacgtattatcagcagacgtctgcggcgacggggcggctgagcagtcagtttcccaatcttcagaacattccgatccgtctcgaagaggggcggaaaatccgcaaggcgttcgttccgtcagaaccgggatggctgatgctcgccgccgactattcgcagatcgaactgcgcgtgctcgcgcacgtttccggcgacgaacggctgaaggaagcgtttcggacaggcatggacatccacacgaagaccgcgatggacgtgttcggcgtttccgaagaccgcgtcgacgcgcgcatgcggcggcaggcgaaggcggtcaatttcggcatcatctacggcatcagcgatttcggactggcgcaaaacctgaacatttcccgcaaggaggcggcggagttcatccggcaatatttcgccgtcttttcgggcgtcaaggcgtaccgcgagcggatcgtcgagcaggcgcgccgcgacggttacgtgacgaccctgctcggtcgcaggcgctatttgccggacatcaacgcgtcgaattacaacctccgctcgttcgcggagcggacggcgatgaatacgccgatccagggcacggccgccgacatcatcaagaccgcgatggtgcgtctgacgcggcggatgcgcgacgtcggactgaagagccgcatgctgctgcaggttcacgacgagctcgtgtttgaagtgccgccggacgagctcgacgcgatgcgggagcttgtgacggacgtcatggagtcggcggtcccgctcgacgtgccgctgaaggtcgacgtcagctggggcgccgactggtacgcggcgaagtgagggaagcgggatcc

SEQ ID NO: 1408 - DNA, 2792 bp, Artificial Sequence
  Description of Artificial Sequence: Synthetic Caldibacillus cellulovorans CompA.2 DNA Polymerase I659T
atgaaatacctgctgccgaccgctgctgctggtctgctgctcctcgctgcccagccggcgatggccatgggcaaactgattctggtcgacggaaacagcgtcgccaaccgggcgttttacgccgtccggctgctcagcacgcgcggcggcctgcacacaaacgcggtgtacggattcgccaacatgttgctcaagctgatcgaggaggaacggccgacgcattttctcgtcgcgttcgacgcgggcaaggcgacgttccgtcatcgcgaatacgaggcctacaaggcgggtcgcctgcagacgccgcccgagctgtccgagcagtttccgtacatccgggagctcgtccgggcgttcggcgtcgcgtccggcgagctggaggaatacgaggcggacgacatgatcggtacgctggcgaaacgggcggaggccgagggcgtcgacacgctggtcgtcaccggcgaccgcgatttgctccagctcgtatcggaccgcgtgaccgtcgcgctgacgcgcaagggcatcacggaaacggagcggtacgacccggcgcgcatccgcgaggaatacggcttcgatcccgaccgcatccgcgacctcaaagggctgatgggcgacgcgtctgacaatcttcccggcgttcccggcgtcggtgagaaaaccgcactgaaactgctcaggcagtacggttcgctggagagcgtcctggaacacgcgtcggaaatcgccggaaagctcggtgaaaatctgcgggcgcacgccgacgccgcccgattgagcaagcggctggcgacgatcgactgcgcggtaccgttgcagtcgggatgggactggctgcgcctcggcgaaccggaccgcgccgcgctcgcctcgctgttgcggcagctcgaattcaagtcgctgttgaaacggctcggactcgacggcacgtccgccgatgccgacgtcgacggcgtccgttcctccgcgcggccggcggacgagaaacggccgagggccgtcgccgtcgctgaggagggcgtcgacgtccgctgtccggatcgcccggaagaagtcgaagaagcgctgtcgcggctggaagccgcccagtcggtcgtcgtcgaggtgacgggcgacaacccgcacgacggcgaagtgcgcggcgtcgcatggtgggacggacatacggcgtatttcattccgtttgaacggctggtgcagtccgacatgcggccgctggccgactggctcgccgacgcgcgtcggccgaagcgtacgcacgactcccatcgcgctgaagtggcgctgttctggcacggccttgcgtttcgcggcacgtcgttctgcacgcatatcgccgcctatttgctcgaccccacggaatcgcgccatacgctggcggacctgtcgcgccgctacggtctgccgccggtaccggaagccgaggacgtttacggcaagggcgcgaagttcaaggttcccgatcgcgacacgctggcgcgttacgtcggccgcaaggccgccctagtcgcgcggctcgttccgctgctcgaggcggatttggcggcctgcggcatgcgttcgcttttttacgacctggagctgccgctttcatccgaactcgccgtcatggagacggtcggcgtccgcgtcgacgcggcggcgctcgccgcctacggcgaggaattgcgcgaggcggcggcgaaagtcgagcgggagatttacgagctggccgggacgacgttcaacatcggatcgacgaaacagctcggcgaaattttgttcgataagctggggctgcccgtcgtcaagaaaacgaaaaccggctattccaccgacgcagacgtgctggaggaactggcgccgtaccatccgatcgtcgaaaagattttgcattaccgccaactgacgaaattgcagtcgacctacatcgaggggcttttgaaagaaatccgtccgcaaaccggtaaaatccatacgtattatcagcagacgactgcggcgacggggcggctgagcagtcagtttcccaatcttcagaacattccgatccgtctcgaagaggggcggaaaatccgcaaggcgttcgttccgtcagaaccgggatggctgatgctcgccgccgactattcgcagatcgaactgcgcgtgctcgcgcacgtttccggcgacgaacggctgaaggaagcgtttcggacaggcatggacatccacacgaagaccgcgatggacgtgttcggcgtttccgaagaccgcgtcgacgcgcgcatgcggcggcaggcgaaggcggtcaatttcggcatcatctacggcatcagcgatttcggactggcgcaaaacctgaacatttcccgcaaggaggcggcggagttcatccggcaatatttcgccgtcttttcgggcgtcaaggcgtaccgcgagcggatcgtcgagcaggcgcgccgcgacggttacgtgacgaccctgctcggtcgcaggcgctatttgccggacatcaacgcgtcgaattacaacctccgctcgttcgcggagcggacggcgatgaatacgccgatccagggcacggccgccgacatcatcaagaccgcgatggtgcgtctgacgcggcggatgcgcgacgtcggactgaagagccgcatgctgctgcaggttcacgacgagctcgtgtttgaagtgccgccggacgagctcgacgcgatgcgggagcttgtgacggacgtcatggagtcggcggtcccgctcgacgtgccgctgaaggtcgacgtcagctggggcgccgactggtacgcggcgaagtgagggaagcgggatcc

SEQ ID NO: 1409 - DNA, 2792 bp, Artificial Sequence
  Description of Artificial Sequence: Synthetic Caldibacillus cellulovorans CompA.2 DNA Polymerase I659V
atgaaatacctgctgccgaccgctgctgctggtctgctgctcctcgctgcccagccggcgatggccatgggcaaactgattctggtcgacggaaacagcgtcgccaaccgggcgttttacgccgtccggctgctcagcacgcgcggcggcctgcacacaaacgcggtgtacggattcgccaacatgttgctcaagctgatcgaggaggaacggccgacgcattttctcgtcgcgttcgacgcgggcaaggcgacgttccgtcatcgcgaatacgaggcctacaaggcgggtcgcctgcagacgccgcccgagctgtccgagcagtttccgtacatccgggagctcgtccgggcgttcggcgtcgcgtccggcgagctggaggaatacgaggcggacgacatgatcggtacgctggcgaaacgggcggaggccgagggcgtcgacacgctggtcgtcaccggcgaccgcgatttgctccagctcgtatcggaccgcgtgaccgtcgcgctgacgcgcaagggcatcacggaaacggagcggtacgacccggcgcgcatccgcgaggaatacggcttcgatcccgaccgcatccgcgacctcaaagggctgatgggcgacgcgtctgacaatcttcccggcgttcccggcgtcggtgagaaaaccgcactgaaactgctcaggcagtacggttcgctggagagcgtcctggaacacgcgtcggaaatcgccggaaagctcggtgaaaatctgcgggcgcacgccgacgccgcccgattgagcaagcggctggcgacgatcgactgcgcggtaccgttgcagtcgggatgggactggctgcgcctcggcgaaccggaccgcgccgcgctcgcctcgctgttgcggcagctcgaattcaagtcgctgttgaaacggctcggactcgacggcacgtccgccgatgccgacgtcgacggcgtccgttcctccgcgcggccggcggacgagaaacggccgagggccgtcgccgtcgctgaggagggcgtcgacgtccgctgtccggatcgcccggaagaagtcgaagaagcgctgtcgcggctggaagccgcccagtcggtcgtcgtcgaggtgacgggcgacaacccgcacgacggcgaagtgcgcggcgtcgcatggtgggacggacatacggcgtatttcattccgtttgaacggctggtgcagtccgacatgcggccgctggccgactggctcgccgacgcgcgtcggccgaagcgtacgcacgactcccatcgcgctgaagtggcgctgttctggcacggccttgcgtttcgcggcacgtcgttctgcacgcatatcgccgcctatttgctcgaccccacggaatcgcgccatacgctggcggacctgtcgcgccgctacggtctgccgccggtaccggaagccgaggacgtttacggcaagggcgcgaagttcaaggttcccgatcgcgacacgctggcgcgttacgtcggccgcaaggccgccctagtcgcgcggctcgttccgctgctcgaggcggatttggcggcctgcggcatgcgttcgcttttttacgacctggagctgccgctttcatccgaactcgccgtcatggagacggtcggcgtccgcgtcgacgcggcggcgctcgccgcctacggcgaggaattgcgcgaggcggcggcgaaagtcgagcgggagatttacgagctggccgggacgacgttcaacatcggatcgacgaaacagctcggcgaaattttgttcgataagctggggctgcccgtcgtcaagaaaacgaaaaccggctattccaccgacgcagacgtgctggaggaactggcgccgtaccatccgatcgtcgaaaagattttgcattaccgccaactgacgaaattgcagtcgacctacatcgaggggcttttgaaagaaatccgtccgcaaaccggtaaaatccatacgtattatcagcagacggttgcggcgacggggcggctgagcagtcagtttcccaatcttcagaacattccgatccgtctcgaagaggggcggaaaatccgcaaggcgttcgttccgtcagaaccgggatggctgatgctcgccgccgactattcgcagatcgaactgcgcgtgctcgcgcacgtttccggcgacgaacggctgaaggaagcgtttcggacaggcatggacatccacacgaagaccgcgatggacgtgttcggcgtttccgaagaccgcgtcgacgcgcgcatgcggcggcaggcgaaggcggtcaatttcggcatcatctacggcatcagcgatttcggactggcgcaaaacctgaacatttcccgcaaggaggcggcggagttcatccggcaatatttcgccgtcttttcgggcgtcaaggcgtaccgcgagcggatcgtcgagcaggcgcgccgcgacggttacgtgacgaccctgctcggtcgcaggcgctatttgccggacatcaacgcgtcgaattacaacctccgctcgttcgcggagcggacggcgatgaatacgccgatccagggcacggccgccgacatcatcaagaccgcgatggtgcgtctgacgcggcggatgcgcgacgtcggactgaagagccgcatgctgctgcaggttcacgacgagctcgtgtttgaagtgccgccggacgagctcgacgcgatgcgggagcttgtgacggacgtcatggagtcggcggtcccgctcgacgtgccgctgaaggtcgacgtcagctggggcgccgactggtacgcggcgaagtgagggaagcgggatcc

SEQ ID NO: 1410 - DNA, 2792 bp, Artificial Sequence
  Description of Artificial Sequence: Synthetic Caldibacillus cellulovorans CompA.2 DNA Polymerase I659W
atgaaatacctgctgccgaccgctgctgctggtctgctgctcctcgctgcccagccggcgatggccatgggcaaactgattctggtcgacggaaacagcgtcgccaaccgggcgttttacgccgtccggctgctcagcacgcgcggcggcctgcacacaaacgcggtgtacggattcgccaacatgttgctcaagctgatcgaggaggaacggccgacgcattttctcgtcgcgttcgacgcgggcaaggcgacgttccgtcatcgcgaatacgaggcctacaaggcgggtcgcctgcagacgccgcccgagctgtccgagcagtttccgtacatccgggagctcgtccgggcgttcggcgtcgcgtccggcgagctggaggaatacgaggcggacgacatgatcggtacgctggcgaaacgggcggaggccgagggcgtcgacacgctggtcgtcaccggcgaccgcgatttgctccagctcgtatcggaccgcgtgaccgtcgcgctgacgcgcaagggcatcacggaaacggagcggtacgacccggcgcgcatccgcgaggaatacggcttcgatcccgaccgcatccgcgacctcaaagggctgatgggcgacgcgtctgacaatcttcccggcgttcccggcgtcggtgagaaaaccgcactgaaactgctcaggcagtacggttcgctggagagcgtcctggaacacgcgtcggaaatcgccggaaagctcggtgaaaatctgcgggcgcacgccgacgccgcccgattgagcaagcggctggcgacgatcgactgcgcggtaccgttgcagtcgggatgggactggctgcgcctcggcgaaccggaccgcgccgcgctcgcctcgctgttgcggcagctcgaattcaagtcgctgttgaaacggctcggactcgacggcacgtccgccgatgccgacgtcgacggcgtccgttcctccgcgcggccggcggacgagaaacggccgagggccgtcgccgtcgctgaggagggcgtcgacgtccgctgtccggatcgcccggaagaagtcgaagaagcgctgtcgcggctggaagccgcccagtcggtcgtcgtcgaggtgacgggcgacaacccgcacgacggcgaagtgcgcggcgtcgcatggtgggacggacatacggcgtatttcattccgtttgaacggctggtgcagtccgacatgcggccgctggccgactggctcgccgacgcgcgtcggccgaagcgtacgcacgactcccatcgcgctgaagtggcgctgttctggcacggccttgcgtttcgcggcacgtcgttctgcacgcatatcgccgcctatttgctcgaccccacggaatcgcgccatacgctggcggacctgtcgcgccgctacggtctgccgccggtaccggaagccgaggacgtttacggcaagggcgcgaagttcaaggttcccgatcgcgacacgctggcgcgttacgtcggccgcaaggccgccctagtcgcgcggctcgttccgctgctcgaggcggatttggcggcctgcggcatgcgttcgcttttttacgacctggagctgccgctttcatccgaactcgccgtcatggagacggtcggcgtccgcgtcgacgcggcggcgctcgccgcctacggcgaggaattgcgcgaggcggcggcgaaagtcgagcgggagatttacgagctggccgggacgacgttcaacatcggatcgacgaaacagctcggcgaaattttgttcgataagctggggctgcccgtcgtcaagaaaacgaaaaccggctattccaccgacgcagacgtgctggaggaactggcgccgtaccatccgatcgtcgaaaagattttgcattaccgccaactgacgaaattgcagtcgacctacatcgaggggcttttgaaagaaatccgtccgcaaaccggtaaaatccatacgtattatcagcagacgtgggcggcgacggggcggctgagcagtcagtttcccaatcttcagaacattccgatccgtctcgaagaggggcggaaaatccgcaaggcgttcgttccgtcagaaccgggatggctgatgctcgccgccgactattcgcagatcgaactgcgcgtgctcgcgcacgtttccggcgacgaacggctgaaggaagcgtttcggacaggcatggacatccacacgaagaccgcgatggacgtgttcggcgtttccgaagaccgcgtcgacgcgcgcatgcggcggcaggcgaaggcggtcaatttcggcatcatctacggcatcagcgatttcggactggcgcaaaacctgaacatttcccgcaaggaggcggcggagttcatccggcaatatttcgccgtcttttcgggcgtcaaggcgtaccgcgagcggatcgtcgagcaggcgcgccgcgacggttacgtgacgaccctgctcggtcgcaggcgctatttgccggacatcaacgcgtcgaattacaacctccgctcgttcgcggagcggacggcgatgaatacgccgatccagggcacggccgccgacatcatcaagaccgcgatggtgcgtctgacgcggcggatgcgcgacgtcggactgaagagccgcatgctgctgcaggttcacgacgagctcgtgtttgaagtgccgccggacgagctcgacgcgatgcgggagcttgtgacggacgtcatggagtcggcggtcccgctcgacgtgccgctgaaggtcgacgtcagctggggcgccgactggtacgcggcgaagtgagggaagcgggatcc

SEQ ID NO: 1411 - DNA, 2792 bp, Artificial Sequence
  Description of Artificial Sequence: Synthetic Caldibacillus cellulovorans CompA.2 DNA Polymerase I659Y
atgaaatacctgctgccgaccgctgctgctggtctgctgctcctcgctgcccagccggcgatggccatgggcaaactgattctggtcgacggaaacagcgtcgccaaccgggcgttttacgccgtccggctgctcagcacgcgcggcggcctgcacacaaacgcggtgtacggattcgccaacatgttgctcaagctgatcgaggaggaacggccgacgcattttctcgtcgcgttcgacgcgggcaaggcgacgttccgtcatcgcgaatacgaggcctacaaggcgggtcgcctgcagacgccgcccgagctgtccgagcagtttccgtacatccgggagctcgtccgggcgttcggcgtcgcgtccggcgagctggaggaatacgaggcggacgacatgatcggtacgctggcgaaacgggcggaggccgagggcgtcgacacgctggtcgtcaccggcgaccgcgatttgctccagctcgtatcggaccgcgtgaccgtcgcgctgacgcgcaagggcatcacggaaacggagcggtacgacccggcgcgcatccgcgaggaatacggcttcgatcccgaccgcatccgcgacctcaaagggctgatgggcgacgcgtctgacaatcttcccggcgttcccggcgtcggtgagaaaaccgcactgaaactgctcaggcagtacggttcgctggagagcgtcctggaacacgcgtcggaaatcgccggaaagctcggtgaaaatctgcgggcgcacgccgacgccgcccgattgagcaagcggctggcgacgatcgactgcgcggtaccgttgcagtcgggatgggactggctgcgcctcggcgaaccggaccgcgccgcgctcgcctcgctgttgcggcagctcgaattcaagtcgctgttgaaacggctcggactcgacggcacgtccgccgatgccgacgtcgacggcgtccgttcctccgcgcggccggcggacgagaaacggccgagggccgtcgccgtcgctgaggagggcgtcgacgtccgctgtccggatcgcccggaagaagtcgaagaagcgctgtcgcggctggaagccgcccagtcggtcgtcgtcgaggtgacgggcgacaacccgcacgacggcgaagtgcgcggcgtcgcatggtgggacggacatacggcgtatttcattccgtttgaacggctggtgcagtccgacatgcggccgctggccgactggctcgccgacgcgcgtcggccgaagcgtacgcacgactcccatcgcgctgaagtggcgctgttctggcacggccttgcgtttcgcggcacgtcgttctgcacgcatatcgccgcctatttgctcgaccccacggaatcgcgccatacgctggcggacctgtcgcgccgctacggtctgccgccggtaccggaagccgaggacgtttacggcaagggcgcgaagttcaaggttcccgatcgcgacacgctggcgcgttacgtcggccgcaaggccgccctagtcgcgcggctcgttccgctgctcgaggcggatttggcggcctgcggcatgcgttcgcttttttacgacctggagctgccgctttcatccgaactcgccgtcatggagacggtcggcgtccgcgtcgacgcggcggcgctcgccgcctacggcgaggaattgcgcgaggcggcggcgaaagtcgagcgggagatttacgagctggccgggacgacgttcaacatcggatcgacgaaacagctcggcgaaattttgttcgataagctggggctgcccgtcgtcaagaaaacgaaaaccggctattccaccgacgcagacgtgctggaggaactggcgccgtaccatccgatcgtcgaaaagattttgcattaccgccaactgacgaaattgcagtcgacctacatcgaggggcttttgaaagaaatccgtccgcaaaccggtaaaatccatacgtattatcagcagacgtatgcggcgacggggcggctgagcagtcagtttcccaatcttcagaacattccgatccgtctcgaagaggggcggaaaatccgcaaggcgttcgttccgtcagaaccgggatggctgatgctcgccgccgactattcgcagatcgaactgcgcgtgctcgcgcacgtttccggcgacgaacggctgaaggaagcgtttcggacaggcatggacatccacacgaagaccgcgatggacgtgttcggcgtttccgaagaccgcgtcgacgcgcgcatgcggcggcaggcgaaggcggtcaatttcggcatcatctacggcatcagcgatttcggactggcgcaaaacctgaacatttcccgcaaggaggcggcggagttcatccggcaatatttcgccgtcttttcgggcgtcaaggcgtaccgcgagcggatcgtcgagcaggcgcgccgcgacggttacgtgacgaccctgctcggtcgcaggcgctatttgccggacatcaacgcgtcgaattacaacctccgctcgttcgcggagcggacggcgatgaatacgccgatccagggcacggccgccgacatcatcaagaccgcgatggtgcgtctgacgcggcggatgcgcgacgtcggactgaagagccgcatgctgctgcaggttcacgacgagctcgtgtttgaagtgccgccggacgagctcgacgcgatgcgggagcttgtgacggacgtcatggagtcggcggtcccgctcgacgtgccgctgaaggtcgacgtcagctggggcgccgactggtacgcggcgaagtgagggaagcgggatcc

SEQ ID NO: 1412 - DNA, 2792 bp, Artificial Sequence
  Description of Artificial Sequence: Synthetic Caldibacillus cellulovorans CompA.2 DNA Polymerase Q668A
atgaaatacctgctgccgaccgctgctgctggtctgctgctcctcgctgcccagccggcgatggccatgggcaaactgattctggtcgacggaaacagcgtcgccaaccgggcgttttacgccgtccggctgctcagcacgcgcggcggcctgcacacaaacgcggtgtacggattcgccaacatgttgctcaagctgatcgaggaggaacggccgacgcattttctcgtcgcgttcgacgcgggcaaggcgacgttccgtcatcgcgaatacgaggcctacaaggcgggtcgcctgcagacgccgcccgagctgtccgagcagtttccgtacatccgggagctcgtccgggcgttcggcgtcgcgtccggcgagctggaggaatacgaggcggacgacatgatcggtacgctggcgaaacgggcggaggccgagggcgtcgacacgctggtcgtcaccggcgaccgcgatttgctccagctcgtatcggaccgcgtgaccgtcgcgctgacgcgcaagggcatcacggaaacggagcggtacgacccggcgcgcatccgcgaggaatacggcttcgatcccgaccgcatccgcgacctcaaagggctgatgggcgacgcgtctgacaatcttcccggcgttcccggcgtcggtgagaaaaccgcactgaaactgctcaggcagtacggttcgctggagagcgtcctggaacacgcgtcggaaatcgccggaaagctcggtgaaaatctgcgggcgcacgccgacgccgcccgattgagcaagcggctggcgacgatcgactgcgcggtaccgttgcagtcgggatgggactggctgcgcctcggcgaaccggaccgcgccgcgctcgcctcgctgttgcggcagctcgaattcaagtcgctgttgaaacggctcggactcgacggcacgtccgccgatgccgacgtcgacggcgtccgttcctccgcgcggccggcggacgagaaacggccgagggccgtcgccgtcgctgaggagggcgtcgacgtccgctgtccggatcgcccggaagaagtcgaagaagcgctgtcgcggctggaagccgcccagtcggtcgtcgtcgaggtgacgggcgacaacccgcacgacggcgaagtgcgcggcgtcgcatggtgggacggacatacggcgtatttcattccgtttgaacggctggtgcagtccgacatgcggccgctggccgactggctcgccgacgcgcgtcggccgaagcgtacgcacgactcccatcgcgctgaagtggcgctgttctggcacggccttgcgtttcgcggcacgtcgttctgcacgcatatcgccgcctatttgctcgaccccacggaatcgcgccatacgctggcggacctgtcgcgccgctacggtctgccgccggtaccggaagccgaggacgtttacggcaagggcgcgaagttcaaggttcccgatcgcgacacgctggcgcgttacgtcggccgcaaggccgccctagtcgcgcggctcgttccgctgctcgaggcggatttggcggcctgcggcatgcgttcgcttttttacgacctggagctgccgctttcatccgaactcgccgtcatggagacggtcggcgtccgcgtcgacgcggcggcgctcgccgcctacggcgaggaattgcgcgaggcggcggcgaaagtcgagcgggagatttacgagctggccgggacgacgttcaacatcggatcgacgaaacagctcggcgaaattttgttcgataagctggggctgcccgtcgtcaagaaaacgaaaaccggctattccaccgacgcagacgtgctggaggaactggcgccgtaccatccgatcgtcgaaaagattttgcattaccgccaactgacgaaattgcagtcgacctacatcgaggggcttttgaaagaaatccgtccgcaaaccggtaaaatccatacgtattatcagcagacgatcgcggcgacggggcggctgagcagtgcttttcccaatcttcagaacattccgatccgtctcgaagaggggcggaaaatccgcaaggcgttcgttccgtcagaaccgggatggctgatgctcgccgccgactattcgcagatcgaactgcgcgtgctcgcgcacgtttccggcgacgaacggctgaaggaagcgtttcggacaggcatggacatccacacgaagaccgcgatggacgtgttcggcgtttccgaagaccgcgtcgacgcgcgcatgcggcggcaggcgaaggcggtcaatttcggcatcatctacggcatcagcgatttcggactggcgcaaaacctgaacatttcccgcaaggaggcggcggagttcatccggcaatatttcgccgtcttttcgggcgtcaaggcgtaccgcgagcggatcgtcgagcaggcgcgccgcgacggttacgtgacgaccctgctcggtcgcaggcgctatttgccggacatcaacgcgtcgaattacaacctccgctcgttcgcggagcggacggcgatgaatacgccgatccagggcacggccgccgacatcatcaagaccgcgatggtgcgtctgacgcggcggatgcgcgacgtcggactgaagagccgcatgctgctgcaggttcacgacgagctcgtgtttgaagtgccgccggacgagctcgacgcgatgcgggagcttgtgacggacgtcatggagtcggcggtcccgctcgacgtgccgctgaaggtcgacgtcagctggggcgccgactggtacgcggcgaagtgagggaagcgggatcc

SEQ ID NO: 1413 - DNA, 2792 bp, Artificial Sequence
  Description of Artificial Sequence: Synthetic Caldibacillus cellulovorans CompA.2 DNA Polymerase Q668C
atgaaatacctgctgccgaccgctgctgctggtctgctgctcctcgctgcccagccggcgatggccatgggcaaactgattctggtcgacggaaacagcgtcgccaaccgggcgttttacgccgtccggctgctcagcacgcgcggcggcctgcacacaaacgcggtgtacggattcgccaacatgttgctcaagctgatcgaggaggaacggccgacgcattttctcgtcgcgttcgacgcgggcaaggcgacgttccgtcatcgcgaatacgaggcctacaaggcgggtcgcctgcagacgccgcccgagctgtccgagcagtttccgtacatccgggagctcgtccgggcgttcggcgtcgcgtccggcgagctggaggaatacgaggcggacgacatgatcggtacgctggcgaaacgggcggaggccgagggcgtcgacacgctggtcgtcaccggcgaccgcgatttgctccagctcgtatcggaccgcgtgaccgtcgcgctgacgcgcaagggcatcacggaaacggagcggtacgacccggcgcgcatccgcgaggaatacggcttcgatcccgaccgcatccgcgacctcaaagggctgatgggcgacgcgtctgacaatcttcccggcgttcccggcgtcggtgagaaaaccgcactgaaactgctcaggcagtacggttcgctggagagcgtcctggaacacgcgtcggaaatcgccggaaagctcggtgaaaatctgcgggcgcacgccgacgccgcccgattgagcaagcggctggcgacgatcgactgcgcggtaccgttgcagtcgggatgggactggctgcgcctcggcgaaccggaccgcgccgcgctcgcctcgctgttgcggcagctcgaattcaagtcgctgttgaaacggctcggactcgacggcacgtccgccgatgccgacgtcgacggcgtccgttcctccgcgcggccggcggacgagaaacggccgagggccgtcgccgtcgctgaggagggcgtcgacgtccgctgtccggatcgcccggaagaagtcgaagaagcgctgtcgcggctggaagccgcccagtcggtcgtcgtcgaggtgacgggcgacaacccgcacgacggcgaagtgcgcggcgtcgcatggtgggacggacatacggcgtatttcattccgtttgaacggctggtgcagtccgacatgcggccgctggccgactggctcgccgacgcgcgtcggccgaagcgtacgcacgactcccatcgcgctgaagtggcgctgttctggcacggccttgcgtttcgcggcacgtcgttctgcacgcatatcgccgcctatttgctcgaccccacggaatcgcgccatacgctggcggacctgtcgcgccgctacggtctgccgccggtaccggaagccgaggacgtttacggcaagggcgcgaagttcaaggttcccgatcgcgacacgctggcgcgttacgtcggccgcaaggccgccctagtcgcgcggctcgttccgctgctcgaggcggatttggcggcctgcggcatgcgttcgcttttttacgacctggagctgccgctttcatccgaactcgccgtcatggagacggtcggcgtccgcgtcgacgcggcggcgctcgccgcctacggcgaggaattgcgcgaggcggcggcgaaagtcgagcgggagatttacgagctggccgggacgacgttcaacatcggatcgacgaaacagctcggcgaaattttgttcgataagctggggctgcccgtcgtcaagaaaacgaaaaccggctattccaccgacgcagacgtgctggaggaactggcgccgtaccatccgatcgtcgaaaagattttgcattaccgccaactgacgaaattgcagtcgacctacatcgaggggcttttgaaagaaatccgtccgcaaaccggtaaaatccatacgtattatcagcagacgatcgcggcgacggggcggctgagcagttgttttcccaatcttcagaacattccgatccgtctcgaagaggggcggaaaatccgcaaggcgttcgttccgtcagaaccgggatggctgatgctcgccgccgactattcgcagatcgaactgcgcgtgctcgcgcacgtttccggcgacgaacggctgaaggaagcgtttcggacaggcatggacatccacacgaagaccgcgatggacgtgttcggcgtttccgaagaccgcgtcgacgcgcgcatgcggcggcaggcgaaggcggtcaatttcggcatcatctacggcatcagcgatttcggactggcgcaaaacctgaacatttcccgcaaggaggcggcggagttcatccggcaatatttcgccgtcttttcgggcgtcaaggcgtaccgcgagcggatcgtcgagcaggcgcgccgcgacggttacgtgacgaccctgctcggtcgcaggcgctatttgccggacatcaacgcgtcgaattacaacctccgctcgttcgcggagcggacggcgatgaatacgccgatccagggcacggccgccgacatcatcaagaccgcgatggtgcgtctgacgcggcggatgcgcgacgtcggactgaagagccgcatgctgctgcaggttcacgacgagctcgtgtttgaagtgccgccggacgagctcgacgcgatgcgggagcttgtgacggacgtcatggagtcggcggtcccgctcgacgtgccgctgaaggtcgacgtcagctggggcgccgactggtacgcggcgaagtgagggaagcgggatcc

SEQ ID NO: 1414 - DNA, 2792 bp, Artificial Sequence
  Description of Artificial Sequence: Synthetic Caldibacillus cellulovorans CompA.2 DNA Polymerase Q668D
atgaaatacctgctgccgaccgctgctgctggtctgctgctcctcgctgcccagccggcgatggccatgggcaaactgattctggtcgacggaaacagcgtcgccaaccgggcgttttacgccgtccggctgctcagcacgcgcggcggcctgcacacaaacgcggtgtacggattcgccaacatgttgctcaagctgatcgaggaggaacggccgacgcattttctcgtcgcgttcgacgcgggcaaggcgacgttccgtcatcgcgaatacgaggcctacaaggcgggtcgcctgcagacgccgcccgagctgtccgagcagtttccgtacatccgggagctcgtccgggcgttcggcgtcgcgtccggcgagctggaggaatacgaggcggacgacatgatcggtacgctggcgaaacgggcggaggccgagggcgtcgacacgctggtcgtcaccggcgaccgcgatttgctccagctcgtatcggaccgcgtgaccgtcgcgctgacgcgcaagggcatcacggaaacggagcggtacgacccggcgcgcatccgcgaggaatacggcttcgatcccgaccgcatccgcgacctcaaagggctgatgggcgacgcgtctgacaatcttcccggcgttcccggcgtcggtgagaaaaccgcactgaaactgctcaggcagtacggttcgctggagagcgtcctggaacacgcgtcggaaatcgccggaaagctcggtgaaaatctgcgggcgcacgccgacgccgcccgattgagcaagcggctggcgacgatcgactgcgcggtaccgttgcagtcgggatgggactggctgcgcctcggcgaaccggaccgcgccgcgctcgcctcgctgttgcggcagctcgaattcaagtcgctgttgaaacggctcggactcgacggcacgtccgccgatgccgacgtcgacggcgtccgttcctccgcgcggccggcggacgagaaacggccgagggccgtcgccgtcgctgaggagggcgtcgacgtccgctgtccggatcgcccggaagaagtcgaagaagcgctgtcgcggctggaagccgcccagtcggtcgtcgtcgaggtgacgggcgacaacccgcacgacggcgaagtgcgcggcgtcgcatggtgggacggacatacggcgtatttcattccgtttgaacggctggtgcagtccgacatgcggccgctggccgactggctcgccgacgcgcgtcggccgaagcgtacgcacgactcccatcgcgctgaagtggcgctgttctggcacggccttgcgtttcgcggcacgtcgttctgcacgcatatcgccgcctatttgctcgaccccacggaatcgcgccatacgctggcggacctgtcgcgccgctacggtctgccgccggtaccggaagccgaggacgtttacggcaagggcgcgaagttcaaggttcccgatcgcgacacgctggcgcgttacgtcggccgcaaggccgccctagtcgcgcggctcgttccgctgctcgaggcggatttggcggcctgcggcatgcgttcgcttttttacgacctggagctgccgctttcatccgaactcgccgtcatggagacggtcggcgtccgcgtcgacgcggcggcgctcgccgcctacggcgaggaattgcgcgaggcggcggcgaaagtcgagcgggagatttacgagctggccgggacgacgttcaacatcggatcgacgaaacagctcggcgaaattttgttcgataagctggggctgcccgtcgtcaagaaaacgaaaaccggctattccaccgacgcagacgtgctggaggaactggcgccgtaccatccgatcgtcgaaaagattttgcattaccgccaactgacgaaattgcagtcgacctacatcgaggggcttttgaaagaaatccgtccgcaaaccggtaaaatccatacgtattatcagcagacgatcgcggcgacggggcggctgagcagtgattttcccaatcttcagaacattccgatccgtctcgaagaggggcggaaaatccgcaaggcgttcgttccgtcagaaccgggatggctgatgctcgccgccgactattcgcagatcgaactgcgcgtgctcgcgcacgtttccggcgacgaacggctgaaggaagcgtttcggacaggcatggacatccacacgaagaccgcgatggacgtgttcggcgtttccgaagaccgcgtcgacgcgcgcatgcggcggcaggcgaaggcggtcaatttcggcatcatctacggcatcagcgatttcggactggcgcaaaacctgaacatttcccgcaaggaggcggcggagttcatccggcaatatttcgccgtcttttcgggcgtcaaggcgtaccgcgagcggatcgtcgagcaggcgcgccgcgacggttacgtgacgaccctgctcggtcgcaggcgctatttgccggacatcaacgcgtcgaattacaacctccgctcgttcgcggagcggacggcgatgaatacgccgatccagggcacggccgccgacatcatcaagaccgcgatggtgcgtctgacgcggcggatgcgcgacgtcggactgaagagccgcatgctgctgcaggttcacgacgagctcgtgtttgaagtgccgccggacgagctcgacgcgatgcgggagcttgtgacggacgtcatggagtcggcggtcccgctcgacgtgccgctgaaggtcgacgtcagctggggcgccgactggtacgcggcgaagtgagggaagcgggatcc

SEQ ID NO: 1415 - DNA, 2792 bp, Artificial Sequence
  Description of Artificial Sequence: Synthetic Caldibacillus cellulovorans CompA.2 DNA Polymerase Q668F
atgaaatacctgctgccgaccgctgctgctggtctgctgctcctcgctgcccagccggcgatggccatgggcaaactgattctggtcgacggaaacagcgtcgccaaccgggcgttttacgccgtccggctgctcagcacgcgcggcggcctgcacacaaacgcggtgtacggattcgccaacatgttgctcaagctgatcgaggaggaacggccgacgcattttctcgtcgcgttcgacgcgggcaaggcgacgttccgtcatcgcgaatacgaggcctacaaggcgggtcgcctgcagacgccgcccgagctgtccgagcagtttccgtacatccgggagctcgtccgggcgttcggcgtcgcgtccggcgagctggaggaatacgaggcggacgacatgatcggtacgctggcgaaacgggcggaggccgagggcgtcgacacgctggtcgtcaccggcgaccgcgatttgctccagctcgtatcggaccgcgtgaccgtcgcgctgacgcgcaagggcatcacggaaacggagcggtacgacccggcgcgcatccgcgaggaatacggcttcgatcccgaccgcatccgcgacctcaaagggctgatgggcgacgcgtctgacaatcttcccggcgttcccggcgtcggtgagaaaaccgcactgaaactgctcaggcagtacggttcgctggagagcgtcctggaacacgcgtcggaaatcgccggaaagctcggtgaaaatctgcgggcgcacgccgacgccgcccgattgagcaagcggctggcgacgatcgactgcgcggtaccgttgcagtcgggatgggactggctgcgcctcggcgaaccggaccgcgccgcgctcgcctcgctgttgcggcagctcgaattcaagtcgctgttgaaacggctcggactcgacggcacgtccgccgatgccgacgtcgacggcgtccgttcctccgcgcggccggcggacgagaaacggccgagggccgtcgccgtcgctgaggagggcgtcgacgtccgctgtccggatcgcccggaagaagtcgaagaagcgctgtcgcggctggaagccgcccagtcggtcgtcgtcgaggtgacgggcgacaacccgcacgacggcgaagtgcgcggcgtcgcatggtgggacggacatacggcgtatttcattccgtttgaacggctggtgcagtccgacatgcggccgctggccgactggctcgccgacgcgcgtcggccgaagcgtacgcacgactcccatcgcgctgaagtggcgctgttctggcacggccttgcgtttcgcggcacgtcgttctgcacgcatatcgccgcctatttgctcgaccccacggaatcgcgccatacgctggcggacctgtcgcgccgctacggtctgccgccggtaccggaagccgaggacgtttacggcaagggcgcgaagttcaaggttcccgatcgcgacacgctggcgcgttacgtcggccgcaaggccgccctagtcgcgcggctcgttccgctgctcgaggcggatttggcggcctgcggcatgcgttcgcttttttacgacctggagctgccgctttcatccgaactcgccgtcatggagacggtcggcgtccgcgtcgacgcggcggcgctcgccgcctacggcgaggaattgcgcgaggcggcggcgaaagtcgagcgggagatttacgagctggccgggacgacgttcaacatcggatcgacgaaacagctcggcgaaattttgttcgataagctggggctgcccgtcgtcaagaaaacgaaaaccggctattccaccgacgcagacgtgctggaggaactggcgccgtaccatccgatcgtcgaaaagattttgcattaccgccaactgacgaaattgcagtcgacctacatcgaggggcttttgaaagaaatccgtccgcaaaccggtaaaatccatacgtattatcagcagacgatcgcggcgacggggcggctgagcagtttttttcccaatcttcagaacattccgatccgtctcgaagaggggcggaaaatccgcaaggcgttcgttccgtcagaaccgggatggctgatgctcgccgccgactattcgcagatcgaactgcgcgtgctcgcgcacgtttccggcgacgaacggctgaaggaagcgtttcggacaggcatggacatccacacgaagaccgcgatggacgtgttcggcgtttccgaagaccgcgtcgacgcgcgcatgcggcggcaggcgaaggcggtcaatttcggcatcatctacggcatcagcgatttcggactggcgcaaaacctgaacatttcccgcaaggaggcggcggagttcatccggcaatatttcgccgtcttttcgggcgtcaaggcgtaccgcgagcggatcgtcgagcaggcgcgccgcgacggttacgtgacgaccctgctcggtcgcaggcgctatttgccggacatcaacgcgtcgaattacaacctccgctcgttcgcggagcggacggcgatgaatacgccgatccagggcacggccgccgacatcatcaagaccgcgatggtgcgtctgacgcggcggatgcgcgacgtcggactgaagagccgcatgctgctgcaggttcacgacgagctcgtgtttgaagtgccgccggacgagctcgacgcgatgcgggagcttgtgacggacgtcatggagtcggcggtcccgctcgacgtgccgctgaaggtcgacgtcagctggggcgccgactggtacgcggcgaagtgagggaagcgggatcc

SEQ ID NO: 1416 - DNA, 2792 bp, Artificial Sequence
  Description of Artificial Sequence: Synthetic Caldibacillus cellulovorans CompA.2 DNA Polymerase Q668G
atgaaatacctgctgccgaccgctgctgctggtctgctgctcctcgctgcccagccggcgatggccatgggcaaactgattctggtcgacggaaacagcgtcgccaaccgggcgttttacgccgtccggctgctcagcacgcgcggcggcctgcacacaaacgcggtgtacggattcgccaacatgttgctcaagctgatcgaggaggaacggccgacgcattttctcgtcgcgttcgacgcgggcaaggcgacgttccgtcatcgcgaatacgaggcctacaaggcgggtcgcctgcagacgccgcccgagctgtccgagcagtttccgtacatccgggagctcgtccgggcgttcggcgtcgcgtccggcgagctggaggaatacgaggcggacgacatgatcggtacgctggcgaaacgggcggaggccgagggcgtcgacacgctggtcgtcaccggcgaccgcgatttgctccagctcgtatcggaccgcgtgaccgtcgcgctgacgcgcaagggcatcacggaaacggagcggtacgacccggcgcgcatccgcgaggaatacggcttcgatcccgaccgcatccgcgacctcaaagggctgatgggcgacgcgtctgacaatcttcccggcgttcccggcgtcggtgagaaaaccgcactgaaactgctcaggcagtacggttcgctggagagcgtcctggaacacgcgtcggaaatcgccggaaagctcggtgaaaatctgcgggcgcacgccgacgccgcccgattgagcaagcggctggcgacgatcgactgcgcggtaccgttgcagtcgggatgggactggctgcgcctcggcgaaccggaccgcgccgcgctcgcctcgctgttgcggcagctcgaattcaagtcgctgttgaaacggctcggactcgacggcacgtccgccgatgccgacgtcgacggcgtccgttcctccgcgcggccggcggacgagaaacggccgagggccgtcgccgtcgctgaggagggcgtcgacgtccgctgtccggatcgcccggaagaagtcgaagaagcgctgtcgcggctggaagccgcccagtcggtcgtcgtcgaggtgacgggcgacaacccgcacgacggcgaagtgcgcggcgtcgcatggtgggacggacatacggcgtatttcattccgtttgaacggctggtgcagtccgacatgcggccgctggccgactggctcgccgacgcgcgtcggccgaagcgtacgcacgactcccatcgcgctgaagtggcgctgttctggcacggccttgcgtttcgcggcacgtcgttctgcacgcatatcgccgcctatttgctcgaccccacggaatcgcgccatacgctggcggacctgtcgcgccgctacggtctgccgccggtaccggaagccgaggacgtttacggcaagggcgcgaagttcaaggttcccgatcgcgacacgctggcgcgttacgtcggccgcaaggccgccctagtcgcgcggctcgttccgctgctcgaggcggatttggcggcctgcggcatgcgttcgcttttttacgacctggagctgccgctttcatccgaactcgccgtcatggagacggtcggcgtccgcgtcgacgcggcggcgctcgccgcctacggcgaggaattgcgcgaggcggcggcgaaagtcgagcgggagatttacgagctggccgggacgacgttcaacatcggatcgacgaaacagctcggcgaaattttgttcgataagctggggctgcccgtcgtcaagaaaacgaaaaccggctattccaccgacgcagacgtgctggaggaactggcgccgtaccatccgatcgtcgaaaagattttgcattaccgccaactgacgaaattgcagtcgacctacatcgaggggcttttgaaagaaatccgtccgcaaaccggtaaaatccatacgtattatcagcagacgatcgcggcgacggggcggctgagcagtggttttcccaatcttcagaacattccgatccgtctcgaagaggggcggaaaatccgcaaggcgttcgttccgtcagaaccgggatggctgatgctcgccgccgactattcgcagatcgaactgcgcgtgctcgcgcacgtttccggcgacgaacggctgaaggaagcgtttcggacaggcatggacatccacacgaagaccgcgatggacgtgttcggcgtttccgaagaccgcgtcgacgcgcgcatgcggcggcaggcgaaggcggtcaatttcggcatcatctacggcatcagcgatttcggactggcgcaaaacctgaacatttcccgcaaggaggcggcggagttcatccggcaatatttcgccgtcttttcgggcgtcaaggcgtaccgcgagcggatcgtcgagcaggcgcgccgcgacggttacgtgacgaccctgctcggtcgcaggcgctatttgccggacatcaacgcgtcgaattacaacctccgctcgttcgcggagcggacggcgatgaatacgccgatccagggcacggccgccgacatcatcaagaccgcgatggtgcgtctgacgcggcggatgcgcgacgtcggactgaagagccgcatgctgctgcaggttcacgacgagctcgtgtttgaagtgccgccggacgagctcgacgcgatgcgggagcttgtgacggacgtcatggagtcggcggtcccgctcgacgtgccgctgaaggtcgacgtcagctggggcgccgactggtacgcggcgaagtgagggaagcgggatcc

SEQ ID NO: 1417 - DNA, 2792 bp, Artificial Sequence
  Description of Artificial Sequence: Synthetic Caldibacillus cellulovorans CompA.2 DNA Polymerase Q668H
atgaaatacctgctgccgaccgctgctgctggtctgctgctcctcgctgcccagccggcgatggccatgggcaaactgattctggtcgacggaaacagcgtcgccaaccgggcgttttacgccgtccggctgctcagcacgcgcggcggcctgcacacaaacgcggtgtacggattcgccaacatgttgctcaagctgatcgaggaggaacggccgacgcattttctcgtcgcgttcgacgcgggcaaggcgacgttccgtcatcgcgaatacgaggcctacaaggcgggtcgcctgcagacgccgcccgagctgtccgagcagtttccgtacatccgggagctcgtccgggcgttcggcgtcgcgtccggcgagctggaggaatacgaggcggacgacatgatcggtacgctggcgaaacgggcggaggccgagggcgtcgacacgctggtcgtcaccggcgaccgcgatttgctccagctcgtatcggaccgcgtgaccgtcgcgctgacgcgcaagggcatcacggaaacggagcggtacgacccggcgcgcatccgcgaggaatacggcttcgatcccgaccgcatccgcgacctcaaagggctgatgggcgacgcgtctgacaatcttcccggcgttcccggcgtcggtgagaaaaccgcactgaaactgctcaggcagtacggttcgctggagagcgtcctggaacacgcgtcggaaatcgccggaaagctcggtgaaaatctgcgggcgcacgccgacgccgcccgattgagcaagcggctggcgacgatcgactgcgcggtaccgttgcagtcgggatgggactggctgcgcctcggcgaaccggaccgcgccgcgctcgcctcgctgttgcggcagctcgaattcaagtcgctgttgaaacggctcggactcgacggcacgtccgccgatgccgacgtcgacggcgtccgttcctccgcgcggccggcggacgagaaacggccgagggccgtcgccgtcgctgaggagggcgtcgacgtccgctgtccggatcgcccggaagaagtcgaagaagcgctgtcgcggctggaagccgcccagtcggtcgtcgtcgaggtgacgggcgacaacccgcacgacggcgaagtgcgcggcgtcgcatggtgggacggacatacggcgtatttcattccgtttgaacggctggtgcagtccgacatgcggccgctggccgactggctcgccgacgcgcgtcggccgaagcgtacgcacgactcccatcgcgctgaagtggcgctgttctggcacggccttgcgtttcgcggcacgtcgttctgcacgcatatcgccgcctatttgctcgaccccacggaatcgcgccatacgctggcggacctgtcgcgccgctacggtctgccgccggtaccggaagccgaggacgtttacggcaagggcgcgaagttcaaggttcccgatcgcgacacgctggcgcgttacgtcggccgcaaggccgccctagtcgcgcggctcgttccgctgctcgaggcggatttggcggcctgcggcatgcgttcgcttttttacgacctggagctgccgctttcatccgaactcgccgtcatggagacggtcggcgtccgcgtcgacgcggcggcgctcgccgcctacggcgaggaattgcgcgaggcggcggcgaaagtcgagcgggagatttacgagctggccgggacgacgttcaacatcggatcgacgaaacagctcggcgaaattttgttcgataagctggggctgcccgtcgtcaagaaaacgaaaaccggctattccaccgacgcagacgtgctggaggaactggcgccgtaccatccgatcgtcgaaaagattttgcattaccgccaactgacgaaattgcagtcgacctacatcgaggggcttttgaaagaaatccgtccgcaaaccggtaaaatccatacgtattatcagcagacgatcgcggcgacggggcggctgagcagtcattttcccaatcttcagaacattccgatccgtctcgaagaggggcggaaaatccgcaaggcgttcgttccgtcagaaccgggatggctgatgctcgccgccgactattcgcagatcgaactgcgcgtgctcgcgcacgtttccggcgacgaacggctgaaggaagcgtttcggacaggcatggacatccacacgaagaccgcgatggacgtgttcggcgtttccgaagaccgcgtcgacgcgcgcatgcggcggcaggcgaaggcggtcaatttcggcatcatctacggcatcagcgatttcggactggcgcaaaacctgaacatttcccgcaaggaggcggcggagttcatccggcaatatttcgccgtcttttcgggcgtcaaggcgtaccgcgagcggatcgtcgagcaggcgcgccgcgacggttacgtgacgaccctgctcggtcgcaggcgctatttgccggacatcaacgcgtcgaattacaacctccgctcgttcgcggagcggacggcgatgaatacgccgatccagggcacggccgccgacatcatcaagaccgcgatggtgcgtctgacgcggcggatgcgcgacgtcggactgaagagccgcatgctgctgcaggttcacgacgagctcgtgtttgaagtgccgccggacgagctcgacgcgatgcgggagcttgtgacggacgtcatggagtcggcggtcccgctcgacgtgccgctgaaggtcgacgtcagctggggcgccgactggtacgcggcgaagtgagggaagcgggatcc

SEQ ID NO: 1418 - DNA, 2792 bp, Artificial Sequence
  Description of Artificial Sequence: Synthetic Caldibacillus cellulovorans CompA.2 DNA Polymerase Q668I
atgaaatacctgctgccgaccgctgctgctggtctgctgctcctcgctgcccagccggcgatggccatgggcaaactgattctggtcgacggaaacagcgtcgccaaccgggcgttttacgccgtccggctgctcagcacgcgcggcggcctgcacacaaacgcggtgtacggattcgccaacatgttgctcaagctgatcgaggaggaacggccgacgcattttctcgtcgcgttcgacgcgggcaaggcgacgttccgtcatcgcgaatacgaggcctacaaggcgggtcgcctgcagacgccgcccgagctgtccgagcagtttccgtacatccgggagctcgtccgggcgttcggcgtcgcgtccggcgagctggaggaatacgaggcggacgacatgatcggtacgctggcgaaacgggcggaggccgagggcgtcgacacgctggtcgtcaccggcgaccgcgatttgctccagctcgtatcggaccgcgtgaccgtcgcgctgacgcgcaagggcatcacggaaacggagcggtacgacccggcgcgcatccgcgaggaatacggcttcgatcccgaccgcatccgcgacctcaaagggctgatgggcgacgcgtctgacaatcttcccggcgttcccggcgtcggtgagaaaaccgcactgaaactgctcaggcagtacggttcgctggagagcgtcctggaacacgcgtcggaaatcgccggaaagctcggtgaaaatctgcgggcgcacgccgacgccgcccgattgagcaagcggctggcgacgatcgactgcgcggtaccgttgcagtcgggatgggactggctgcgcctcggcgaaccggaccgcgccgcgctcgcctcgctgttgcggcagctcgaattcaagtcgctgttgaaacggctcggactcgacggcacgtccgccgatgccgacgtcgacggcgtccgttcctccgcgcggccggcggacgagaaacggccgagggccgtcgccgtcgctgaggagggcgtcgacgtccgctgtccggatcgcccggaagaagtcgaagaagcgctgtcgcggctggaagccgcccagtcggtcgtcgtcgaggtgacgggcgacaacccgcacgacggcgaagtgcgcggcgtcgcatggtgggacggacatacggcgtatttcattccgtttgaacggctggtgcagtccgacatgcggccgctggccgactggctcgccgacgcgcgtcggccgaagcgtacgcacgactcccatcgcgctgaagtggcgctgttctggcacggccttgcgtttcgcggcacgtcgttctgcacgcatatcgccgcctatttgctcgaccccacggaatcgcgccatacgctggcggacctgtcgcgccgctacggtctgccgccggtaccggaagccgaggacgtttacggcaagggcgcgaagttcaaggttcccgatcgcgacacgctggcgcgttacgtcggccgcaaggccgccctagtcgcgcggctcgttccgctgctcgaggcggatttggcggcctgcggcatgcgttcgcttttttacgacctggagctgccgctttcatccgaactcgccgtcatggagacggtcggcgtccgcgtcgacgcggcggcgctcgccgcctacggcgaggaattgcgcgaggcggcggcgaaagtcgagcgggagatttacgagctggccgggacgacgttcaacatcggatcgacgaaacagctcggcgaaattttgttcgataagctggggctgcccgtcgtcaagaaaacgaaaaccggctattccaccgacgcagacgtgctggaggaactggcgccgtaccatccgatcgtcgaaaagattttgcattaccgccaactgacgaaattgcagtcgacctacatcgaggggcttttgaaagaaatccgtccgcaaaccggtaaaatccatacgtattatcagcagacgatcgcggcgacggggcggctgagcagtatttttcccaatcttcagaacattccgatccgtctcgaagaggggcggaaaatccgcaaggcgttcgttccgtcagaaccgggatggctgatgctcgccgccgactattcgcagatcgaactgcgcgtgctcgcgcacgtttccggcgacgaacggctgaaggaagcgtttcggacaggcatggacatccacacgaagaccgcgatggacgtgttcggcgtttccgaagaccgcgtcgacgcgcgcatgcggcggcaggcgaaggcggtcaatttcggcatcatctacggcatcagcgatttcggactggcgcaaaacctgaacatttcccgcaaggaggcggcggagttcatccggcaatatttcgccgtcttttcgggcgtcaaggcgtaccgcgagcggatcgtcgagcaggcgcgccgcgacggttacgtgacgaccctgctcggtcgcaggcgctatttgccggacatcaacgcgtcgaattacaacctccgctcgttcgcggagcggacggcgatgaatacgccgatccagggcacggccgccgacatcatcaagaccgcgatggtgcgtctgacgcggcggatgcgcgacgtcggactgaagagccgcatgctgctgcaggttcacgacgagctcgtgtttgaagtgccgccggacgagctcgacgcgatgcgggagcttgtgacggacgtcatggagtcggcggtcccgctcgacgtgccgctgaaggtcgacgtcagctggggcgccgactggtacgcggcgaagtgagggaagcgggatcc

SEQ ID NO: 1419 - DNA, 2792 bp, Artificial Sequence
  Description of Artificial Sequence: Synthetic Caldibacillus cellulovorans CompA.2 DNA Polymerase Q668L
atgaaatacctgctgccgaccgctgctgctggtctgctgctcctcgctgcccagccggcgatggccatgggcaaactgattctggtcgacggaaacagcgtcgccaaccgggcgttttacgccgtccggctgctcagcacgcgcggcggcctgcacacaaacgcggtgtacggattcgccaacatgttgctcaagctgatcgaggaggaacggccgacgcattttctcgtcgcgttcgacgcgggcaaggcgacgttccgtcatcgcgaatacgaggcctacaaggcgggtcgcctgcagacgccgcccgagctgtccgagcagtttccgtacatccgggagctcgtccgggcgttcggcgtcgcgtccggcgagctggaggaatacgaggcggacgacatgatcggtacgctggcgaaacgggcggaggccgagggcgtcgacacgctggtcgtcaccggcgaccgcgatttgctccagctcgtatcggaccgcgtgaccgtcgcgctgacgcgcaagggcatcacggaaacggagcggtacgacccggcgcgcatccgcgaggaatacggcttcgatcccgaccgcatccgcgacctcaaagggctgatgggcgacgcgtctgacaatcttcccggcgttcccggcgtcggtgagaaaaccgcactgaaactgctcaggcagtacggttcgctggagagcgtcctggaacacgcgtcggaaatcgccggaaagctcggtgaaaatctgcgggcgcacgccgacgccgcccgattgagcaagcggctggcgacgatcgactgcgcggtaccgttgcagtcgggatgggactggctgcgcctcggcgaaccggaccgcgccgcgctcgcctcgctgttgcggcagctcgaattcaagtcgctgttgaaacggctcggactcgacggcacgtccgccgatgccgacgtcgacggcgtccgttcctccgcgcggccggcggacgagaaacggccgagggccgtcgccgtcgctgaggagggcgtcgacgtccgctgtccggatcgcccggaagaagtcgaagaagcgctgtcgcggctggaagccgcccagtcggtcgtcgtcgaggtgacgggcgacaacccgcacgacggcgaagtgcgcggcgtcgcatggtgggacggacatacggcgtatttcattccgtttgaacggctggtgcagtccgacatgcggccgctggccgactggctcgccgacgcgcgtcggccgaagcgtacgcacgactcccatcgcgctgaagtggcgctgttctggcacggccttgcgtttcgcggcacgtcgttctgcacgcatatcgccgcctatttgctcgaccccacggaatcgcgccatacgctggcggacctgtcgcgccgctacggtctgccgccggtaccggaagccgaggacgtttacggcaagggcgcgaagttcaaggttcccgatcgcgacacgctggcgcgttacgtcggccgcaaggccgccctagtcgcgcggctcgttccgctgctcgaggcggatttggcggcctgcggcatgcgttcgcttttttacgacctggagctgccgctttcatccgaactcgccgtcatggagacggtcggcgtccgcgtcgacgcggcggcgctcgccgcctacggcgaggaattgcgcgaggcggcggcgaaagtcgagcgggagatttacgagctggccgggacgacgttcaacatcggatcgacgaaacagctcggcgaaattttgttcgataagctggggctgcccgtcgtcaagaaaacgaaaaccggctattccaccgacgcagacgtgctggaggaactggcgccgtaccatccgatcgtcgaaaagattttgcattaccgccaactgacgaaattgcagtcgacctacatcgaggggcttttgaaagaaatccgtccgcaaaccggtaaaatccatacgtattatcagcagacgatcgcggcgacggggcggctgagcagtctttttcccaatcttcagaacattccgatccgtctcgaagaggggcggaaaatccgcaaggcgttcgttccgtcagaaccgggatggctgatgctcgccgccgactattcgcagatcgaactgcgcgtgctcgcgcacgtttccggcgacgaacggctgaaggaagcgtttcggacaggcatggacatccacacgaagaccgcgatggacgtgttcggcgtttccgaagaccgcgtcgacgcgcgcatgcggcggcaggcgaaggcggtcaatttcggcatcatctacggcatcagcgatttcggactggcgcaaaacctgaacatttcccgcaaggaggcggcggagttcatccggcaatatttcgccgtcttttcgggcgtcaaggcgtaccgcgagcggatcgtcgagcaggcgcgccgcgacggttacgtgacgaccctgctcggtcgcaggcgctatttgccggacatcaacgcgtcgaattacaacctccgctcgttcgcggagcggacggcgatgaatacgccgatccagggcacggccgccgacatcatcaagaccgcgatggtgcgtctgacgcggcggatgcgcgacgtcggactgaagagccgcatgctgctgcaggttcacgacgagctcgtgtttgaagtgccgccggacgagctcgacgcgatgcgggagcttgtgacggacgtcatggagtcggcggtcccgctcgacgtgccgctgaaggtcgacgtcagctggggcgccgactggtacgcggcgaagtgagggaagcgggatcc

SEQ ID NO: 1420 - DNA, 2792 bp, Artificial Sequence
  Description of Artificial Sequence: Synthetic Caldibacillus cellulovorans CompA.2 DNA Polymerase Q668M
atgaaatacctgctgccgaccgctgctgctggtctgctgctcctcgctgcccagccggcgatggccatgggcaaactgattctggtcgacggaaacagcgtcgccaaccgggcgttttacgccgtccggctgctcagcacgcgcggcggcctgcacacaaacgcggtgtacggattcgccaacatgttgctcaagctgatcgaggaggaacggccgacgcattttctcgtcgcgttcgacgcgggcaaggcgacgttccgtcatcgcgaatacgaggcctacaaggcgggtcgcctgcagacgccgcccgagctgtccgagcagtttccgtacatccgggagctcgtccgggcgttcggcgtcgcgtccggcgagctggaggaatacgaggcggacgacatgatcggtacgctggcgaaacgggcggaggccgagggcgtcgacacgctggtcgtcaccggcgaccgcgatttgctccagctcgtatcggaccgcgtgaccgtcgcgctgacgcgcaagggcatcacggaaacggagcggtacgacccggcgcgcatccgcgaggaatacggcttcgatcccgaccgcatccgcgacctcaaagggctgatgggcgacgcgtctgacaatcttcccggcgttcccggcgtcggtgagaaaaccgcactgaaactgctcaggcagtacggttcgctggagagcgtcctggaacacgcgtcggaaatcgccggaaagctcggtgaaaatctgcgggcgcacgccgacgccgcccgattgagcaagcggctggcgacgatcgactgcgcggtaccgttgcagtcgggatgggactggctgcgcctcggcgaaccggaccgcgccgcgctcgcctcgctgttgcggcagctcgaattcaagtcgctgttgaaacggctcggactcgacggcacgtccgccgatgccgacgtcgacggcgtccgttcctccgcgcggccggcggacgagaaacggccgagggccgtcgccgtcgctgaggagggcgtcgacgtccgctgtccggatcgcccggaagaagtcgaagaagcgctgtcgcggctggaagccgcccagtcggtcgtcgtcgaggtgacgggcgacaacccgcacgacggcgaagtgcgcggcgtcgcatggtgggacggacatacggcgtatttcattccgtttgaacggctggtgcagtccgacatgcggccgctggccgactggctcgccgacgcgcgtcggccgaagcgtacgcacgactcccatcgcgctgaagtggcgctgttctggcacggccttgcgtttcgcggcacgtcgttctgcacgcatatcgccgcctatttgctcgaccccacggaatcgcgccatacgctggcggacctgtcgcgccgctacggtctgccgccggtaccggaagccgaggacgtttacggcaagggcgcgaagttcaaggttcccgatcgcgacacgctggcgcgttacgtcggccgcaaggccgccctagtcgcgcggctcgttccgctgctcgaggcggatttggcggcctgcggcatgcgttcgcttttttacgacctggagctgccgctttcatccgaactcgccgtcatggagacggtcggcgtccgcgtcgacgcggcggcgctcgccgcctacggcgaggaattgcgcgaggcggcggcgaaagtcgagcgggagatttacgagctggccgggacgacgttcaacatcggatcgacgaaacagctcggcgaaattttgttcgataagctggggctgcccgtcgtcaagaaaacgaaaaccggctattccaccgacgcagacgtgctggaggaactggcgccgtaccatccgatcgtcgaaaagattttgcattaccgccaactgacgaaattgcagtcgacctacatcgaggggcttttgaaagaaatccgtccgcaaaccggtaaaatccatacgtattatcagcagacgatcgcggcgacggggcggctgagcagtatgtttcccaatcttcagaacattccgatccgtctcgaagaggggcggaaaatccgcaaggcgttcgttccgtcagaaccgggatggctgatgctcgccgccgactattcgcagatcgaactgcgcgtgctcgcgcacgtttccggcgacgaacggctgaaggaagcgtttcggacaggcatggacatccacacgaagaccgcgatggacgtgttcggcgtttccgaagaccgcgtcgacgcgcgcatgcggcggcaggcgaaggcggtcaatttcggcatcatctacggcatcagcgatttcggactggcgcaaaacctgaacatttcccgcaaggaggcggcggagttcatccggcaatatttcgccgtcttttcgggcgtcaaggcgtaccgcgagcggatcgtcgagcaggcgcgccgcgacggttacgtgacgaccctgctcggtcgcaggcgctatttgccggacatcaacgcgtcgaattacaacctccgctcgttcgcggagcggacggcgatgaatacgccgatccagggcacggccgccgacatcatcaagaccgcgatggtgcgtctgacgcggcggatgcgcgacgtcggactgaagagccgcatgctgctgcaggttcacgacgagctcgtgtttgaagtgccgccggacgagctcgacgcgatgcgggagcttgtgacggacgtcatggagtcggcggtcccgctcgacgtgccgctgaaggtcgacgtcagctggggcgccgactggtacgcggcgaagtgagggaagcgggatcc

SEQ ID NO: 1421 - DNA, 2792 bp, Artificial Sequence
  Description of Artificial Sequence: Synthetic Caldibacillus cellulovorans CompA.2 DNA Polymerase Q668N
atgaaatacctgctgccgaccgctgctgctggtctgctgctcctcgctgcccagccggcgatggccatgggcaaactgattctggtcgacggaaacagcgtcgccaaccgggcgttttacgccgtccggctgctcagcacgcgcggcggcctgcacacaaacgcggtgtacggattcgccaacatgttgctcaagctgatcgaggaggaacggccgacgcattttctcgtcgcgttcgacgcgggcaaggcgacgttccgtcatcgcgaatacgaggcctacaaggcgggtcgcctgcagacgccgcccgagctgtccgagcagtttccgtacatccgggagctcgtccgggcgttcggcgtcgcgtccggcgagctggaggaatacgaggcggacgacatgatcggtacgctggcgaaacgggcggaggccgagggcgtcgacacgctggtcgtcaccggcgaccgcgatttgctccagctcgtatcggaccgcgtgaccgtcgcgctgacgcgcaagggcatcacggaaacggagcggtacgacccggcgcgcatccgcgaggaatacggcttcgatcccgaccgcatccgcgacctcaaagggctgatgggcgacgcgtctgacaatcttcccggcgttcccggcgtcggtgagaaaaccgcactgaaactgctcaggcagtacggttcgctggagagcgtcctggaacacgcgtcggaaatcgccggaaagctcggtgaaaatctgcgggcgcacgccgacgccgcccgattgagcaagcggctggcgacgatcgactgcgcggtaccgttgcagtcgggatgggactggctgcgcctcggcgaaccggaccgcgccgcgctcgcctcgctgttgcggcagctcgaattcaagtcgctgttgaaacggctcggactcgacggcacgtccgccgatgccgacgtcgacggcgtccgttcctccgcgcggccggcggacgagaaacggccgagggccgtcgccgtcgctgaggagggcgtcgacgtccgctgtccggatcgcccggaagaagtcgaagaagcgctgtcgcggctggaagccgcccagtcggtcgtcgtcgaggtgacgggcgacaacccgcacgacggcgaagtgcgcggcgtcgcatggtgggacggacatacggcgtatttcattccgtttgaacggctggtgcagtccgacatgcggccgctggccgactggctcgccgacgcgcgtcggccgaagcgtacgcacgactcccatcgcgctgaagtggcgctgttctggcacggccttgcgtttcgcggcacgtcgttctgcacgcatatcgccgcctatttgctcgaccccacggaatcgcgccatacgctggcggacctgtcgcgccgctacggtctgccgccggtaccggaagccgaggacgtttacggcaagggcgcgaagttcaaggttcccgatcgcgacacgctggcgcgttacgtcggccgcaaggccgccctagtcgcgcggctcgttccgctgctcgaggcggatttggcggcctgcggcatgcgttcgcttttttacgacctggagctgccgctttcatccgaactcgccgtcatggagacggtcggcgtccgcgtcgacgcggcggcgctcgccgcctacggcgaggaattgcgcgaggcggcggcgaaagtcgagcgggagatttacgagctggccgggacgacgttcaacatcggatcgacgaaacagctcggcgaaattttgttcgataagctggggctgcccgtcgtcaagaaaacgaaaaccggctattccaccgacgcagacgtgctggaggaactggcgccgtaccatccgatcgtcgaaaagattttgcattaccgccaactgacgaaattgcagtcgacctacatcgaggggcttttgaaagaaatccgtccgcaaaccggtaaaatccatacgtattatcagcagacgatcgcggcgacggggcggctgagcagtaattttcccaatcttcagaacattccgatccgtctcgaagaggggcggaaaatccgcaaggcgttcgttccgtcagaaccgggatggctgatgctcgccgccgactattcgcagatcgaactgcgcgtgctcgcgcacgtttccggcgacgaacggctgaaggaagcgtttcggacaggcatggacatccacacgaagaccgcgatggacgtgttcggcgtttccgaagaccgcgtcgacgcgcgcatgcggcggcaggcgaaggcggtcaatttcggcatcatctacggcatcagcgatttcggactggcgcaaaacctgaacatttcccgcaaggaggcggcggagttcatccggcaatatttcgccgtcttttcgggcgtcaaggcgtaccgcgagcggatcgtcgagcaggcgcgccgcgacggttacgtgacgaccctgctcggtcgcaggcgctatttgccggacatcaacgcgtcgaattacaacctccgctcgttcgcggagcggacggcgatgaatacgccgatccagggcacggccgccgacatcatcaagaccgcgatggtgcgtctgacgcggcggatgcgcgacgtcggactgaagagccgcatgctgctgcaggttcacgacgagctcgtgtttgaagtgccgccggacgagctcgacgcgatgcgggagcttgtgacggacgtcatggagtcggcggtcccgctcgacgtgccgctgaaggtcgacgtcagctggggcgccgactggtacgcggcgaagtgagggaagcgggatcc

SEQ ID NO: 1422 - DNA, 2792 bp, Artificial Sequence
  Description of Artificial Sequence: Synthetic Caldibacillus cellulovorans CompA.2 DNA Polymerase Q668P
atgaaatacctgctgccgaccgctgctgctggtctgctgctcctcgctgcccagccggcgatggccatgggcaaactgattctggtcgacggaaacagcgtcgccaaccgggcgttttacgccgtccggctgctcagcacgcgcggcggcctgcacacaaacgcggtgtacggattcgccaacatgttgctcaagctgatcgaggaggaacggccgacgcattttctcgtcgcgttcgacgcgggcaaggcgacgttccgtcatcgcgaatacgaggcctacaaggcgggtcgcctgcagacgccgcccgagctgtccgagcagtttccgtacatccgggagctcgtccgggcgttcggcgtcgcgtccggcgagctggaggaatacgaggcggacgacatgatcggtacgctggcgaaacgggcggaggccgagggcgtcgacacgctggtcgtcaccggcgaccgcgatttgctccagctcgtatcggaccgcgtgaccgtcgcgctgacgcgcaagggcatcacggaaacggagcggtacgacccggcgcgcatccgcgaggaatacggcttcgatcccgaccgcatccgcgacctcaaagggctgatgggcgacgcgtctgacaatcttcccggcgttcccggcgtcggtgagaaaaccgcactgaaactgctcaggcagtacggttcgctggagagcgtcctggaacacgcgtcggaaatcgccggaaagctcggtgaaaatctgcgggcgcacgccgacgccgcccgattgagcaagcggctggcgacgatcgactgcgcggtaccgttgcagtcgggatgggactggctgcgcctcggcgaaccggaccgcgccgcgctcgcctcgctgttgcggcagctcgaattcaagtcgctgttgaaacggctcggactcgacggcacgtccgccgatgccgacgtcgacggcgtccgttcctccgcgcggccggcggacgagaaacggccgagggccgtcgccgtcgctgaggagggcgtcgacgtccgctgtccggatcgcccggaagaagtcgaagaagcgctgtcgcggctggaagccgcccagtcggtcgtcgtcgaggtgacgggcgacaacccgcacgacggcgaagtgcgcggcgtcgcatggtgggacggacatacggcgtatttcattccgtttgaacggctggtgcagtccgacatgcggccgctggccgactggctcgccgacgcgcgtcggccgaagcgtacgcacgactcccatcgcgctgaagtggcgctgttctggcacggccttgcgtttcgcggcacgtcgttctgcacgcatatcgccgcctatttgctcgaccccacggaatcgcgccatacgctggcggacctgtcgcgccgctacggtctgccgccggtaccggaagccgaggacgtttacggcaagggcgcgaagttcaaggttcccgatcgcgacacgctggcgcgttacgtcggccgcaaggccgccctagtcgcgcggctcgttccgctgctcgaggcggatttggcggcctgcggcatgcgttcgcttttttacgacctggagctgccgctttcatccgaactcgccgtcatggagacggtcggcgtccgcgtcgacgcggcggcgctcgccgcctacggcgaggaattgcgcgaggcggcggcgaaagtcgagcgggagatttacgagctggccgggacgacgttcaacatcggatcgacgaaacagctcggcgaaattttgttcgataagctggggctgcccgtcgtcaagaaaacgaaaaccggctattccaccgacgcagacgtgctggaggaactggcgccgtaccatccgatcgtcgaaaagattttgcattaccgccaactgacgaaattgcagtcgacctacatcgaggggcttttgaaagaaatccgtccgcaaaccggtaaaatccatacgtattatcagcagacgatcgcggcgacggggcggctgagcagtccttttcccaatcttcagaacattccgatccgtctcgaagaggggcggaaaatccgcaaggcgttcgttccgtcagaaccgggatggctgatgctcgccgccgactattcgcagatcgaactgcgcgtgctcgcgcacgtttccggcgacgaacggctgaaggaagcgtttcggacaggcatggacatccacacgaagaccgcgatggacgtgttcggcgtttccgaagaccgcgtcgacgcgcgcatgcggcggcaggcgaaggcggtcaatttcggcatcatctacggcatcagcgatttcggactggcgcaaaacctgaacatttcccgcaaggaggcggcggagttcatccggcaatatttcgccgtcttttcgggcgtcaaggcgtaccgcgagcggatcgtcgagcaggcgcgccgcgacggttacgtgacgaccctgctcggtcgcaggcgctatttgccggacatcaacgcgtcgaattacaacctccgctcgttcgcggagcggacggcgatgaatacgccgatccagggcacggccgccgacatcatcaagaccgcgatggtgcgtctgacgcggcggatgcgcgacgtcggactgaagagccgcatgctgctgcaggttcacgacgagctcgtgtttgaagtgccgccggacgagctcgacgcgatgcgggagcttgtgacggacgtcatggagtcggcggtcccgctcgacgtgccgctgaaggtcgacgtcagctggggcgccgactggtacgcggcgaagtgagggaagcgggatcc

SEQ ID NO: 1423 - DNA, 2792 bp, Artificial Sequence
  Description of Artificial Sequence: Synthetic Caldibacillus cellulovorans CompA.2 DNA Polymerase Q668R
atgaaatacctgctgccgaccgctgctgctggtctgctgctcctcgctgcccagccggcgatggccatgggcaaactgattctggtcgacggaaacagcgtcgccaaccgggcgttttacgccgtccggctgctcagcacgcgcggcggcctgcacacaaacgcggtgtacggattcgccaacatgttgctcaagctgatcgaggaggaacggccgacgcattttctcgtcgcgttcgacgcgggcaaggcgacgttccgtcatcgcgaatacgaggcctacaaggcgggtcgcctgcagacgccgcccgagctgtccgagcagtttccgtacatccgggagctcgtccgggcgttcggcgtcgcgtccggcgagctggaggaatacgaggcggacgacatgatcggtacgctggcgaaacgggcggaggccgagggcgtcgacacgctggtcgtcaccggcgaccgcgatttgctccagctcgtatcggaccgcgtgaccgtcgcgctgacgcgcaagggcatcacggaaacggagcggtacgacccggcgcgcatccgcgaggaatacggcttcgatcccgaccgcatccgcgacctcaaagggctgatgggcgacgcgtctgacaatcttcccggcgttcccggcgtcggtgagaaaaccgcactgaaactgctcaggcagtacggttcgctggagagcgtcctggaacacgcgtcggaaatcgccggaaagctcggtgaaaatctgcgggcgcacgccgacgccgcccgattgagcaagcggctggcgacgatcgactgcgcggtaccgttgcagtcgggatgggactggctgcgcctcggcgaaccggaccgcgccgcgctcgcctcgctgttgcggcagctcgaattcaagtcgctgttgaaacggctcggactcgacggcacgtccgccgatgccgacgtcgacggcgtccgttcctccgcgcggccggcggacgagaaacggccgagggccgtcgccgtcgctgaggagggcgtcgacgtccgctgtccggatcgcccggaagaagtcgaagaagcgctgtcgcggctggaagccgcccagtcggtcgtcgtcgaggtgacgggcgacaacccgcacgacggcgaagtgcgcggcgtcgcatggtgggacggacatacggcgtatttcattccgtttgaacggctggtgcagtccgacatgcggccgctggccgactggctcgccgacgcgcgtcggccgaagcgtacgcacgactcccatcgcgctgaagtggcgctgttctggcacggccttgcgtttcgcggcacgtcgttctgcacgcatatcgccgcctatttgctcgaccccacggaatcgcgccatacgctggcggacctgtcgcgccgctacggtctgccgccggtaccggaagccgaggacgtttacggcaagggcgcgaagttcaaggttcccgatcgcgacacgctggcgcgttacgtcggccgcaaggccgccctagtcgcgcggctcgttccgctgctcgaggcggatttggcggcctgcggcatgcgttcgcttttttacgacctggagctgccgctttcatccgaactcgccgtcatggagacggtcggcgtccgcgtcgacgcggcggcgctcgccgcctacggcgaggaattgcgcgaggcggcggcgaaagtcgagcgggagatttacgagctggccgggacgacgttcaacatcggatcgacgaaacagctcggcgaaattttgttcgataagctggggctgcccgtcgtcaagaaaacgaaaaccggctattccaccgacgcagacgtgctggaggaactggcgccgtaccatccgatcgtcgaaaagattttgcattaccgccaactgacgaaattgcagtcgacctacatcgaggggcttttgaaagaaatccgtccgcaaaccggtaaaatccatacgtattatcagcagacgatcgcggcgacggggcggctgagcagtcgttttcccaatcttcagaacattccgatccgtctcgaagaggggcggaaaatccgcaaggcgttcgttccgtcagaaccgggatggctgatgctcgccgccgactattcgcagatcgaactgcgcgtgctcgcgcacgtttccggcgacgaacggctgaaggaagcgtttcggacaggcatggacatccacacgaagaccgcgatggacgtgttcggcgtttccgaagaccgcgtcgacgcgcgcatgcggcggcaggcgaaggcggtcaatttcggcatcatctacggcatcagcgatttcggactggcgcaaaacctgaacatttcccgcaaggaggcggcggagttcatccggcaatatttcgccgtcttttcgggcgtcaaggcgtaccgcgagcggatcgtcgagcaggcgcgccgcgacggttacgtgacgaccctgctcggtcgcaggcgctatttgccggacatcaacgcgtcgaattacaacctccgctcgttcgcggagcggacggcgatgaatacgccgatccagggcacggccgccgacatcatcaagaccgcgatggtgcgtctgacgcggcggatgcgcgacgtcggactgaagagccgcatgctgctgcaggttcacgacgagctcgtgtttgaagtgccgccggacgagctcgacgcgatgcgggagcttgtgacggacgtcatggagtcggcggtcccgctcgacgtgccgctgaaggtcgacgtcagctggggcgccgactggtacgcggcgaagtgagggaagcgggatcc

SEQ ID NO: 1424 - DNA, 2792 bp, Artificial Sequence
  Description of Artificial Sequence: Synthetic Caldibacillus cellulovorans CompA.2 DNA Polymerase Q668S
atgaaatacctgctgccgaccgctgctgctggtctgctgctcctcgctgcccagccggcgatggccatgggcaaactgattctggtcgacggaaacagcgtcgccaaccgggcgttttacgccgtccggctgctcagcacgcgcggcggcctgcacacaaacgcggtgtacggattcgccaacatgttgctcaagctgatcgaggaggaacggccgacgcattttctcgtcgcgttcgacgcgggcaaggcgacgttccgtcatcgcgaatacgaggcctacaaggcgggtcgcctgcagacgccgcccgagctgtccgagcagtttccgtacatccgggagctcgtccgggcgttcggcgtcgcgtccggcgagctggaggaatacgaggcggacgacatgatcggtacgctggcgaaacgggcggaggccgagggcgtcgacacgctggtcgtcaccggcgaccgcgatttgctccagctcgtatcggaccgcgtgaccgtcgcgctgacgcgcaagggcatcacggaaacggagcggtacgacccggcgcgcatccgcgaggaatacggcttcgatcccgaccgcatccgcgacctcaaagggctgatgggcgacgcgtctgacaatcttcccggcgttcccggcgtcggtgagaaaaccgcactgaaactgctcaggcagtacggttcgctggagagcgtcctggaacacgcgtcggaaatcgccggaaagctcggtgaaaatctgcgggcgcacgccgacgccgcccgattgagcaagcggctggcgacgatcgactgcgcggtaccgttgcagtcgggatgggactggctgcgcctcggcgaaccggaccgcgccgcgctcgcctcgctgttgcggcagctcgaattcaagtcgctgttgaaacggctcggactcgacggcacgtccgccgatgccgacgtcgacggcgtccgttcctccgcgcggccggcggacgagaaacggccgagggccgtcgccgtcgctgaggagggcgtcgacgtccgctgtccggatcgcccggaagaagtcgaagaagcgctgtcgcggctggaagccgcccagtcggtcgtcgtcgaggtgacgggcgacaacccgcacgacggcgaagtgcgcggcgtcgcatggtgggacggacatacggcgtatttcattccgtttgaacggctggtgcagtccgacatgcggccgctggccgactggctcgccgacgcgcgtcggccgaagcgtacgcacgactcccatcgcgctgaagtggcgctgttctggcacggccttgcgtttcgcggcacgtcgttctgcacgcatatcgccgcctatttgctcgaccccacggaatcgcgccatacgctggcggacctgtcgcgccgctacggtctgccgccggtaccggaagccgaggacgtttacggcaagggcgcgaagttcaaggttcccgatcgcgacacgctggcgcgttacgtcggccgcaaggccgccctagtcgcgcggctcgttccgctgctcgaggcggatttggcggcctgcggcatgcgttcgcttttttacgacctggagctgccgctttcatccgaactcgccgtcatggagacggtcggcgtccgcgtcgacgcggcggcgctcgccgcctacggcgaggaattgcgcgaggcggcggcgaaagtcgagcgggagatttacgagctggccgggacgacgttcaacatcggatcgacgaaacagctcggcgaaattttgttcgataagctggggctgcccgtcgtcaagaaaacgaaaaccggctattccaccgacgcagacgtgctggaggaactggcgccgtaccatccgatcgtcgaaaagattttgcattaccgccaactgacgaaattgcagtcgacctacatcgaggggcttttgaaagaaatccgtccgcaaaccggtaaaatccatacgtattatcagcagacgatcgcggcgacggggcggctgagcagttcttttcccaatcttcagaacattccgatccgtctcgaagaggggcggaaaatccgcaaggcgttcgttccgtcagaaccgggatggctgatgctcgccgccgactattcgcagatcgaactgcgcgtgctcgcgcacgtttccggcgacgaacggctgaaggaagcgtttcggacaggcatggacatccacacgaagaccgcgatggacgtgttcggcgtttccgaagaccgcgtcgacgcgcgcatgcggcggcaggcgaaggcggtcaatttcggcatcatctacggcatcagcgatttcggactggcgcaaaacctgaacatttcccgcaaggaggcggcggagttcatccggcaatatttcgccgtcttttcgggcgtcaaggcgtaccgcgagcggatcgtcgagcaggcgcgccgcgacggttacgtgacgaccctgctcggtcgcaggcgctatttgccggacatcaacgcgtcgaattacaacctccgctcgttcgcggagcggacggcgatgaatacgccgatccagggcacggccgccgacatcatcaagaccgcgatggtgcgtctgacgcggcggatgcgcgacgtcggactgaagagccgcatgctgctgcaggttcacgacgagctcgtgtttgaagtgccgccggacgagctcgacgcgatgcgggagcttgtgacggacgtcatggagtcggcggtcccgctcgacgtgccgctgaaggtcgacgtcagctggggcgccgactggtacgcggcgaagtgagggaagcgggatcc

SEQ ID NO: 1425 - DNA, 2792 bp, Artificial Sequence
  Description of Artificial Sequence: Synthetic Caldibacillus cellulovorans CompA.2 DNA Polymerase Q668T
atgaaatacctgctgccgaccgctgctgctggtctgctgctcctcgctgcccagccggcgatggccatgggcaaactgattctggtcgacggaaacagcgtcgccaaccgggcgttttacgccgtccggctgctcagcacgcgcggcggcctgcacacaaacgcggtgtacggattcgccaacatgttgctcaagctgatcgaggaggaacggccgacgcattttctcgtcgcgttcgacgcgggcaaggcgacgttccgtcatcgcgaatacgaggcctacaaggcgggtcgcctgcagacgccgcccgagctgtccgagcagtttccgtacatccgggagctcgtccgggcgttcggcgtcgcgtccggcgagctggaggaatacgaggcggacgacatgatcggtacgctggcgaaacgggcggaggccgagggcgtcgacacgctggtcgtcaccggcgaccgcgatttgctccagctcgtatcggaccgcgtgaccgtcgcgctgacgcgcaagggcatcacggaaacggagcggtacgacccggcgcgcatccgcgaggaatacggcttcgatcccgaccgcatccgcgacctcaaagggctgatgggcgacgcgtctgacaatcttcccggcgttcccggcgtcggtgagaaaaccgcactgaaactgctcaggcagtacggttcgctggagagcgtcctggaacacgcgtcggaaatcgccggaaagctcggtgaaaatctgcgggcgcacgccgacgccgcccgattgagcaagcggctggcgacgatcgactgcgcggtaccgttgcagtcgggatgggactggctgcgcctcggcgaaccggaccgcgccgcgctcgcctcgctgttgcggcagctcgaattcaagtcgctgttgaaacggctcggactcgacggcacgtccgccgatgccgacgtcgacggcgtccgttcctccgcgcggccggcggacgagaaacggccgagggccgtcgccgtcgctgaggagggcgtcgacgtccgctgtccggatcgcccggaagaagtcgaagaagcgctgtcgcggctggaagccgcccagtcggtcgtcgtcgaggtgacgggcgacaacccgcacgacggcgaagtgcgcggcgtcgcatggtgggacggacatacggcgtatttcattccgtttgaacggctggtgcagtccgacatgcggccgctggccgactggctcgccgacgcgcgtcggccgaagcgtacgcacgactcccatcgcgctgaagtggcgctgttctggcacggccttgcgtttcgcggcacgtcgttctgcacgcatatcgccgcctatttgctcgaccccacggaatcgcgccatacgctggcggacctgtcgcgccgctacggtctgccgccggtaccggaagccgaggacgtttacggcaagggcgcgaagttcaaggttcccgatcgcgacacgctggcgcgttacgtcggccgcaaggccgccctagtcgcgcggctcgttccgctgctcgaggcggatttggcggcctgcggcatgcgttcgcttttttacgacctggagctgccgctttcatccgaactcgccgtcatggagacggtcggcgtccgcgtcgacgcggcggcgctcgccgcctacggcgaggaattgcgcgaggcggcggcgaaagtcgagcgggagatttacgagctggccgggacgacgttcaacatcggatcgacgaaacagctcggcgaaattttgttcgataagctggggctgcccgtcgtcaagaaaacgaaaaccggctattccaccgacgcagacgtgctggaggaactggcgccgtaccatccgatcgtcgaaaagattttgcattaccgccaactgacgaaattgcagtcgacctacatcgaggggcttttgaaagaaatccgtccgcaaaccggtaaaatccatacgtattatcagcagacgatcgcggcgacggggcggctgagcagtacttttcccaatcttcagaacattccgatccgtctcgaagaggggcggaaaatccgcaaggcgttcgttccgtcagaaccgggatggctgatgctcgccgccgactattcgcagatcgaactgcgcgtgctcgcgcacgtttccggcgacgaacggctgaaggaagcgtttcggacaggcatggacatccacacgaagaccgcgatggacgtgttcggcgtttccgaagaccgcgtcgacgcgcgcatgcggcggcaggcgaaggcggtcaatttcggcatcatctacggcatcagcgatttcggactggcgcaaaacctgaacatttcccgcaaggaggcggcggagttcatccggcaatatttcgccgtcttttcgggcgtcaaggcgtaccgcgagcggatcgtcgagcaggcgcgccgcgacggttacgtgacgaccctgctcggtcgcaggcgctatttgccggacatcaacgcgtcgaattacaacctccgctcgttcgcggagcggacggcgatgaatacgccgatccagggcacggccgccgacatcatcaagaccgcgatggtgcgtctgacgcggcggatgcgcgacgtcggactgaagagccgcatgctgctgcaggttcacgacgagctcgtgtttgaagtgccgccggacgagctcgacgcgatgcgggagcttgtgacggacgtcatggagtcggcggtcccgctcgacgtgccgctgaaggtcgacgtcagctggggcgccgactggtacgcggcgaagtgagggaagcgggatcc

SEQ ID NO: 1426 - DNA, 2792 bp, Artificial Sequence
  Description of Artificial Sequence: Synthetic Caldibacillus cellulovorans CompA.2 DNA Polymerase Q668V
atgaaatacctgctgccgaccgctgctgctggtctgctgctcctcgctgcccagccggcgatggccatgggcaaactgattctggtcgacggaaacagcgtcgccaaccgggcgttttacgccgtccggctgctcagcacgcgcggcggcctgcacacaaacgcggtgtacggattcgccaacatgttgctcaagctgatcgaggaggaacggccgacgcattttctcgtcgcgttcgacgcgggcaaggcgacgttccgtcatcgcgaatacgaggcctacaaggcgggtcgcctgcagacgccgcccgagctgtccgagcagtttccgtacatccgggagctcgtccgggcgttcggcgtcgcgtccggcgagctggaggaatacgaggcggacgacatgatcggtacgctggcgaaacgggcggaggccgagggcgtcgacacgctggtcgtcaccggcgaccgcgatttgctccagctcgtatcggaccgcgtgaccgtcgcgctgacgcgcaagggcatcacggaaacggagcggtacgacccggcgcgcatccgcgaggaatacggcttcgatcccgaccgcatccgcgacctcaaagggctgatgggcgacgcgtctgacaatcttcccggcgttcccggcgtcggtgagaaaaccgcactgaaactgctcaggcagtacggttcgctggagagcgtcctggaacacgcgtcggaaatcgccggaaagctcggtgaaaatctgcgggcgcacgccgacgccgcccgattgagcaagcggctggcgacgatcgactgcgcggtaccgttgcagtcgggatgggactggctgcgcctcggcgaaccggaccgcgccgcgctcgcctcgctgttgcggcagctcgaattcaagtcgctgttgaaacggctcggactcgacggcacgtccgccgatgccgacgtcgacggcgtccgttcctccgcgcggccggcggacgagaaacggccgagggccgtcgccgtcgctgaggagggcgtcgacgtccgctgtccggatcgcccggaagaagtcgaagaagcgctgtcgcggctggaagccgcccagtcggtcgtcgtcgaggtgacgggcgacaacccgcacgacggcgaagtgcgcggcgtcgcatggtgggacggacatacggcgtatttcattccgtttgaacggctggtgcagtccgacatgcggccgctggccgactggctcgccgacgcgcgtcggccgaagcgtacgcacgactcccatcgcgctgaagtggcgctgttctggcacggccttgcgtttcgcggcacgtcgttctgcacgcatatcgccgcctatttgctcgaccccacggaatcgcgccatacgctggcggacctgtcgcgccgctacggtctgccgccggtaccggaagccgaggacgtttacggcaagggcgcgaagttcaaggttcccgatcgcgacacgctggcgcgttacgtcggccgcaaggccgccctagtcgcgcggctcgttccgctgctcgaggcggatttggcggcctgcggcatgcgttcgcttttttacgacctggagctgccgctttcatccgaactcgccgtcatggagacggtcggcgtccgcgtcgacgcggcggcgctcgccgcctacggcgaggaattgcgcgaggcggcggcgaaagtcgagcgggagatttacgagctggccgggacgacgttcaacatcggatcgacgaaacagctcggcgaaattttgttcgataagctggggctgcccgtcgtcaagaaaacgaaaaccggctattccaccgacgcagacgtgctggaggaactggcgccgtaccatccgatcgtcgaaaagattttgcattaccgccaactgacgaaattgcagtcgacctacatcgaggggcttttgaaagaaatccgtccgcaaaccggtaaaatccatacgtattatcagcagacgatcgcggcgacggggcggctgagcagtgtttttcccaatcttcagaacattccgatccgtctcgaagaggggcggaaaatccgcaaggcgttcgttccgtcagaaccgggatggctgatgctcgccgccgactattcgcagatcgaactgcgcgtgctcgcgcacgtttccggcgacgaacggctgaaggaagcgtttcggacaggcatggacatccacacgaagaccgcgatggacgtgttcggcgtttccgaagaccgcgtcgacgcgcgcatgcggcggcaggcgaaggcggtcaatttcggcatcatctacggcatcagcgatttcggactggcgcaaaacctgaacatttcccgcaaggaggcggcggagttcatccggcaatatttcgccgtcttttcgggcgtcaaggcgtaccgcgagcggatcgtcgagcaggcgcgccgcgacggttacgtgacgaccctgctcggtcgcaggcgctatttgccggacatcaacgcgtcgaattacaacctccgctcgttcgcggagcggacggcgatgaatacgccgatccagggcacggccgccgacatcatcaagaccgcgatggtgcgtctgacgcggcggatgcgcgacgtcggactgaagagccgcatgctgctgcaggttcacgacgagctcgtgtttgaagtgccgccggacgagctcgacgcgatgcgggagcttgtgacggacgtcatggagtcggcggtcccgctcgacgtgccgctgaaggtcgacgtcagctggggcgccgactggtacgcggcgaagtgagggaagcgggatcc

SEQ ID NO: 1427 - DNA, 2792 bp, Artificial Sequence
  Description of Artificial Sequence: Synthetic Caldibacillus cellulovorans CompA.2 DNA Polymerase Q668W
atgaaatacctgctgccgaccgctgctgctggtctgctgctcctcgctgcccagccggcgatggccatgggcaaactgattctggtcgacggaaacagcgtcgccaaccgggcgttttacgccgtccggctgctcagcacgcgcggcggcctgcacacaaacgcggtgtacggattcgccaacatgttgctcaagctgatcgaggaggaacggccgacgcattttctcgtcgcgttcgacgcgggcaaggcgacgttccgtcatcgcgaatacgaggcctacaaggcgggtcgcctgcagacgccgcccgagctgtccgagcagtttccgtacatccgggagctcgtccgggcgttcggcgtcgcgtccggcgagctggaggaatacgaggcggacgacatgatcggtacgctggcgaaacgggcggaggccgagggcgtcgacacgctggtcgtcaccggcgaccgcgatttgctccagctcgtatcggaccgcgtgaccgtcgcgctgacgcgcaagggcatcacggaaacggagcggtacgacccggcgcgcatccgcgaggaatacggcttcgatcccgaccgcatccgcgacctcaaagggctgatgggcgacgcgtctgacaatcttcccggcgttcccggcgtcggtgagaaaaccgcactgaaactgctcaggcagtacggttcgctggagagcgtcctggaacacgcgtcggaaatcgccggaaagctcggtgaaaatctgcgggcgcacgccgacgccgcccgattgagcaagcggctggcgacgatcgactgcgcggtaccgttgcagtcgggatgggactggctgcgcctcggcgaaccggaccgcgccgcgctcgcctcgctgttgcggcagctcgaattcaagtcgctgttgaaacggctcggactcgacggcacgtccgccgatgccgacgtcgacggcgtccgttcctccgcgcggccggcggacgagaaacggccgagggccgtcgccgtcgctgaggagggcgtcgacgtccgctgtccggatcgcccggaagaagtcgaagaagcgctgtcgcggctggaagccgcccagtcggtcgtcgtcgaggtgacgggcgacaacccgcacgacggcgaagtgcgcggcgtcgcatggtgggacggacatacggcgtatttcattccgtttgaacggctggtgcagtccgacatgcggccgctggccgactggctcgccgacgcgcgtcggccgaagcgtacgcacgactcccatcgcgctgaagtggcgctgttctggcacggccttgcgtttcgcggcacgtcgttctgcacgcatatcgccgcctatttgctcgaccccacggaatcgcgccatacgctggcggacctgtcgcgccgctacggtctgccgccggtaccggaagccgaggacgtttacggcaagggcgcgaagttcaaggttcccgatcgcgacacgctggcgcgttacgtcggccgcaaggccgccctagtcgcgcggctcgttccgctgctcgaggcggatttggcggcctgcggcatgcgttcgcttttttacgacctggagctgccgctttcatccgaactcgccgtcatggagacggtcggcgtccgcgtcgacgcggcggcgctcgccgcctacggcgaggaattgcgcgaggcggcggcgaaagtcgagcgggagatttacgagctggccgggacgacgttcaacatcggatcgacgaaacagctcggcgaaattttgttcgataagctggggctgcccgtcgtcaagaaaacgaaaaccggctattccaccgacgcagacgtgctggaggaactggcgccgtaccatccgatcgtcgaaaagattttgcattaccgccaactgacgaaattgcagtcgacctacatcgaggggcttttgaaagaaatccgtccgcaaaccggtaaaatccatacgtattatcagcagacgatcgcggcgacggggcggctgagcagttggtttcccaatcttcagaacattccgatccgtctcgaagaggggcggaaaatccgcaaggcgttcgttccgtcagaaccgggatggctgatgctcgccgccgactattcgcagatcgaactgcgcgtgctcgcgcacgtttccggcgacgaacggctgaaggaagcgtttcggacaggcatggacatccacacgaagaccgcgatggacgtgttcggcgtttccgaagaccgcgtcgacgcgcgcatgcggcggcaggcgaaggcggtcaatttcggcatcatctacggcatcagcgatttcggactggcgcaaaacctgaacatttcccgcaaggaggcggcggagttcatccggcaatatttcgccgtcttttcgggcgtcaaggcgtaccgcgagcggatcgtcgagcaggcgcgccgcgacggttacgtgacgaccctgctcggtcgcaggcgctatttgccggacatcaacgcgtcgaattacaacctccgctcgttcgcggagcggacggcgatgaatacgccgatccagggcacggccgccgacatcatcaagaccgcgatggtgcgtctgacgcggcggatgcgcgacgtcggactgaagagccgcatgctgctgcaggttcacgacgagctcgtgtttgaagtgccgccggacgagctcgacgcgatgcgggagcttgtgacggacgtcatggagtcggcggtcccgctcgacgtgccgctgaaggtcgacgtcagctggggcgccgactggtacgcggcgaagtgagggaagcgggatcc

SEQ ID NO: 1428 - DNA, 2792 bp, Artificial Sequence
  Description of Artificial Sequence: Synthetic Caldibacillus cellulovorans CompA.2 DNA Polymerase Q668Y
atgaaatacctgctgccgaccgctgctgctggtctgctgctcctcgctgcccagccggcgatggccatgggcaaactgattctggtcgacggaaacagcgtcgccaaccgggcgttttacgccgtccggctgctcagcacgcgcggcggcctgcacacaaacgcggtgtacggattcgccaacatgttgctcaagctgatcgaggaggaacggccgacgcattttctcgtcgcgttcgacgcgggcaaggcgacgttccgtcatcgcgaatacgaggcctacaaggcgggtcgcctgcagacgccgcccgagctgtccgagcagtttccgtacatccgggagctcgtccgggcgttcggcgtcgcgtccggcgagctggaggaatacgaggcggacgacatgatcggtacgctggcgaaacgggcggaggccgagggcgtcgacacgctggtcgtcaccggcgaccgcgatttgctccagctcgtatcggaccgcgtgaccgtcgcgctgacgcgcaagggcatcacggaaacggagcggtacgacccggcgcgcatccgcgaggaatacggcttcgatcccgaccgcatccgcgacctcaaagggctgatgggcgacgcgtctgacaatcttcccggcgttcccggcgtcggtgagaaaaccgcactgaaactgctcaggcagtacggttcgctggagagcgtcctggaacacgcgtcggaaatcgccggaaagctcggtgaaaatctgcgggcgcacgccgacgccgcccgattgagcaagcggctggcgacgatcgactgcgcggtaccgttgcagtcgggatgggactggctgcgcctcggcgaaccggaccgcgccgcgctcgcctcgctgttgcggcagctcgaattcaagtcgctgttgaaacggctcggactcgacggcacgtccgccgatgccgacgtcgacggcgtccgttcctccgcgcggccggcggacgagaaacggccgagggccgtcgccgtcgctgaggagggcgtcgacgtccgctgtccggatcgcccggaagaagtcgaagaagcgctgtcgcggctggaagccgcccagtcggtcgtcgtcgaggtgacgggcgacaacccgcacgacggcgaagtgcgcggcgtcgcatggtgggacggacatacggcgtatttcattccgtttgaacggctggtgcagtccgacatgcggccgctggccgactggctcgccgacgcgcgtcggccgaagcgtacgcacgactcccatcgcgctgaagtggcgctgttctggcacggccttgcgtttcgcggcacgtcgttctgcacgcatatcgccgcctatttgctcgaccccacggaatcgcgccatacgctggcggacctgtcgcgccgctacggtctgccgccggtaccggaagccgaggacgtttacggcaagggcgcgaagttcaaggttcccgatcgcgacacgctggcgcgttacgtcggccgcaaggccgccctagtcgcgcggctcgttccgctgctcgaggcggatttggcggcctgcggcatgcgttcgcttttttacgacctggagctgccgctttcatccgaactcgccgtcatggagacggtcggcgtccgcgtcgacgcggcggcgctcgccgcctacggcgaggaattgcgcgaggcggcggcgaaagtcgagcgggagatttacgagctggccgggacgacgttcaacatcggatcgacgaaacagctcggcgaaattttgttcgataagctggggctgcccgtcgtcaagaaaacgaaaaccggctattccaccgacgcagacgtgctggaggaactggcgccgtaccatccgatcgtcgaaaagattttgcattaccgccaactgacgaaattgcagtcgacctacatcgaggggcttttgaaagaaatccgtccgcaaaccggtaaaatccatacgtattatcagcagacgatcgcggcgacggggcggctgagcagttattttcccaatcttcagaacattccgatccgtctcgaagaggggcggaaaatccgcaaggcgttcgttccgtcagaaccgggatggctgatgctcgccgccgactattcgcagatcgaactgcgcgtgctcgcgcacgtttccggcgacgaacggctgaaggaagcgtttcggacaggcatggacatccacacgaagaccgcgatggacgtgttcggcgtttccgaagaccgcgtcgacgcgcgcatgcggcggcaggcgaaggcggtcaatttcggcatcatctacggcatcagcgatttcggactggcgcaaaacctgaacatttcccgcaaggaggcggcggagttcatccggcaatatttcgccgtcttttcgggcgtcaaggcgtaccgcgagcggatcgtcgagcaggcgcgccgcgacggttacgtgacgaccctgctcggtcgcaggcgctatttgccggacatcaacgcgtcgaattacaacctccgctcgttcgcggagcggacggcgatgaatacgccgatccagggcacggccgccgacatcatcaagaccgcgatggtgcgtctgacgcggcggatgcgcgacgtcggactgaagagccgcatgctgctgcaggttcacgacgagctcgtgtttgaagtgccgccggacgagctcgacgcgatgcgggagcttgtgacggacgtcatggagtcggcggtcccgctcgacgtgccgctgaaggtcgacgtcagctggggcgccgactggtacgcggcgaagtgagggaagcgggatcc

SEQ ID NO: 1429 - DNA, 2792 bp, Artificial Sequence
  Description of Artificial Sequence: Synthetic Caldibacillus cellulovorans CompA.2 DNA Polymerase F669A
atgaaatacctgctgccgaccgctgctgctggtctgctgctcctcgctgcccagccggcgatggccatgggcaaactgattctggtcgacggaaacagcgtcgccaaccgggcgttttacgccgtccggctgctcagcacgcgcggcggcctgcacacaaacgcggtgtacggattcgccaacatgttgctcaagctgatcgaggaggaacggccgacgcattttctcgtcgcgttcgacgcgggcaaggcgacgttccgtcatcgcgaatacgaggcctacaaggcgggtcgcctgcagacgccgcccgagctgtccgagcagtttccgtacatccgggagctcgtccgggcgttcggcgtcgcgtccggcgagctggaggaatacgaggcggacgacatgatcggtacgctggcgaaacgggcggaggccgagggcgtcgacacgctggtcgtcaccggcgaccgcgatttgctccagctcgtatcggaccgcgtgaccgtcgcgctgacgcgcaagggcatcacggaaacggagcggtacgacccggcgcgcatccgcgaggaatacggcttcgatcccgaccgcatccgcgacctcaaagggctgatgggcgacgcgtctgacaatcttcccggcgttcccggcgtcggtgagaaaaccgcactgaaactgctcaggcagtacggttcgctggagagcgtcctggaacacgcgtcggaaatcgccggaaagctcggtgaaaatctgcgggcgcacgccgacgccgcccgattgagcaagcggctggcgacgatcgactgcgcggtaccgttgcagtcgggatgggactggctgcgcctcggcgaaccggaccgcgccgcgctcgcctcgctgttgcggcagctcgaattcaagtcgctgttgaaacggctcggactcgacggcacgtccgccgatgccgacgtcgacggcgtccgttcctccgcgcggccggcggacgagaaacggccgagggccgtcgccgtcgctgaggagggcgtcgacgtccgctgtccggatcgcccggaagaagtcgaagaagcgctgtcgcggctggaagccgcccagtcggtcgtcgtcgaggtgacgggcgacaacccgcacgacggcgaagtgcgcggcgtcgcatggtgggacggacatacggcgtatttcattccgtttgaacggctggtgcagtccgacatgcggccgctggccgactggctcgccgacgcgcgtcggccgaagcgtacgcacgactcccatcgcgctgaagtggcgctgttctggcacggccttgcgtttcgcggcacgtcgttctgcacgcatatcgccgcctatttgctcgaccccacggaatcgcgccatacgctggcggacctgtcgcgccgctacggtctgccgccggtaccggaagccgaggacgtttacggcaagggcgcgaagttcaaggttcccgatcgcgacacgctggcgcgttacgtcggccgcaaggccgccctagtcgcgcggctcgttccgctgctcgaggcggatttggcggcctgcggcatgcgttcgcttttttacgacctggagctgccgctttcatccgaactcgccgtcatggagacggtcggcgtccgcgtcgacgcggcggcgctcgccgcctacggcgaggaattgcgcgaggcggcggcgaaagtcgagcgggagatttacgagctggccgggacgacgttcaacatcggatcgacgaaacagctcggcgaaattttgttcgataagctggggctgcccgtcgtcaagaaaacgaaaaccggctattccaccgacgcagacgtgctggaggaactggcgccgtaccatccgatcgtcgaaaagattttgcattaccgccaactgacgaaattgcagtcgacctacatcgaggggcttttgaaagaaatccgtccgcaaaccggtaaaatccatacgtattatcagcagacgatcgcggcgacggggcggctgagcagtcaggctcccaatcttcagaacattccgatccgtctcgaagaggggcggaaaatccgcaaggcgttcgttccgtcagaaccgggatggctgatgctcgccgccgactattcgcagatcgaactgcgcgtgctcgcgcacgtttccggcgacgaacggctgaaggaagcgtttcggacaggcatggacatccacacgaagaccgcgatggacgtgttcggcgtttccgaagaccgcgtcgacgcgcgcatgcggcggcaggcgaaggcggtcaatttcggcatcatctacggcatcagcgatttcggactggcgcaaaacctgaacatttcccgcaaggaggcggcggagttcatccggcaatatttcgccgtcttttcgggcgtcaaggcgtaccgcgagcggatcgtcgagcaggcgcgccgcgacggttacgtgacgaccctgctcggtcgcaggcgctatttgccggacatcaacgcgtcgaattacaacctccgctcgttcgcggagcggacggcgatgaatacgccgatccagggcacggccgccgacatcatcaagaccgcgatggtgcgtctgacgcggcggatgcgcgacgtcggactgaagagccgcatgctgctgcaggttcacgacgagctcgtgtttgaagtgccgccggacgagctcgacgcgatgcgggagcttgtgacggacgtcatggagtcggcggtcccgctcgacgtgccgctgaaggtcgacgtcagctggggcgccgactggtacgcggcgaagtgagggaagcgggatcc

SEQ ID NO: 1430 - DNA, 2792 bp, Artificial Sequence
  Description of Artificial Sequence: Synthetic Caldibacillus cellulovorans CompA.2 DNA Polymerase F669C
atgaaatacctgctgccgaccgctgctgctggtctgctgctcctcgctgcccagccggcgatggccatgggcaaactgattctggtcgacggaaacagcgtcgccaaccgggcgttttacgccgtccggctgctcagcacgcgcggcggcctgcacacaaacgcggtgtacggattcgccaacatgttgctcaagctgatcgaggaggaacggccgacgcattttctcgtcgcgttcgacgcgggcaaggcgacgttccgtcatcgcgaatacgaggcctacaaggcgggtcgcctgcagacgccgcccgagctgtccgagcagtttccgtacatccgggagctcgtccgggcgttcggcgtcgcgtccggcgagctggaggaatacgaggcggacgacatgatcggtacgctggcgaaacgggcggaggccgagggcgtcgacacgctggtcgtcaccggcgaccgcgatttgctccagctcgtatcggaccgcgtgaccgtcgcgctgacgcgcaagggcatcacggaaacggagcggtacgacccggcgcgcatccgcgaggaatacggcttcgatcccgaccgcatccgcgacctcaaagggctgatgggcgacgcgtctgacaatcttcccggcgttcccggcgtcggtgagaaaaccgcactgaaactgctcaggcagtacggttcgctggagagcgtcctggaacacgcgtcggaaatcgccggaaagctcggtgaaaatctgcgggcgcacgccgacgccgcccgattgagcaagcggctggcgacgatcgactgcgcggtaccgttgcagtcgggatgggactggctgcgcctcggcgaaccggaccgcgccgcgctcgcctcgctgttgcggcagctcgaattcaagtcgctgttgaaacggctcggactcgacggcacgtccgccgatgccgacgtcgacggcgtccgttcctccgcgcggccggcggacgagaaacggccgagggccgtcgccgtcgctgaggagggcgtcgacgtccgctgtccggatcgcccggaagaagtcgaagaagcgctgtcgcggctggaagccgcccagtcggtcgtcgtcgaggtgacgggcgacaacccgcacgacggcgaagtgcgcggcgtcgcatggtgggacggacatacggcgtatttcattccgtttgaacggctggtgcagtccgacatgcggccgctggccgactggctcgccgacgcgcgtcggccgaagcgtacgcacgactcccatcgcgctgaagtggcgctgttctggcacggccttgcgtttcgcggcacgtcgttctgcacgcatatcgccgcctatttgctcgaccccacggaatcgcgccatacgctggcggacctgtcgcgccgctacggtctgccgccggtaccggaagccgaggacgtttacggcaagggcgcgaagttcaaggttcccgatcgcgacacgctggcgcgttacgtcggccgcaaggccgccctagtcgcgcggctcgttccgctgctcgaggcggatttggcggcctgcggcatgcgttcgcttttttacgacctggagctgccgctttcatccgaactcgccgtcatggagacggtcggcgtccgcgtcgacgcggcggcgctcgccgcctacggcgaggaattgcgcgaggcggcggcgaaagtcgagcgggagatttacgagctggccgggacgacgttcaacatcggatcgacgaaacagctcggcgaaattttgttcgataagctggggctgcccgtcgtcaagaaaacgaaaaccggctattccaccgacgcagacgtgctggaggaactggcgccgtaccatccgatcgtcgaaaagattttgcattaccgccaactgacgaaattgcagtcgacctacatcgaggggcttttgaaagaaatccgtccgcaaaccggtaaaatccatacgtattatcagcagacgatcgcggcgacggggcggctgagcagtcagtgtcccaatcttcagaacattccgatccgtctcgaagaggggcggaaaatccgcaaggcgttcgttccgtcagaaccgggatggctgatgctcgccgccgactattcgcagatcgaactgcgcgtgctcgcgcacgtttccggcgacgaacggctgaaggaagcgtttcggacaggcatggacatccacacgaagaccgcgatggacgtgttcggcgtttccgaagaccgcgtcgacgcgcgcatgcggcggcaggcgaaggcggtcaatttcggcatcatctacggcatcagcgatttcggactggcgcaaaacctgaacatttcccgcaaggaggcggcggagttcatccggcaatatttcgccgtcttttcgggcgtcaaggcgtaccgcgagcggatcgtcgagcaggcgcgccgcgacggttacgtgacgaccctgctcggtcgcaggcgctatttgccggacatcaacgcgtcgaattacaacctccgctcgttcgcggagcggacggcgatgaatacgccgatccagggcacggccgccgacatcatcaagaccgcgatggtgcgtctgacgcggcggatgcgcgacgtcggactgaagagccgcatgctgctgcaggttcacgacgagctcgtgtttgaagtgccgccggacgagctcgacgcgatgcgggagcttgtgacggacgtcatggagtcggcggtcccgctcgacgtgccgctgaaggtcgacgtcagctggggcgccgactggtacgcggcgaagtgagggaagcgggatcc

SEQ ID NO: 1431 - DNA, 2792 bp, Artificial Sequence
  Description of Artificial Sequence: Synthetic Caldibacillus cellulovorans CompA.2 DNA Polymerase F669D
atgaaatacctgctgccgaccgctgctgctggtctgctgctcctcgctgcccagccggcgatggccatgggcaaactgattctggtcgacggaaacagcgtcgccaaccgggcgttttacgccgtccggctgctcagcacgcgcggcggcctgcacacaaacgcggtgtacggattcgccaacatgttgctcaagctgatcgaggaggaacggccgacgcattttctcgtcgcgttcgacgcgggcaaggcgacgttccgtcatcgcgaatacgaggcctacaaggcgggtcgcctgcagacgccgcccgagctgtccgagcagtttccgtacatccgggagctcgtccgggcgttcggcgtcgcgtccggcgagctggaggaatacgaggcggacgacatgatcggtacgctggcgaaacgggcggaggccgagggcgtcgacacgctggtcgtcaccggcgaccgcgatttgctccagctcgtatcggaccgcgtgaccgtcgcgctgacgcgcaagggcatcacggaaacggagcggtacgacccggcgcgcatccgcgaggaatacggcttcgatcccgaccgcatccgcgacctcaaagggctgatgggcgacgcgtctgacaatcttcccggcgttcccggcgtcggtgagaaaaccgcactgaaactgctcaggcagtacggttcgctggagagcgtcctggaacacgcgtcggaaatcgccggaaagctcggtgaaaatctgcgggcgcacgccgacgccgcccgattgagcaagcggctggcgacgatcgactgcgcggtaccgttgcagtcgggatgggactggctgcgcctcggcgaaccggaccgcgccgcgctcgcctcgctgttgcggcagctcgaattcaagtcgctgttgaaacggctcggactcgacggcacgtccgccgatgccgacgtcgacggcgtccgttcctccgcgcggccggcggacgagaaacggccgagggccgtcgccgtcgctgaggagggcgtcgacgtccgctgtccggatcgcccggaagaagtcgaagaagcgctgtcgcggctggaagccgcccagtcggtcgtcgtcgaggtgacgggcgacaacccgcacgacggcgaagtgcgcggcgtcgcatggtgggacggacatacggcgtatttcattccgtttgaacggctggtgcagtccgacatgcggccgctggccgactggctcgccgacgcgcgtcggccgaagcgtacgcacgactcccatcgcgctgaagtggcgctgttctggcacggccttgcgtttcgcggcacgtcgttctgcacgcatatcgccgcctatttgctcgaccccacggaatcgcgccatacgctggcggacctgtcgcgccgctacggtctgccgccggtaccggaagccgaggacgtttacggcaagggcgcgaagttcaaggttcccgatcgcgacacgctggcgcgttacgtcggccgcaaggccgccctagtcgcgcggctcgttccgctgctcgaggcggatttggcggcctgcggcatgcgttcgcttttttacgacctggagctgccgctttcatccgaactcgccgtcatggagacggtcggcgtccgcgtcgacgcggcggcgctcgccgcctacggcgaggaattgcgcgaggcggcggcgaaagtcgagcgggagatttacgagctggccgggacgacgttcaacatcggatcgacgaaacagctcggcgaaattttgttcgataagctggggctgcccgtcgtcaagaaaacgaaaaccggctattccaccgacgcagacgtgctggaggaactggcgccgtaccatccgatcgtcgaaaagattttgcattaccgccaactgacgaaattgcagtcgacctacatcgaggggcttttgaaagaaatccgtccgcaaaccggtaaaatccatacgtattatcagcagacgatcgcggcgacggggcggctgagcagtcaggatcccaatcttcagaacattccgatccgtctcgaagaggggcggaaaatccgcaaggcgttcgttccgtcagaaccgggatggctgatgctcgccgccgactattcgcagatcgaactgcgcgtgctcgcgcacgtttccggcgacgaacggctgaaggaagcgtttcggacaggcatggacatccacacgaagaccgcgatggacgtgttcggcgtttccgaagaccgcgtcgacgcgcgcatgcggcggcaggcgaaggcggtcaatttcggcatcatctacggcatcagcgatttcggactggcgcaaaacctgaacatttcccgcaaggaggcggcggagttcatccggcaatatttcgccgtcttttcgggcgtcaaggcgtaccgcgagcggatcgtcgagcaggcgcgccgcgacggttacgtgacgaccctgctcggtcgcaggcgctatttgccggacatcaacgcgtcgaattacaacctccgctcgttcgcggagcggacggcgatgaatacgccgatccagggcacggccgccgacatcatcaagaccgcgatggtgcgtctgacgcggcggatgcgcgacgtcggactgaagagccgcatgctgctgcaggttcacgacgagctcgtgtttgaagtgccgccggacgagctcgacgcgatgcgggagcttgtgacggacgtcatggagtcggcggtcccgctcgacgtgccgctgaaggtcgacgtcagctggggcgccgactggtacgcggcgaagtgagggaagcgggatcc

SEQ ID NO: 1432 - DNA, 2792 bp, Artificial Sequence
  Description of Artificial Sequence: Synthetic Caldibacillus cellulovorans CompA.2 DNA Polymerase F669G
atgaaatacctgctgccgaccgctgctgctggtctgctgctcctcgctgcccagccggcgatggccatgggcaaactgattctggtcgacggaaacagcgtcgccaaccgggcgttttacgccgtccggctgctcagcacgcgcggcggcctgcacacaaacgcggtgtacggattcgccaacatgttgctcaagctgatcgaggaggaacggccgacgcattttctcgtcgcgttcgacgcgggcaaggcgacgttccgtcatcgcgaatacgaggcctacaaggcgggtcgcctgcagacgccgcccgagctgtccgagcagtttccgtacatccgggagctcgtccgggcgttcggcgtcgcgtccggcgagctggaggaatacgaggcggacgacatgatcggtacgctggcgaaacgggcggaggccgagggcgtcgacacgctggtcgtcaccggcgaccgcgatttgctccagctcgtatcggaccgcgtgaccgtcgcgctgacgcgcaagggcatcacggaaacggagcggtacgacccggcgcgcatccgcgaggaatacggcttcgatcccgaccgcatccgcgacctcaaagggctgatgggcgacgcgtctgacaatcttcccggcgttcccggcgtcggtgagaaaaccgcactgaaactgctcaggcagtacggttcgctggagagcgtcctggaacacgcgtcggaaatcgccggaaagctcggtgaaaatctgcgggcgcacgccgacgccgcccgattgagcaagcggctggcgacgatcgactgcgcggtaccgttgcagtcgggatgggactggctgcgcctcggcgaaccggaccgcgccgcgctcgcctcgctgttgcggcagctcgaattcaagtcgctgttgaaacggctcggactcgacggcacgtccgccgatgccgacgtcgacggcgtccgttcctccgcgcggccggcggacgagaaacggccgagggccgtcgccgtcgctgaggagggcgtcgacgtccgctgtccggatcgcccggaagaagtcgaagaagcgctgtcgcggctggaagccgcccagtcggtcgtcgtcgaggtgacgggcgacaacccgcacgacggcgaagtgcgcggcgtcgcatggtgggacggacatacggcgtatttcattccgtttgaacggctggtgcagtccgacatgcggccgctggccgactggctcgccgacgcgcgtcggccgaagcgtacgcacgactcccatcgcgctgaagtggcgctgttctggcacggccttgcgtttcgcggcacgtcgttctgcacgcatatcgccgcctatttgctcgaccccacggaatcgcgccatacgctggcggacctgtcgcgccgctacggtctgccgccggtaccggaagccgaggacgtttacggcaagggcgcgaagttcaaggttcccgatcgcgacacgctggcgcgttacgtcggccgcaaggccgccctagtcgcgcggctcgttccgctgctcgaggcggatttggcggcctgcggcatgcgttcgcttttttacgacctggagctgccgctttcatccgaactcgccgtcatggagacggtcggcgtccgcgtcgacgcggcggcgctcgccgcctacggcgaggaattgcgcgaggcggcggcgaaagtcgagcgggagatttacgagctggccgggacgacgttcaacatcggatcgacgaaacagctcggcgaaattttgttcgataagctggggctgcccgtcgtcaagaaaacgaaaaccggctattccaccgacgcagacgtgctggaggaactggcgccgtaccatccgatcgtcgaaaagattttgcattaccgccaactgacgaaattgcagtcgacctacatcgaggggcttttgaaagaaatccgtccgcaaaccggtaaaatccatacgtattatcagcagacgatcgcggcgacggggcggctgagcagtcagggtcccaatcttcagaacattccgatccgtctcgaagaggggcggaaaatccgcaaggcgttcgttccgtcagaaccgggatggctgatgctcgccgccgactattcgcagatcgaactgcgcgtgctcgcgcacgtttccggcgacgaacggctgaaggaagcgtttcggacaggcatggacatccacacgaagaccgcgatggacgtgttcggcgtttccgaagaccgcgtcgacgcgcgcatgcggcggcaggcgaaggcggtcaatttcggcatcatctacggcatcagcgatttcggactggcgcaaaacctgaacatttcccgcaaggaggcggcggagttcatccggcaatatttcgccgtcttttcgggcgtcaaggcgtaccgcgagcggatcgtcgagcaggcgcgccgcgacggttacgtgacgaccctgctcggtcgcaggcgctatttgccggacatcaacgcgtcgaattacaacctccgctcgttcgcggagcggacggcgatgaatacgccgatccagggcacggccgccgacatcatcaagaccgcgatggtgcgtctgacgcggcggatgcgcgacgtcggactgaagagccgcatgctgctgcaggttcacgacgagctcgtgtttgaagtgccgccggacgagctcgacgcgatgcgggagcttgtgacggacgtcatggagtcggcggtcccgctcgacgtgccgctgaaggtcgacgtcagctggggcgccgactggtacgcggcgaagtgagggaagcgggatcc

SEQ ID NO: 1433 - DNA, 2792 bp, Artificial Sequence
  Description of Artificial Sequence: Synthetic Caldibacillus cellulovorans CompA.2 DNA Polymerase F669H
atgaaatacctgctgccgaccgctgctgctggtctgctgctcctcgctgcccagccggcgatggccatgggcaaactgattctggtcgacggaaacagcgtcgccaaccgggcgttttacgccgtccggctgctcagcacgcgcggcggcctgcacacaaacgcggtgtacggattcgccaacatgttgctcaagctgatcgaggaggaacggccgacgcattttctcgtcgcgttcgacgcgggcaaggcgacgttccgtcatcgcgaatacgaggcctacaaggcgggtcgcctgcagacgccgcccgagctgtccgagcagtttccgtacatccgggagctcgtccgggcgttcggcgtcgcgtccggcgagctggaggaatacgaggcggacgacatgatcggtacgctggcgaaacgggcggaggccgagggcgtcgacacgctggtcgtcaccggcgaccgcgatttgctccagctcgtatcggaccgcgtgaccgtcgcgctgacgcgcaagggcatcacggaaacggagcggtacgacccggcgcgcatccgcgaggaatacggcttcgatcccgaccgcatccgcgacctcaaagggctgatgggcgacgcgtctgacaatcttcccggcgttcccggcgtcggtgagaaaaccgcactgaaactgctcaggcagtacggttcgctggagagcgtcctggaacacgcgtcggaaatcgccggaaagctcggtgaaaatctgcgggcgcacgccgacgccgcccgattgagcaagcggctggcgacgatcgactgcgcggtaccgttgcagtcgggatgggactggctgcgcctcggcgaaccggaccgcgccgcgctcgcctcgctgttgcggcagctcgaattcaagtcgctgttgaaacggctcggactcgacggcacgtccgccgatgccgacgtcgacggcgtccgttcctccgcgcggccggcggacgagaaacggccgagggccgtcgccgtcgctgaggagggcgtcgacgtccgctgtccggatcgcccggaagaagtcgaagaagcgctgtcgcggctggaagccgcccagtcggtcgtcgtcgaggtgacgggcgacaacccgcacgacggcgaagtgcgcggcgtcgcatggtgggacggacatacggcgtatttcattccgtttgaacggctggtgcagtccgacatgcggccgctggccgactggctcgccgacgcgcgtcggccgaagcgtacgcacgactcccatcgcgctgaagtggcgctgttctggcacggccttgcgtttcgcggcacgtcgttctgcacgcatatcgccgcctatttgctcgaccccacggaatcgcgccatacgctggcggacctgtcgcgccgctacggtctgccgccggtaccggaagccgaggacgtttacggcaagggcgcgaagttcaaggttcccgatcgcgacacgctggcgcgttacgtcggccgcaaggccgccctagtcgcgcggctcgttccgctgctcgaggcggatttggcggcctgcggcatgcgttcgcttttttacgacctggagctgccgctttcatccgaactcgccgtcatggagacggtcggcgtccgcgtcgacgcggcggcgctcgccgcctacggcgaggaattgcgcgaggcggcggcgaaagtcgagcgggagatttacgagctggccgggacgacgttcaacatcggatcgacgaaacagctcggcgaaattttgttcgataagctggggctgcccgtcgtcaagaaaacgaaaaccggctattccaccgacgcagacgtgctggaggaactggcgccgtaccatccgatcgtcgaaaagattttgcattaccgccaactgacgaaattgcagtcgacctacatcgaggggcttttgaaagaaatccgtccgcaaaccggtaaaatccatacgtattatcagcagacgatcgcggcgacggggcggctgagcagtcagcatcccaatcttcagaacattccgatccgtctcgaagaggggcggaaaatccgcaaggcgttcgttccgtcagaaccgggatggctgatgctcgccgccgactattcgcagatcgaactgcgcgtgctcgcgcacgtttccggcgacgaacggctgaaggaagcgtttcggacaggcatggacatccacacgaagaccgcgatggacgtgttcggcgtttccgaagaccgcgtcgacgcgcgcatgcggcggcaggcgaaggcggtcaatttcggcatcatctacggcatcagcgatttcggactggcgcaaaacctgaacatttcccgcaaggaggcggcggagttcatccggcaatatttcgccgtcttttcgggcgtcaaggcgtaccgcgagcggatcgtcgagcaggcgcgccgcgacggttacgtgacgaccctgctcggtcgcaggcgctatttgccggacatcaacgcgtcgaattacaacctccgctcgttcgcggagcggacggcgatgaatacgccgatccagggcacggccgccgacatcatcaagaccgcgatggtgcgtctgacgcggcggatgcgcgacgtcggactgaagagccgcatgctgctgcaggttcacgacgagctcgtgtttgaagtgccgccggacgagctcgacgcgatgcgggagcttgtgacggacgtcatggagtcggcggtcccgctcgacgtgccgctgaaggtcgacgtcagctggggcgccgactggtacgcggcgaagtgagggaagcgggatcc

SEQ ID NO: 1434 - DNA, 2792 bp, Artificial Sequence
  Description of Artificial Sequence: Synthetic Caldibacillus cellulovorans CompA.2 DNA Polymerase F669I
atgaaatacctgctgccgaccgctgctgctggtctgctgctcctcgctgcccagccggcgatggccatgggcaaactgattctggtcgacggaaacagcgtcgccaaccgggcgttttacgccgtccggctgctcagcacgcgcggcggcctgcacacaaacgcggtgtacggattcgccaacatgttgctcaagctgatcgaggaggaacggccgacgcattttctcgtcgcgttcgacgcgggcaaggcgacgttccgtcatcgcgaatacgaggcctacaaggcgggtcgcctgcagacgccgcccgagctgtccgagcagtttccgtacatccgggagctcgtccgggcgttcggcgtcgcgtccggcgagctggaggaatacgaggcggacgacatgatcggtacgctggcgaaacgggcggaggccgagggcgtcgacacgctggtcgtcaccggcgaccgcgatttgctccagctcgtatcggaccgcgtgaccgtcgcgctgacgcgcaagggcatcacggaaacggagcggtacgacccggcgcgcatccgcgaggaatacggcttcgatcccgaccgcatccgcgacctcaaagggctgatgggcgacgcgtctgacaatcttcccggcgttcccggcgtcggtgagaaaaccgcactgaaactgctcaggcagtacggttcgctggagagcgtcctggaacacgcgtcggaaatcgccggaaagctcggtgaaaatctgcgggcgcacgccgacgccgcccgattgagcaagcggctggcgacgatcgactgcgcggtaccgttgcagtcgggatgggactggctgcgcctcggcgaaccggaccgcgccgcgctcgcctcgctgttgcggcagctcgaattcaagtcgctgttgaaacggctcggactcgacggcacgtccgccgatgccgacgtcgacggcgtccgttcctccgcgcggccggcggacgagaaacggccgagggccgtcgccgtcgctgaggagggcgtcgacgtccgctgtccggatcgcccggaagaagtcgaagaagcgctgtcgcggctggaagccgcccagtcggtcgtcgtcgaggtgacgggcgacaacccgcacgacggcgaagtgcgcggcgtcgcatggtgggacggacatacggcgtatttcattccgtttgaacggctggtgcagtccgacatgcggccgctggccgactggctcgccgacgcgcgtcggccgaagcgtacgcacgactcccatcgcgctgaagtggcgctgttctggcacggccttgcgtttcgcggcacgtcgttctgcacgcatatcgccgcctatttgctcgaccccacggaatcgcgccatacgctggcggacctgtcgcgccgctacggtctgccgccggtaccggaagccgaggacgtttacggcaagggcgcgaagttcaaggttcccgatcgcgacacgctggcgcgttacgtcggccgcaaggccgccctagtcgcgcggctcgttccgctgctcgaggcggatttggcggcctgcggcatgcgttcgcttttttacgacctggagctgccgctttcatccgaactcgccgtcatggagacggtcggcgtccgcgtcgacgcggcggcgctcgccgcctacggcgaggaattgcgcgaggcggcggcgaaagtcgagcgggagatttacgagctggccgggacgacgttcaacatcggatcgacgaaacagctcggcgaaattttgttcgataagctggggctgcccgtcgtcaagaaaacgaaaaccggctattccaccgacgcagacgtgctggaggaactggcgccgtaccatccgatcgtcgaaaagattttgcattaccgccaactgacgaaattgcagtcgacctacatcgaggggcttttgaaagaaatccgtccgcaaaccggtaaaatccatacgtattatcagcagacgatcgcggcgacggggcggctgagcagtcagattcccaatcttcagaacattccgatccgtctcgaagaggggcggaaaatccgcaaggcgttcgttccgtcagaaccgggatggctgatgctcgccgccgactattcgcagatcgaactgcgcgtgctcgcgcacgtttccggcgacgaacggctgaaggaagcgtttcggacaggcatggacatccacacgaagaccgcgatggacgtgttcggcgtttccgaagaccgcgtcgacgcgcgcatgcggcggcaggcgaaggcggtcaatttcggcatcatctacggcatcagcgatttcggactggcgcaaaacctgaacatttcccgcaaggaggcggcggagttcatccggcaatatttcgccgtcttttcgggcgtcaaggcgtaccgcgagcggatcgtcgagcaggcgcgccgcgacggttacgtgacgaccctgctcggtcgcaggcgctatttgccggacatcaacgcgtcgaattacaacctccgctcgttcgcggagcggacggcgatgaatacgccgatccagggcacggccgccgacatcatcaagaccgcgatggtgcgtctgacgcggcggatgcgcgacgtcggactgaagagccgcatgctgctgcaggttcacgacgagctcgtgtttgaagtgccgccggacgagctcgacgcgatgcgggagcttgtgacggacgtcatggagtcggcggtcccgctcgacgtgccgctgaaggtcgacgtcagctggggcgccgactggtacgcggcgaagtgagggaagcgggatcc

SEQ ID NO: 1435 - DNA, 2792 bp, Artificial Sequence
  Description of Artificial Sequence: Synthetic Caldibacillus cellulovorans CompA.2 DNA Polymerase F669L
atgaaatacctgctgccgaccgctgctgctggtctgctgctcctcgctgcccagccggcgatggccatgggcaaactgattctggtcgacggaaacagcgtcgccaaccgggcgttttacgccgtccggctgctcagcacgcgcggcggcctgcacacaaacgcggtgtacggattcgccaacatgttgctcaagctgatcgaggaggaacggccgacgcattttctcgtcgcgttcgacgcgggcaaggcgacgttccgtcatcgcgaatacgaggcctacaaggcgggtcgcctgcagacgccgcccgagctgtccgagcagtttccgtacatccgggagctcgtccgggcgttcggcgtcgcgtccggcgagctggaggaatacgaggcggacgacatgatcggtacgctggcgaaacgggcggaggccgagggcgtcgacacgctggtcgtcaccggcgaccgcgatttgctccagctcgtatcggaccgcgtgaccgtcgcgctgacgcgcaagggcatcacggaaacggagcggtacgacccggcgcgcatccgcgaggaatacggcttcgatcccgaccgcatccgcgacctcaaagggctgatgggcgacgcgtctgacaatcttcccggcgttcccggcgtcggtgagaaaaccgcactgaaactgctcaggcagtacggttcgctggagagcgtcctggaacacgcgtcggaaatcgccggaaagctcggtgaaaatctgcgggcgcacgccgacgccgcccgattgagcaagcggctggcgacgatcgactgcgcggtaccgttgcagtcgggatgggactggctgcgcctcggcgaaccggaccgcgccgcgctcgcctcgctgttgcggcagctcgaattcaagtcgctgttgaaacggctcggactcgacggcacgtccgccgatgccgacgtcgacggcgtccgttcctccgcgcggccggcggacgagaaacggccgagggccgtcgccgtcgctgaggagggcgtcgacgtccgctgtccggatcgcccggaagaagtcgaagaagcgctgtcgcggctggaagccgcccagtcggtcgtcgtcgaggtgacgggcgacaacccgcacgacggcgaagtgcgcggcgtcgcatggtgggacggacatacggcgtatttcattccgtttgaacggctggtgcagtccgacatgcggccgctggccgactggctcgccgacgcgcgtcggccgaagcgtacgcacgactcccatcgcgctgaagtggcgctgttctggcacggccttgcgtttcgcggcacgtcgttctgcacgcatatcgccgcctatttgctcgaccccacggaatcgcgccatacgctggcggacctgtcgcgccgctacggtctgccgccggtaccggaagccgaggacgtttacggcaagggcgcgaagttcaaggttcccgatcgcgacacgctggcgcgttacgtcggccgcaaggccgccctagtcgcgcggctcgttccgctgctcgaggcggatttggcggcctgcggcatgcgttcgcttttttacgacctggagctgccgctttcatccgaactcgccgtcatggagacggtcggcgtccgcgtcgacgcggcggcgctcgccgcctacggcgaggaattgcgcgaggcggcggcgaaagtcgagcgggagatttacgagctggccgggacgacgttcaacatcggatcgacgaaacagctcggcgaaattttgttcgataagctggggctgcccgtcgtcaagaaaacgaaaaccggctattccaccgacgcagacgtgctggaggaactggcgccgtaccatccgatcgtcgaaaagattttgcattaccgccaactgacgaaattgcagtcgacctacatcgaggggcttttgaaagaaatccgtccgcaaaccggtaaaatccatacgtattatcagcagacgatcgcggcgacggggcggctgagcagtcagcttcccaatcttcagaacattccgatccgtctcgaagaggggcggaaaatccgcaaggcgttcgttccgtcagaaccgggatggctgatgctcgccgccgactattcgcagatcgaactgcgcgtgctcgcgcacgtttccggcgacgaacggctgaaggaagcgtttcggacaggcatggacatccacacgaagaccgcgatggacgtgttcggcgtttccgaagaccgcgtcgacgcgcgcatgcggcggcaggcgaaggcggtcaatttcggcatcatctacggcatcagcgatttcggactggcgcaaaacctgaacatttcccgcaaggaggcggcggagttcatccggcaatatttcgccgtcttttcgggcgtcaaggcgtaccgcgagcggatcgtcgagcaggcgcgccgcgacggttacgtgacgaccctgctcggtcgcaggcgctatttgccggacatcaacgcgtcgaattacaacctccgctcgttcgcggagcggacggcgatgaatacgccgatccagggcacggccgccgacatcatcaagaccgcgatggtgcgtctgacgcggcggatgcgcgacgtcggactgaagagccgcatgctgctgcaggttcacgacgagctcgtgtttgaagtgccgccggacgagctcgacgcgatgcgggagcttgtgacggacgtcatggagtcggcggtcccgctcgacgtgccgctgaaggtcgacgtcagctggggcgccgactggtacgcggcgaagtgagggaagcgggatcc

SEQ ID NO: 1436 - DNA, 2792 bp, Artificial Sequence
  Description of Artificial Sequence: Synthetic Caldibacillus cellulovorans CompA.2 DNA Polymerase F669M
atgaaatacctgctgccgaccgctgctgctggtctgctgctcctcgctgcccagccggcgatggccatgggcaaactgattctggtcgacggaaacagcgtcgccaaccgggcgttttacgccgtccggctgctcagcacgcgcggcggcctgcacacaaacgcggtgtacggattcgccaacatgttgctcaagctgatcgaggaggaacggccgacgcattttctcgtcgcgttcgacgcgggcaaggcgacgttccgtcatcgcgaatacgaggcctacaaggcgggtcgcctgcagacgccgcccgagctgtccgagcagtttccgtacatccgggagctcgtccgggcgttcggcgtcgcgtccggcgagctggaggaatacgaggcggacgacatgatcggtacgctggcgaaacgggcggaggccgagggcgtcgacacgctggtcgtcaccggcgaccgcgatttgctccagctcgtatcggaccgcgtgaccgtcgcgctgacgcgcaagggcatcacggaaacggagcggtacgacccggcgcgcatccgcgaggaatacggcttcgatcccgaccgcatccgcgacctcaaagggctgatgggcgacgcgtctgacaatcttcccggcgttcccggcgtcggtgagaaaaccgcactgaaactgctcaggcagtacggttcgctggagagcgtcctggaacacgcgtcggaaatcgccggaaagctcggtgaaaatctgcgggcgcacgccgacgccgcccgattgagcaagcggctggcgacgatcgactgcgcggtaccgttgcagtcgggatgggactggctgcgcctcggcgaaccggaccgcgccgcgctcgcctcgctgttgcggcagctcgaattcaagtcgctgttgaaacggctcggactcgacggcacgtccgccgatgccgacgtcgacggcgtccgttcctccgcgcggccggcggacgagaaacggccgagggccgtcgccgtcgctgaggagggcgtcgacgtccgctgtccggatcgcccggaagaagtcgaagaagcgctgtcgcggctggaagccgcccagtcggtcgtcgtcgaggtgacgggcgacaacccgcacgacggcgaagtgcgcggcgtcgcatggtgggacggacatacggcgtatttcattccgtttgaacggctggtgcagtccgacatgcggccgctggccgactggctcgccgacgcgcgtcggccgaagcgtacgcacgactcccatcgcgctgaagtggcgctgttctggcacggccttgcgtttcgcggcacgtcgttctgcacgcatatcgccgcctatttgctcgaccccacggaatcgcgccatacgctggcggacctgtcgcgccgctacggtctgccgccggtaccggaagccgaggacgtttacggcaagggcgcgaagttcaaggttcccgatcgcgacacgctggcgcgttacgtcggccgcaaggccgccctagtcgcgcggctcgttccgctgctcgaggcggatttggcggcctgcggcatgcgttcgcttttttacgacctggagctgccgctttcatccgaactcgccgtcatggagacggtcggcgtccgcgtcgacgcggcggcgctcgccgcctacggcgaggaattgcgcgaggcggcggcgaaagtcgagcgggagatttacgagctggccgggacgacgttcaacatcggatcgacgaaacagctcggcgaaattttgttcgataagctggggctgcccgtcgtcaagaaaacgaaaaccggctattccaccgacgcagacgtgctggaggaactggcgccgtaccatccgatcgtcgaaaagattttgcattaccgccaactgacgaaattgcagtcgacctacatcgaggggcttttgaaagaaatccgtccgcaaaccggtaaaatccatacgtattatcagcagacgatcgcggcgacggggcggctgagcagtcagatgcccaatcttcagaacattccgatccgtctcgaagaggggcggaaaatccgcaaggcgttcgttccgtcagaaccgggatggctgatgctcgccgccgactattcgcagatcgaactgcgcgtgctcgcgcacgtttccggcgacgaacggctgaaggaagcgtttcggacaggcatggacatccacacgaagaccgcgatggacgtgttcggcgtttccgaagaccgcgtcgacgcgcgcatgcggcggcaggcgaaggcggtcaatttcggcatcatctacggcatcagcgatttcggactggcgcaaaacctgaacatttcccgcaaggaggcggcggagttcatccggcaatatttcgccgtcttttcgggcgtcaaggcgtaccgcgagcggatcgtcgagcaggcgcgccgcgacggttacgtgacgaccctgctcggtcgcaggcgctatttgccggacatcaacgcgtcgaattacaacctccgctcgttcgcggagcggacggcgatgaatacgccgatccagggcacggccgccgacatcatcaagaccgcgatggtgcgtctgacgcggcggatgcgcgacgtcggactgaagagccgcatgctgctgcaggttcacgacgagctcgtgtttgaagtgccgccggacgagctcgacgcgatgcgggagcttgtgacggacgtcatggagtcggcggtcccgctcgacgtgccgctgaaggtcgacgtcagctggggcgccgactggtacgcggcgaagtgagggaagcgggatcc

SEQ ID NO: 1437 - DNA, 2792 bp, Artificial Sequence
  Description of Artificial Sequence: Synthetic Caldibacillus cellulovorans CompA.2 DNA Polymerase F669N
atgaaatacctgctgccgaccgctgctgctggtctgctgctcctcgctgcccagccggcgatggccatgggcaaactgattctggtcgacggaaacagcgtcgccaaccgggcgttttacgccgtccggctgctcagcacgcgcggcggcctgcacacaaacgcggtgtacggattcgccaacatgttgctcaagctgatcgaggaggaacggccgacgcattttctcgtcgcgttcgacgcgggcaaggcgacgttccgtcatcgcgaatacgaggcctacaaggcgggtcgcctgcagacgccgcccgagctgtccgagcagtttccgtacatccgggagctcgtccgggcgttcggcgtcgcgtccggcgagctggaggaatacgaggcggacgacatgatcggtacgctggcgaaacgggcggaggccgagggcgtcgacacgctggtcgtcaccggcgaccgcgatttgctccagctcgtatcggaccgcgtgaccgtcgcgctgacgcgcaagggcatcacggaaacggagcggtacgacccggcgcgcatccgcgaggaatacggcttcgatcccgaccgcatccgcgacctcaaagggctgatgggcgacgcgtctgacaatcttcccggcgttcccggcgtcggtgagaaaaccgcactgaaactgctcaggcagtacggttcgctggagagcgtcctggaacacgcgtcggaaatcgccggaaagctcggtgaaaatctgcgggcgcacgccgacgccgcccgattgagcaagcggctggcgacgatcgactgcgcggtaccgttgcagtcgggatgggactggctgcgcctcggcgaaccggaccgcgccgcgctcgcctcgctgttgcggcagctcgaattcaagtcgctgttgaaacggctcggactcgacggcacgtccgccgatgccgacgtcgacggcgtccgttcctccgcgcggccggcggacgagaaacggccgagggccgtcgccgtcgctgaggagggcgtcgacgtccgctgtccggatcgcccggaagaagtcgaagaagcgctgtcgcggctggaagccgcccagtcggtcgtcgtcgaggtgacgggcgacaacccgcacgacggcgaagtgcgcggcgtcgcatggtgggacggacatacggcgtatttcattccgtttgaacggctggtgcagtccgacatgcggccgctggccgactggctcgccgacgcgcgtcggccgaagcgtacgcacgactcccatcgcgctgaagtggcgctgttctggcacggccttgcgtttcgcggcacgtcgttctgcacgcatatcgccgcctatttgctcgaccccacggaatcgcgccatacgctggcggacctgtcgcgccgctacggtctgccgccggtaccggaagccgaggacgtttacggcaagggcgcgaagttcaaggttcccgatcgcgacacgctggcgcgttacgtcggccgcaaggccgccctagtcgcgcggctcgttccgctgctcgaggcggatttggcggcctgcggcatgcgttcgcttttttacgacctggagctgccgctttcatccgaactcgccgtcatggagacggtcggcgtccgcgtcgacgcggcggcgctcgccgcctacggcgaggaattgcgcgaggcggcggcgaaagtcgagcgggagatttacgagctggccgggacgacgttcaacatcggatcgacgaaacagctcggcgaaattttgttcgataagctggggctgcccgtcgtcaagaaaacgaaaaccggctattccaccgacgcagacgtgctggaggaactggcgccgtaccatccgatcgtcgaaaagattttgcattaccgccaactgacgaaattgcagtcgacctacatcgaggggcttttgaaagaaatccgtccgcaaaccggtaaaatccatacgtattatcagcagacgatcgcggcgacggggcggctgagcagtcagaatcccaatcttcagaacattccgatccgtctcgaagaggggcggaaaatccgcaaggcgttcgttccgtcagaaccgggatggctgatgctcgccgccgactattcgcagatcgaactgcgcgtgctcgcgcacgtttccggcgacgaacggctgaaggaagcgtttcggacaggcatggacatccacacgaagaccgcgatggacgtgttcggcgtttccgaagaccgcgtcgacgcgcgcatgcggcggcaggcgaaggcggtcaatttcggcatcatctacggcatcagcgatttcggactggcgcaaaacctgaacatttcccgcaaggaggcggcggagttcatccggcaatatttcgccgtcttttcgggcgtcaaggcgtaccgcgagcggatcgtcgagcaggcgcgccgcgacggttacgtgacgaccctgctcggtcgcaggcgctatttgccggacatcaacgcgtcgaattacaacctccgctcgttcgcggagcggacggcgatgaatacgccgatccagggcacggccgccgacatcatcaagaccgcgatggtgcgtctgacgcggcggatgcgcgacgtcggactgaagagccgcatgctgctgcaggttcacgacgagctcgtgtttgaagtgccgccggacgagctcgacgcgatgcgggagcttgtgacggacgtcatggagtcggcggtcccgctcgacgtgccgctgaaggtcgacgtcagctggggcgccgactggtacgcggcgaagtgagggaagcgggatcc

SEQ ID NO: 1438 - DNA, 2792 bp, Artificial Sequence
  Description of Artificial Sequence: Synthetic Caldibacillus cellulovorans CompA.2 DNA Polymerase F669P
atgaaatacctgctgccgaccgctgctgctggtctgctgctcctcgctgcccagccggcgatggccatgggcaaactgattctggtcgacggaaacagcgtcgccaaccgggcgttttacgccgtccggctgctcagcacgcgcggcggcctgcacacaaacgcggtgtacggattcgccaacatgttgctcaagctgatcgaggaggaacggccgacgcattttctcgtcgcgttcgacgcgggcaaggcgacgttccgtcatcgcgaatacgaggcctacaaggcgggtcgcctgcagacgccgcccgagctgtccgagcagtttccgtacatccgggagctcgtccgggcgttcggcgtcgcgtccggcgagctggaggaatacgaggcggacgacatgatcggtacgctggcgaaacgggcggaggccgagggcgtcgacacgctggtcgtcaccggcgaccgcgatttgctccagctcgtatcggaccgcgtgaccgtcgcgctgacgcgcaagggcatcacggaaacggagcggtacgacccggcgcgcatccgcgaggaatacggcttcgatcccgaccgcatccgcgacctcaaagggctgatgggcgacgcgtctgacaatcttcccggcgttcccggcgtcggtgagaaaaccgcactgaaactgctcaggcagtacggttcgctggagagcgtcctggaacacgcgtcggaaatcgccggaaagctcggtgaaaatctgcgggcgcacgccgacgccgcccgattgagcaagcggctggcgacgatcgactgcgcggtaccgttgcagtcgggatgggactggctgcgcctcggcgaaccggaccgcgccgcgctcgcctcgctgttgcggcagctcgaattcaagtcgctgttgaaacggctcggactcgacggcacgtccgccgatgccgacgtcgacggcgtccgttcctccgcgcggccggcggacgagaaacggccgagggccgtcgccgtcgctgaggagggcgtcgacgtccgctgtccggatcgcccggaagaagtcgaagaagcgctgtcgcggctggaagccgcccagtcggtcgtcgtcgaggtgacgggcgacaacccgcacgacggcgaagtgcgcggcgtcgcatggtgggacggacatacggcgtatttcattccgtttgaacggctggtgcagtccgacatgcggccgctggccgactggctcgccgacgcgcgtcggccgaagcgtacgcacgactcccatcgcgctgaagtggcgctgttctggcacggccttgcgtttcgcggcacgtcgttctgcacgcatatcgccgcctatttgctcgaccccacggaatcgcgccatacgctggcggacctgtcgcgccgctacggtctgccgccggtaccggaagccgaggacgtttacggcaagggcgcgaagttcaaggttcccgatcgcgacacgctggcgcgttacgtcggccgcaaggccgccctagtcgcgcggctcgttccgctgctcgaggcggatttggcggcctgcggcatgcgttcgcttttttacgacctggagctgccgctttcatccgaactcgccgtcatggagacggtcggcgtccgcgtcgacgcggcggcgctcgccgcctacggcgaggaattgcgcgaggcggcggcgaaagtcgagcgggagatttacgagctggccgggacgacgttcaacatcggatcgacgaaacagctcggcgaaattttgttcgataagctggggctgcccgtcgtcaagaaaacgaaaaccggctattccaccgacgcagacgtgctggaggaactggcgccgtaccatccgatcgtcgaaaagattttgcattaccgccaactgacgaaattgcagtcgacctacatcgaggggcttttgaaagaaatccgtccgcaaaccggtaaaatccatacgtattatcagcagacgatcgcggcgacggggcggctgagcagtcagcctcccaatcttcagaacattccgatccgtctcgaagaggggcggaaaatccgcaaggcgttcgttccgtcagaaccgggatggctgatgctcgccgccgactattcgcagatcgaactgcgcgtgctcgcgcacgtttccggcgacgaacggctgaaggaagcgtttcggacaggcatggacatccacacgaagaccgcgatggacgtgttcggcgtttccgaagaccgcgtcgacgcgcgcatgcggcggcaggcgaaggcggtcaatttcggcatcatctacggcatcagcgatttcggactggcgcaaaacctgaacatttcccgcaaggaggcggcggagttcatccggcaatatttcgccgtcttttcgggcgtcaaggcgtaccgcgagcggatcgtcgagcaggcgcgccgcgacggttacgtgacgaccctgctcggtcgcaggcgctatttgccggacatcaacgcgtcgaattacaacctccgctcgttcgcggagcggacggcgatgaatacgccgatccagggcacggccgccgacatcatcaagaccgcgatggtgcgtctgacgcggcggatgcgcgacgtcggactgaagagccgcatgctgctgcaggttcacgacgagctcgtgtttgaagtgccgccggacgagctcgacgcgatgcgggagcttgtgacggacgtcatggagtcggcggtcccgctcgacgtgccgctgaaggtcgacgtcagctggggcgccgactggtacgcggcgaagtgagggaagcgggatcc

SEQ ID NO: 1439 - DNA, 2792 bp, Artificial Sequence
  Description of Artificial Sequence: Synthetic Caldibacillus cellulovorans CompA.2 DNA Polymerase F669Q
atgaaatacctgctgccgaccgctgctgctggtctgctgctcctcgctgcccagccggcgatggccatgggcaaactgattctggtcgacggaaacagcgtcgccaaccgggcgttttacgccgtccggctgctcagcacgcgcggcggcctgcacacaaacgcggtgtacggattcgccaacatgttgctcaagctgatcgaggaggaacggccgacgcattttctcgtcgcgttcgacgcgggcaaggcgacgttccgtcatcgcgaatacgaggcctacaaggcgggtcgcctgcagacgccgcccgagctgtccgagcagtttccgtacatccgggagctcgtccgggcgttcggcgtcgcgtccggcgagctggaggaatacgaggcggacgacatgatcggtacgctggcgaaacgggcggaggccgagggcgtcgacacgctggtcgtcaccggcgaccgcgatttgctccagctcgtatcggaccgcgtgaccgtcgcgctgacgcgcaagggcatcacggaaacggagcggtacgacccggcgcgcatccgcgaggaatacggcttcgatcccgaccgcatccgcgacctcaaagggctgatgggcgacgcgtctgacaatcttcccggcgttcccggcgtcggtgagaaaaccgcactgaaactgctcaggcagtacggttcgctggagagcgtcctggaacacgcgtcggaaatcgccggaaagctcggtgaaaatctgcgggcgcacgccgacgccgcccgattgagcaagcggctggcgacgatcgactgcgcggtaccgttgcagtcgggatgggactggctgcgcctcggcgaaccggaccgcgccgcgctcgcctcgctgttgcggcagctcgaattcaagtcgctgttgaaacggctcggactcgacggcacgtccgccgatgccgacgtcgacggcgtccgttcctccgcgcggccggcggacgagaaacggccgagggccgtcgccgtcgctgaggagggcgtcgacgtccgctgtccggatcgcccggaagaagtcgaagaagcgctgtcgcggctggaagccgcccagtcggtcgtcgtcgaggtgacgggcgacaacccgcacgacggcgaagtgcgcggcgtcgcatggtgggacggacatacggcgtatttcattccgtttgaacggctggtgcagtccgacatgcggccgctggccgactggctcgccgacgcgcgtcggccgaagcgtacgcacgactcccatcgcgctgaagtggcgctgttctggcacggccttgcgtttcgcggcacgtcgttctgcacgcatatcgccgcctatttgctcgaccccacggaatcgcgccatacgctggcggacctgtcgcgccgctacggtctgccgccggtaccggaagccgaggacgtttacggcaagggcgcgaagttcaaggttcccgatcgcgacacgctggcgcgttacgtcggccgcaaggccgccctagtcgcgcggctcgttccgctgctcgaggcggatttggcggcctgcggcatgcgttcgcttttttacgacctggagctgccgctttcatccgaactcgccgtcatggagacggtcggcgtccgcgtcgacgcggcggcgctcgccgcctacggcgaggaattgcgcgaggcggcggcgaaagtcgagcgggagatttacgagctggccgggacgacgttcaacatcggatcgacgaaacagctcggcgaaattttgttcgataagctggggctgcccgtcgtcaagaaaacgaaaaccggctattccaccgacgcagacgtgctggaggaactggcgccgtaccatccgatcgtcgaaaagattttgcattaccgccaactgacgaaattgcagtcgacctacatcgaggggcttttgaaagaaatccgtccgcaaaccggtaaaatccatacgtattatcagcagacgatcgcggcgacggggcggctgagcagtcagcaacccaatcttcagaacattccgatccgtctcgaagaggggcggaaaatccgcaaggcgttcgttccgtcagaaccgggatggctgatgctcgccgccgactattcgcagatcgaactgcgcgtgctcgcgcacgtttccggcgacgaacggctgaaggaagcgtttcggacaggcatggacatccacacgaagaccgcgatggacgtgttcggcgtttccgaagaccgcgtcgacgcgcgcatgcggcggcaggcgaaggcggtcaatttcggcatcatctacggcatcagcgatttcggactggcgcaaaacctgaacatttcccgcaaggaggcggcggagttcatccggcaatatttcgccgtcttttcgggcgtcaaggcgtaccgcgagcggatcgtcgagcaggcgcgccgcgacggttacgtgacgaccctgctcggtcgcaggcgctatttgccggacatcaacgcgtcgaattacaacctccgctcgttcgcggagcggacggcgatgaatacgccgatccagggcacggccgccgacatcatcaagaccgcgatggtgcgtctgacgcggcggatgcgcgacgtcggactgaagagccgcatgctgctgcaggttcacgacgagctcgtgtttgaagtgccgccggacgagctcgacgcgatgcgggagcttgtgacggacgtcatggagtcggcggtcccgctcgacgtgccgctgaaggtcgacgtcagctggggcgccgactggtacgcggcgaagtgagggaagcgggatcc

SEQ ID NO: 1440 - DNA, 2792 bp, Artificial Sequence
  Description of Artificial Sequence: Synthetic Caldibacillus cellulovorans CompA.2 DNA Polymerase F669R
atgaaatacctgctgccgaccgctgctgctggtctgctgctcctcgctgcccagccggcgatggccatgggcaaactgattctggtcgacggaaacagcgtcgccaaccgggcgttttacgccgtccggctgctcagcacgcgcggcggcctgcacacaaacgcggtgtacggattcgccaacatgttgctcaagctgatcgaggaggaacggccgacgcattttctcgtcgcgttcgacgcgggcaaggcgacgttccgtcatcgcgaatacgaggcctacaaggcgggtcgcctgcagacgccgcccgagctgtccgagcagtttccgtacatccgggagctcgtccgggcgttcggcgtcgcgtccggcgagctggaggaatacgaggcggacgacatgatcggtacgctggcgaaacgggcggaggccgagggcgtcgacacgctggtcgtcaccggcgaccgcgatttgctccagctcgtatcggaccgcgtgaccgtcgcgctgacgcgcaagggcatcacggaaacggagcggtacgacccggcgcgcatccgcgaggaatacggcttcgatcccgaccgcatccgcgacctcaaagggctgatgggcgacgcgtctgacaatcttcccggcgttcccggcgtcggtgagaaaaccgcactgaaactgctcaggcagtacggttcgctggagagcgtcctggaacacgcgtcggaaatcgccggaaagctcggtgaaaatctgcgggcgcacgccgacgccgcccgattgagcaagcggctggcgacgatcgactgcgcggtaccgttgcagtcgggatgggactggctgcgcctcggcgaaccggaccgcgccgcgctcgcctcgctgttgcggcagctcgaattcaagtcgctgttgaaacggctcggactcgacggcacgtccgccgatgccgacgtcgacggcgtccgttcctccgcgcggccggcggacgagaaacggccgagggccgtcgccgtcgctgaggagggcgtcgacgtccgctgtccggatcgcccggaagaagtcgaagaagcgctgtcgcggctggaagccgcccagtcggtcgtcgtcgaggtgacgggcgacaacccgcacgacggcgaagtgcgcggcgtcgcatggtgggacggacatacggcgtatttcattccgtttgaacggctggtgcagtccgacatgcggccgctggccgactggctcgccgacgcgcgtcggccgaagcgtacgcacgactcccatcgcgctgaagtggcgctgttctggcacggccttgcgtttcgcggcacgtcgttctgcacgcatatcgccgcctatttgctcgaccccacggaatcgcgccatacgctggcggacctgtcgcgccgctacggtctgccgccggtaccggaagccgaggacgtttacggcaagggcgcgaagttcaaggttcccgatcgcgacacgctggcgcgttacgtcggccgcaaggccgccctagtcgcgcggctcgttccgctgctcgaggcggatttggcggcctgcggcatgcgttcgcttttttacgacctggagctgccgctttcatccgaactcgccgtcatggagacggtcggcgtccgcgtcgacgcggcggcgctcgccgcctacggcgaggaattgcgcgaggcggcggcgaaagtcgagcgggagatttacgagctggccgggacgacgttcaacatcggatcgacgaaacagctcggcgaaattttgttcgataagctggggctgcccgtcgtcaagaaaacgaaaaccggctattccaccgacgcagacgtgctggaggaactggcgccgtaccatccgatcgtcgaaaagattttgcattaccgccaactgacgaaattgcagtcgacctacatcgaggggcttttgaaagaaatccgtccgcaaaccggtaaaatccatacgtattatcagcagacgatcgcggcgacggggcggctgagcagtcagcgtcccaatcttcagaacattccgatccgtctcgaagaggggcggaaaatccgcaaggcgttcgttccgtcagaaccgggatggctgatgctcgccgccgactattcgcagatcgaactgcgcgtgctcgcgcacgtttccggcgacgaacggctgaaggaagcgtttcggacaggcatggacatccacacgaagaccgcgatggacgtgttcggcgtttccgaagaccgcgtcgacgcgcgcatgcggcggcaggcgaaggcggtcaatttcggcatcatctacggcatcagcgatttcggactggcgcaaaacctgaacatttcccgcaaggaggcggcggagttcatccggcaatatttcgccgtcttttcgggcgtcaaggcgtaccgcgagcggatcgtcgagcaggcgcgccgcgacggttacgtgacgaccctgctcggtcgcaggcgctatttgccggacatcaacgcgtcgaattacaacctccgctcgttcgcggagcggacggcgatgaatacgccgatccagggcacggccgccgacatcatcaagaccgcgatggtgcgtctgacgcggcggatgcgcgacgtcggactgaagagccgcatgctgctgcaggttcacgacgagctcgtgtttgaagtgccgccggacgagctcgacgcgatgcgggagcttgtgacggacgtcatggagtcggcggtcccgctcgacgtgccgctgaaggtcgacgtcagctggggcgccgactggtacgcggcgaagtgagggaagcgggatcc

SEQ ID NO: 1441 - DNA, 2792 bp, Artificial Sequence
  Description of Artificial Sequence: Synthetic Caldibacillus cellulovorans CompA.2 DNA Polymerase F669S
atgaaatacctgctgccgaccgctgctgctggtctgctgctcctcgctgcccagccggcgatggccatgggcaaactgattctggtcgacggaaacagcgtcgccaaccgggcgttttacgccgtccggctgctcagcacgcgcggcggcctgcacacaaacgcggtgtacggattcgccaacatgttgctcaagctgatcgaggaggaacggccgacgcattttctcgtcgcgttcgacgcgggcaaggcgacgttccgtcatcgcgaatacgaggcctacaaggcgggtcgcctgcagacgccgcccgagctgtccgagcagtttccgtacatccgggagctcgtccgggcgttcggcgtcgcgtccggcgagctggaggaatacgaggcggacgacatgatcggtacgctggcgaaacgggcggaggccgagggcgtcgacacgctggtcgtcaccggcgaccgcgatttgctccagctcgtatcggaccgcgtgaccgtcgcgctgacgcgcaagggcatcacggaaacggagcggtacgacccggcgcgcatccgcgaggaatacggcttcgatcccgaccgcatccgcgacctcaaagggctgatgggcgacgcgtctgacaatcttcccggcgttcccggcgtcggtgagaaaaccgcactgaaactgctcaggcagtacggttcgctggagagcgtcctggaacacgcgtcggaaatcgccggaaagctcggtgaaaatctgcgggcgcacgccgacgccgcccgattgagcaagcggctggcgacgatcgactgcgcggtaccgttgcagtcgggatgggactggctgcgcctcggcgaaccggaccgcgccgcgctcgcctcgctgttgcggcagctcgaattcaagtcgctgttgaaacggctcggactcgacggcacgtccgccgatgccgacgtcgacggcgtccgttcctccgcgcggccggcggacgagaaacggccgagggccgtcgccgtcgctgaggagggcgtcgacgtccgctgtccggatcgcccggaagaagtcgaagaagcgctgtcgcggctggaagccgcccagtcggtcgtcgtcgaggtgacgggcgacaacccgcacgacggcgaagtgcgcggcgtcgcatggtgggacggacatacggcgtatttcattccgtttgaacggctggtgcagtccgacatgcggccgctggccgactggctcgccgacgcgcgtcggccgaagcgtacgcacgactcccatcgcgctgaagtggcgctgttctggcacggccttgcgtttcgcggcacgtcgttctgcacgcatatcgccgcctatttgctcgaccccacggaatcgcgccatacgctggcggacctgtcgcgccgctacggtctgccgccggtaccggaagccgaggacgtttacggcaagggcgcgaagttcaaggttcccgatcgcgacacgctggcgcgttacgtcggccgcaaggccgccctagtcgcgcggctcgttccgctgctcgaggcggatttggcggcctgcggcatgcgttcgcttttttacgacctggagctgccgctttcatccgaactcgccgtcatggagacggtcggcgtccgcgtcgacgcggcggcgctcgccgcctacggcgaggaattgcgcgaggcggcggcgaaagtcgagcgggagatttacgagctggccgggacgacgttcaacatcggatcgacgaaacagctcggcgaaattttgttcgataagctggggctgcccgtcgtcaagaaaacgaaaaccggctattccaccgacgcagacgtgctggaggaactggcgccgtaccatccgatcgtcgaaaagattttgcattaccgccaactgacgaaattgcagtcgacctacatcgaggggcttttgaaagaaatccgtccgcaaaccggtaaaatccatacgtattatcagcagacgatcgcggcgacggggcggctgagcagtcagtctcccaatcttcagaacattccgatccgtctcgaagaggggcggaaaatccgcaaggcgttcgttccgtcagaaccgggatggctgatgctcgccgccgactattcgcagatcgaactgcgcgtgctcgcgcacgtttccggcgacgaacggctgaaggaagcgtttcggacaggcatggacatccacacgaagaccgcgatggacgtgttcggcgtttccgaagaccgcgtcgacgcgcgcatgcggcggcaggcgaaggcggtcaatttcggcatcatctacggcatcagcgatttcggactggcgcaaaacctgaacatttcccgcaaggaggcggcggagttcatccggcaatatttcgccgtcttttcgggcgtcaaggcgtaccgcgagcggatcgtcgagcaggcgcgccgcgacggttacgtgacgaccctgctcggtcgcaggcgctatttgccggacatcaacgcgtcgaattacaacctccgctcgttcgcggagcggacggcgatgaatacgccgatccagggcacggccgccgacatcatcaagaccgcgatggtgcgtctgacgcggcggatgcgcgacgtcggactgaagagccgcatgctgctgcaggttcacgacgagctcgtgtttgaagtgccgccggacgagctcgacgcgatgcgggagcttgtgacggacgtcatggagtcggcggtcccgctcgacgtgccgctgaaggtcgacgtcagctggggcgccgactggtacgcggcgaagtgagggaagcgggatcc

SEQ ID NO: 1442 - DNA, 2792 bp, Artificial Sequence
  Description of Artificial Sequence: Synthetic Caldibacillus cellulovorans CompA.2 DNA Polymerase F669T
atgaaatacctgctgccgaccgctgctgctggtctgctgctcctcgctgcccagccggcgatggccatgggcaaactgattctggtcgacggaaacagcgtcgccaaccgggcgttttacgccgtccggctgctcagcacgcgcggcggcctgcacacaaacgcggtgtacggattcgccaacatgttgctcaagctgatcgaggaggaacggccgacgcattttctcgtcgcgttcgacgcgggcaaggcgacgttccgtcatcgcgaatacgaggcctacaaggcgggtcgcctgcagacgccgcccgagctgtccgagcagtttccgtacatccgggagctcgtccgggcgttcggcgtcgcgtccggcgagctggaggaatacgaggcggacgacatgatcggtacgctggcgaaacgggcggaggccgagggcgtcgacacgctggtcgtcaccggcgaccgcgatttgctccagctcgtatcggaccgcgtgaccgtcgcgctgacgcgcaagggcatcacggaaacggagcggtacgacccggcgcgcatccgcgaggaatacggcttcgatcccgaccgcatccgcgacctcaaagggctgatgggcgacgcgtctgacaatcttcccggcgttcccggcgtcggtgagaaaaccgcactgaaactgctcaggcagtacggttcgctggagagcgtcctggaacacgcgtcggaaatcgccggaaagctcggtgaaaatctgcgggcgcacgccgacgccgcccgattgagcaagcggctggcgacgatcgactgcgcggtaccgttgcagtcgggatgggactggctgcgcctcggcgaaccggaccgcgccgcgctcgcctcgctgttgcggcagctcgaattcaagtcgctgttgaaacggctcggactcgacggcacgtccgccgatgccgacgtcgacggcgtccgttcctccgcgcggccggcggacgagaaacggccgagggccgtcgccgtcgctgaggagggcgtcgacgtccgctgtccggatcgcccggaagaagtcgaagaagcgctgtcgcggctggaagccgcccagtcggtcgtcgtcgaggtgacgggcgacaacccgcacgacggcgaagtgcgcggcgtcgcatggtgggacggacatacggcgtatttcattccgtttgaacggctggtgcagtccgacatgcggccgctggccgactggctcgccgacgcgcgtcggccgaagcgtacgcacgactcccatcgcgctgaagtggcgctgttctggcacggccttgcgtttcgcggcacgtcgttctgcacgcatatcgccgcctatttgctcgaccccacggaatcgcgccatacgctggcggacctgtcgcgccgctacggtctgccgccggtaccggaagccgaggacgtttacggcaagggcgcgaagttcaaggttcccgatcgcgacacgctggcgcgttacgtcggccgcaaggccgccctagtcgcgcggctcgttccgctgctcgaggcggatttggcggcctgcggcatgcgttcgcttttttacgacctggagctgccgctttcatccgaactcgccgtcatggagacggtcggcgtccgcgtcgacgcggcggcgctcgccgcctacggcgaggaattgcgcgaggcggcggcgaaagtcgagcgggagatttacgagctggccgggacgacgttcaacatcggatcgacgaaacagctcggcgaaattttgttcgataagctggggctgcccgtcgtcaagaaaacgaaaaccggctattccaccgacgcagacgtgctggaggaactggcgccgtaccatccgatcgtcgaaaagattttgcattaccgccaactgacgaaattgcagtcgacctacatcgaggggcttttgaaagaaatccgtccgcaaaccggtaaaatccatacgtattatcagcagacgatcgcggcgacggggcggctgagcagtcagactcccaatcttcagaacattccgatccgtctcgaagaggggcggaaaatccgcaaggcgttcgttccgtcagaaccgggatggctgatgctcgccgccgactattcgcagatcgaactgcgcgtgctcgcgcacgtttccggcgacgaacggctgaaggaagcgtttcggacaggcatggacatccacacgaagaccgcgatggacgtgttcggcgtttccgaagaccgcgtcgacgcgcgcatgcggcggcaggcgaaggcggtcaatttcggcatcatctacggcatcagcgatttcggactggcgcaaaacctgaacatttcccgcaaggaggcggcggagttcatccggcaatatttcgccgtcttttcgggcgtcaaggcgtaccgcgagcggatcgtcgagcaggcgcgccgcgacggttacgtgacgaccctgctcggtcgcaggcgctatttgccggacatcaacgcgtcgaattacaacctccgctcgttcgcggagcggacggcgatgaatacgccgatccagggcacggccgccgacatcatcaagaccgcgatggtgcgtctgacgcggcggatgcgcgacgtcggactgaagagccgcatgctgctgcaggttcacgacgagctcgtgtttgaagtgccgccggacgagctcgacgcgatgcgggagcttgtgacggacgtcatggagtcggcggtcccgctcgacgtgccgctgaaggtcgacgtcagctggggcgccgactggtacgcggcgaagtgagggaagcgggatcc

SEQ ID NO: 1443 - DNA, 2792 bp, Artificial Sequence
  Description of Artificial Sequence: Synthetic Caldibacillus cellulovorans CompA.2 DNA Polymerase F669V
atgaaatacctgctgccgaccgctgctgctggtctgctgctcctcgctgcccagccggcgatggccatgggcaaactgattctggtcgacggaaacagcgtcgccaaccgggcgttttacgccgtccggctgctcagcacgcgcggcggcctgcacacaaacgcggtgtacggattcgccaacatgttgctcaagctgatcgaggaggaacggccgacgcattttctcgtcgcgttcgacgcgggcaaggcgacgttccgtcatcgcgaatacgaggcctacaaggcgggtcgcctgcagacgccgcccgagctgtccgagcagtttccgtacatccgggagctcgtccgggcgttcggcgtcgcgtccggcgagctggaggaatacgaggcggacgacatgatcggtacgctggcgaaacgggcggaggccgagggcgtcgacacgctggtcgtcaccggcgaccgcgatttgctccagctcgtatcggaccgcgtgaccgtcgcgctgacgcgcaagggcatcacggaaacggagcggtacgacccggcgcgcatccgcgaggaatacggcttcgatcccgaccgcatccgcgacctcaaagggctgatgggcgacgcgtctgacaatcttcccggcgttcccggcgtcggtgagaaaaccgcactgaaactgctcaggcagtacggttcgctggagagcgtcctggaacacgcgtcggaaatcgccggaaagctcggtgaaaatctgcgggcgcacgccgacgccgcccgattgagcaagcggctggcgacgatcgactgcgcggtaccgttgcagtcgggatgggactggctgcgcctcggcgaaccggaccgcgccgcgctcgcctcgctgttgcggcagctcgaattcaagtcgctgttgaaacggctcggactcgacggcacgtccgccgatgccgacgtcgacggcgtccgttcctccgcgcggccggcggacgagaaacggccgagggccgtcgccgtcgctgaggagggcgtcgacgtccgctgtccggatcgcccggaagaagtcgaagaagcgctgtcgcggctggaagccgcccagtcggtcgtcgtcgaggtgacgggcgacaacccgcacgacggcgaagtgcgcggcgtcgcatggtgggacggacatacggcgtatttcattccgtttgaacggctggtgcagtccgacatgcggccgctggccgactggctcgccgacgcgcgtcggccgaagcgtacgcacgactcccatcgcgctgaagtggcgctgttctggcacggccttgcgtttcgcggcacgtcgttctgcacgcatatcgccgcctatttgctcgaccccacggaatcgcgccatacgctggcggacctgtcgcgccgctacggtctgccgccggtaccggaagccgaggacgtttacggcaagggcgcgaagttcaaggttcccgatcgcgacacgctggcgcgttacgtcggccgcaaggccgccctagtcgcgcggctcgttccgctgctcgaggcggatttggcggcctgcggcatgcgttcgcttttttacgacctggagctgccgctttcatccgaactcgccgtcatggagacggtcggcgtccgcgtcgacgcggcggcgctcgccgcctacggcgaggaattgcgcgaggcggcggcgaaagtcgagcgggagatttacgagctggccgggacgacgttcaacatcggatcgacgaaacagctcggcgaaattttgttcgataagctggggctgcccgtcgtcaagaaaacgaaaaccggctattccaccgacgcagacgtgctggaggaactggcgccgtaccatccgatcgtcgaaaagattttgcattaccgccaactgacgaaattgcagtcgacctacatcgaggggcttttgaaagaaatccgtccgcaaaccggtaaaatccatacgtattatcagcagacgatcgcggcgacggggcggctgagcagtcaggttcccaatcttcagaacattccgatccgtctcgaagaggggcggaaaatccgcaaggcgttcgttccgtcagaaccgggatggctgatgctcgccgccgactattcgcagatcgaactgcgcgtgctcgcgcacgtttccggcgacgaacggctgaaggaagcgtttcggacaggcatggacatccacacgaagaccgcgatggacgtgttcggcgtttccgaagaccgcgtcgacgcgcgcatgcggcggcaggcgaaggcggtcaatttcggcatcatctacggcatcagcgatttcggactggcgcaaaacctgaacatttcccgcaaggaggcggcggagttcatccggcaatatttcgccgtcttttcgggcgtcaaggcgtaccgcgagcggatcgtcgagcaggcgcgccgcgacggttacgtgacgaccctgctcggtcgcaggcgctatttgccggacatcaacgcgtcgaattacaacctccgctcgttcgcggagcggacggcgatgaatacgccgatccagggcacggccgccgacatcatcaagaccgcgatggtgcgtctgacgcggcggatgcgcgacgtcggactgaagagccgcatgctgctgcaggttcacgacgagctcgtgtttgaagtgccgccggacgagctcgacgcgatgcgggagcttgtgacggacgtcatggagtcggcggtcccgctcgacgtgccgctgaaggtcgacgtcagctggggcgccgactggtacgcggcgaagtgagggaagcgggatcc

SEQ ID NO: 1444 - DNA, 2792 bp, Artificial Sequence
  Description of Artificial Sequence: Synthetic Caldibacillus cellulovorans CompA.2 DNA Polymerase F669W
atgaaatacctgctgccgaccgctgctgctggtctgctgctcctcgctgcccagccggcgatggccatgggcaaactgattctggtcgacggaaacagcgtcgccaaccgggcgttttacgccgtccggctgctcagcacgcgcggcggcctgcacacaaacgcggtgtacggattcgccaacatgttgctcaagctgatcgaggaggaacggccgacgcattttctcgtcgcgttcgacgcgggcaaggcgacgttccgtcatcgcgaatacgaggcctacaaggcgggtcgcctgcagacgccgcccgagctgtccgagcagtttccgtacatccgggagctcgtccgggcgttcggcgtcgcgtccggcgagctggaggaatacgaggcggacgacatgatcggtacgctggcgaaacgggcggaggccgagggcgtcgacacgctggtcgtcaccggcgaccgcgatttgctccagctcgtatcggaccgcgtgaccgtcgcgctgacgcgcaagggcatcacggaaacggagcggtacgacccggcgcgcatccgcgaggaatacggcttcgatcccgaccgcatccgcgacctcaaagggctgatgggcgacgcgtctgacaatcttcccggcgttcccggcgtcggtgagaaaaccgcactgaaactgctcaggcagtacggttcgctggagagcgtcctggaacacgcgtcggaaatcgccggaaagctcggtgaaaatctgcgggcgcacgccgacgccgcccgattgagcaagcggctggcgacgatcgactgcgcggtaccgttgcagtcgggatgggactggctgcgcctcggcgaaccggaccgcgccgcgctcgcctcgctgttgcggcagctcgaattcaagtcgctgttgaaacggctcggactcgacggcacgtccgccgatgccgacgtcgacggcgtccgttcctccgcgcggccggcggacgagaaacggccgagggccgtcgccgtcgctgaggagggcgtcgacgtccgctgtccggatcgcccggaagaagtcgaagaagcgctgtcgcggctggaagccgcccagtcggtcgtcgtcgaggtgacgggcgacaacccgcacgacggcgaagtgcgcggcgtcgcatggtgggacggacatacggcgtatttcattccgtttgaacggctggtgcagtccgacatgcggccgctggccgactggctcgccgacgcgcgtcggccgaagcgtacgcacgactcccatcgcgctgaagtggcgctgttctggcacggccttgcgtttcgcggcacgtcgttctgcacgcatatcgccgcctatttgctcgaccccacggaatcgcgccatacgctggcggacctgtcgcgccgctacggtctgccgccggtaccggaagccgaggacgtttacggcaagggcgcgaagttcaaggttcccgatcgcgacacgctggcgcgttacgtcggccgcaaggccgccctagtcgcgcggctcgttccgctgctcgaggcggatttggcggcctgcggcatgcgttcgcttttttacgacctggagctgccgctttcatccgaactcgccgtcatggagacggtcggcgtccgcgtcgacgcggcggcgctcgccgcctacggcgaggaattgcgcgaggcggcggcgaaagtcgagcgggagatttacgagctggccgggacgacgttcaacatcggatcgacgaaacagctcggcgaaattttgttcgataagctggggctgcccgtcgtcaagaaaacgaaaaccggctattccaccgacgcagacgtgctggaggaactggcgccgtaccatccgatcgtcgaaaagattttgcattaccgccaactgacgaaattgcagtcgacctacatcgaggggcttttgaaagaaatccgtccgcaaaccggtaaaatccatacgtattatcagcagacgatcgcggcgacggggcggctgagcagtcagtggcccaatcttcagaacattccgatccgtctcgaagaggggcggaaaatccgcaaggcgttcgttccgtcagaaccgggatggctgatgctcgccgccgactattcgcagatcgaactgcgcgtgctcgcgcacgtttccggcgacgaacggctgaaggaagcgtttcggacaggcatggacatccacacgaagaccgcgatggacgtgttcggcgtttccgaagaccgcgtcgacgcgcgcatgcggcggcaggcgaaggcggtcaatttcggcatcatctacggcatcagcgatttcggactggcgcaaaacctgaacatttcccgcaaggaggcggcggagttcatccggcaatatttcgccgtcttttcgggcgtcaaggcgtaccgcgagcggatcgtcgagcaggcgcgccgcgacggttacgtgacgaccctgctcggtcgcaggcgctatttgccggacatcaacgcgtcgaattacaacctccgctcgttcgcggagcggacggcgatgaatacgccgatccagggcacggccgccgacatcatcaagaccgcgatggtgcgtctgacgcggcggatgcgcgacgtcggactgaagagccgcatgctgctgcaggttcacgacgagctcgtgtttgaagtgccgccggacgagctcgacgcgatgcgggagcttgtgacggacgtcatggagtcggcggtcccgctcgacgtgccgctgaaggtcgacgtcagctggggcgccgactggtacgcggcgaagtgagggaagcgggatcc

SEQ ID NO: 1445 - DNA, 2792 bp, Artificial Sequence
  Description of Artificial Sequence: Synthetic Caldibacillus cellulovorans CompA.2 DNA Polymerase F669Y
atgaaatacctgctgccgaccgctgctgctggtctgctgctcctcgctgcccagccggcgatggccatgggcaaactgattctggtcgacggaaacagcgtcgccaaccgggcgttttacgccgtccggctgctcagcacgcgcggcggcctgcacacaaacgcggtgtacggattcgccaacatgttgctcaagctgatcgaggaggaacggccgacgcattttctcgtcgcgttcgacgcgggcaaggcgacgttccgtcatcgcgaatacgaggcctacaaggcgggtcgcctgcagacgccgcccgagctgtccgagcagtttccgtacatccgggagctcgtccgggcgttcggcgtcgcgtccggcgagctggaggaatacgaggcggacgacatgatcggtacgctggcgaaacgggcggaggccgagggcgtcgacacgctggtcgtcaccggcgaccgcgatttgctccagctcgtatcggaccgcgtgaccgtcgcgctgacgcgcaagggcatcacggaaacggagcggtacgacccggcgcgcatccgcgaggaatacggcttcgatcccgaccgcatccgcgacctcaaagggctgatgggcgacgcgtctgacaatcttcccggcgttcccggcgtcggtgagaaaaccgcactgaaactgctcaggcagtacggttcgctggagagcgtcctggaacacgcgtcggaaatcgccggaaagctcggtgaaaatctgcgggcgcacgccgacgccgcccgattgagcaagcggctggcgacgatcgactgcgcggtaccgttgcagtcgggatgggactggctgcgcctcggcgaaccggaccgcgccgcgctcgcctcgctgttgcggcagctcgaattcaagtcgctgttgaaacggctcggactcgacggcacgtccgccgatgccgacgtcgacggcgtccgttcctccgcgcggccggcggacgagaaacggccgagggccgtcgccgtcgctgaggagggcgtcgacgtccgctgtccggatcgcccggaagaagtcgaagaagcgctgtcgcggctggaagccgcccagtcggtcgtcgtcgaggtgacgggcgacaacccgcacgacggcgaagtgcgcggcgtcgcatggtgggacggacatacggcgtatttcattccgtttgaacggctggtgcagtccgacatgcggccgctggccgactggctcgccgacgcgcgtcggccgaagcgtacgcacgactcccatcgcgctgaagtggcgctgttctggcacggccttgcgtttcgcggcacgtcgttctgcacgcatatcgccgcctatttgctcgaccccacggaatcgcgccatacgctggcggacctgtcgcgccgctacggtctgccgccggtaccggaagccgaggacgtttacggcaagggcgcgaagttcaaggttcccgatcgcgacacgctggcgcgttacgtcggccgcaaggccgccctagtcgcgcggctcgttccgctgctcgaggcggatttggcggcctgcggcatgcgttcgcttttttacgacctggagctgccgctttcatccgaactcgccgtcatggagacggtcggcgtccgcgtcgacgcggcggcgctcgccgcctacggcgaggaattgcgcgaggcggcggcgaaagtcgagcgggagatttacgagctggccgggacgacgttcaacatcggatcgacgaaacagctcggcgaaattttgttcgataagctggggctgcccgtcgtcaagaaaacgaaaaccggctattccaccgacgcagacgtgctggaggaactggcgccgtaccatccgatcgtcgaaaagattttgcattaccgccaactgacgaaattgcagtcgacctacatcgaggggcttttgaaagaaatccgtccgcaaaccggtaaaatccatacgtattatcagcagacgatcgcggcgacggggcggctgagcagtcagtatcccaatcttcagaacattccgatccgtctcgaagaggggcggaaaatccgcaaggcgttcgttccgtcagaaccgggatggctgatgctcgccgccgactattcgcagatcgaactgcgcgtgctcgcgcacgtttccggcgacgaacggctgaaggaagcgtttcggacaggcatggacatccacacgaagaccgcgatggacgtgttcggcgtttccgaagaccgcgtcgacgcgcgcatgcggcggcaggcgaaggcggtcaatttcggcatcatctacggcatcagcgatttcggactggcgcaaaacctgaacatttcccgcaaggaggcggcggagttcatccggcaatatttcgccgtcttttcgggcgtcaaggcgtaccgcgagcggatcgtcgagcaggcgcgccgcgacggttacgtgacgaccctgctcggtcgcaggcgctatttgccggacatcaacgcgtcgaattacaacctccgctcgttcgcggagcggacggcgatgaatacgccgatccagggcacggccgccgacatcatcaagaccgcgatggtgcgtctgacgcggcggatgcgcgacgtcggactgaagagccgcatgctgctgcaggttcacgacgagctcgtgtttgaagtgccgccggacgagctcgacgcgatgcgggagcttgtgacggacgtcatggagtcggcggtcccgctcgacgtgccgctgaaggtcgacgtcagctggggcgccgactggtacgcggcgaagtgagggaagcgggatcc

SEQ ID NO: 1446 - DNA, 2792 bp, Artificial Sequence
  Description of Artificial Sequence: Synthetic Caldibacillus cellulovorans CompA.2 DNA Polymerase Q753A
atgaaatacctgctgccgaccgctgctgctggtctgctgctcctcgctgcccagccggcgatggccatgggcaaactgattctggtcgacggaaacagcgtcgccaaccgggcgttttacgccgtccggctgctcagcacgcgcggcggcctgcacacaaacgcggtgtacggattcgccaacatgttgctcaagctgatcgaggaggaacggccgacgcattttctcgtcgcgttcgacgcgggcaaggcgacgttccgtcatcgcgaatacgaggcctacaaggcgggtcgcctgcagacgccgcccgagctgtccgagcagtttccgtacatccgggagctcgtccgggcgttcggcgtcgcgtccggcgagctggaggaatacgaggcggacgacatgatcggtacgctggcgaaacgggcggaggccgagggcgtcgacacgctggtcgtcaccggcgaccgcgatttgctccagctcgtatcggaccgcgtgaccgtcgcgctgacgcgcaagggcatcacggaaacggagcggtacgacccggcgcgcatccgcgaggaatacggcttcgatcccgaccgcatccgcgacctcaaagggctgatgggcgacgcgtctgacaatcttcccggcgttcccggcgtcggtgagaaaaccgcactgaaactgctcaggcagtacggttcgctggagagcgtcctggaacacgcgtcggaaatcgccggaaagctcggtgaaaatctgcgggcgcacgccgacgccgcccgattgagcaagcggctggcgacgatcgactgcgcggtaccgttgcagtcgggatgggactggctgcgcctcggcgaaccggaccgcgccgcgctcgcctcgctgttgcggcagctcgaattcaagtcgctgttgaaacggctcggactcgacggcacgtccgccgatgccgacgtcgacggcgtccgttcctccgcgcggccggcggacgagaaacggccgagggccgtcgccgtcgctgaggagggcgtcgacgtccgctgtccggatcgcccggaagaagtcgaagaagcgctgtcgcggctggaagccgcccagtcggtcgtcgtcgaggtgacgggcgacaacccgcacgacggcgaagtgcgcggcgtcgcatggtgggacggacatacggcgtatttcattccgtttgaacggctggtgcagtccgacatgcggccgctggccgactggctcgccgacgcgcgtcggccgaagcgtacgcacgactcccatcgcgctgaagtggcgctgttctggcacggccttgcgtttcgcggcacgtcgttctgcacgcatatcgccgcctatttgctcgaccccacggaatcgcgccatacgctggcggacctgtcgcgccgctacggtctgccgccggtaccggaagccgaggacgtttacggcaagggcgcgaagttcaaggttcccgatcgcgacacgctggcgcgttacgtcggccgcaaggccgccctagtcgcgcggctcgttccgctgctcgaggcggatttggcggcctgcggcatgcgttcgcttttttacgacctggagctgccgctttcatccgaactcgccgtcatggagacggtcggcgtccgcgtcgacgcggcggcgctcgccgcctacggcgaggaattgcgcgaggcggcggcgaaagtcgagcgggagatttacgagctggccgggacgacgttcaacatcggatcgacgaaacagctcggcgaaattttgttcgataagctggggctgcccgtcgtcaagaaaacgaaaaccggctattccaccgacgcagacgtgctggaggaactggcgccgtaccatccgatcgtcgaaaagattttgcattaccgccaactgacgaaattgcagtcgacctacatcgaggggcttttgaaagaaatccgtccgcaaaccggtaaaatccatacgtattatcagcagacgatcgcggcgacggggcggctgagcagtcagtttcccaatcttcagaacattccgatccgtctcgaagaggggcggaaaatccgcaaggcgttcgttccgtcagaaccgggatggctgatgctcgccgccgactattcgcagatcgaactgcgcgtgctcgcgcacgtttccggcgacgaacggctgaaggaagcgtttcggacaggcatggacatccacacgaagaccgcgatggacgtgttcggcgtttccgaagaccgcgtcgacgcgcgcatgcggcgggctgcgaaggcggtcaatttcggcatcatctacggcatcagcgatttcggactggcgcaaaacctgaacatttcccgcaaggaggcggcggagttcatccggcaatatttcgccgtcttttcgggcgtcaaggcgtaccgcgagcggatcgtcgagcaggcgcgccgcgacggttacgtgacgaccctgctcggtcgcaggcgctatttgccggacatcaacgcgtcgaattacaacctccgctcgttcgcggagcggacggcgatgaatacgccgatccagggcacggccgccgacatcatcaagaccgcgatggtgcgtctgacgcggcggatgcgcgacgtcggactgaagagccgcatgctgctgcaggttcacgacgagctcgtgtttgaagtgccgccggacgagctcgacgcgatgcgggagcttgtgacggacgtcatggagtcggcggtcccgctcgacgtgccgctgaaggtcgacgtcagctggggcgccgactggtacgcggcgaagtgagggaagcgggatcc

SEQ ID NO: 1447 - DNA, 2792 bp, Artificial Sequence
  Description of Artificial Sequence: Synthetic Caldibacillus cellulovorans CompA.2 DNA Polymerase Q753C
atgaaatacctgctgccgaccgctgctgctggtctgctgctcctcgctgcccagccggcgatggccatgggcaaactgattctggtcgacggaaacagcgtcgccaaccgggcgttttacgccgtccggctgctcagcacgcgcggcggcctgcacacaaacgcggtgtacggattcgccaacatgttgctcaagctgatcgaggaggaacggccgacgcattttctcgtcgcgttcgacgcgggcaaggcgacgttccgtcatcgcgaatacgaggcctacaaggcgggtcgcctgcagacgccgcccgagctgtccgagcagtttccgtacatccgggagctcgtccgggcgttcggcgtcgcgtccggcgagctggaggaatacgaggcggacgacatgatcggtacgctggcgaaacgggcggaggccgagggcgtcgacacgctggtcgtcaccggcgaccgcgatttgctccagctcgtatcggaccgcgtgaccgtcgcgctgacgcgcaagggcatcacggaaacggagcggtacgacccggcgcgcatccgcgaggaatacggcttcgatcccgaccgcatccgcgacctcaaagggctgatgggcgacgcgtctgacaatcttcccggcgttcccggcgtcggtgagaaaaccgcactgaaactgctcaggcagtacggttcgctggagagcgtcctggaacacgcgtcggaaatcgccggaaagctcggtgaaaatctgcgggcgcacgccgacgccgcccgattgagcaagcggctggcgacgatcgactgcgcggtaccgttgcagtcgggatgggactggctgcgcctcggcgaaccggaccgcgccgcgctcgcctcgctgttgcggcagctcgaattcaagtcgctgttgaaacggctcggactcgacggcacgtccgccgatgccgacgtcgacggcgtccgttcctccgcgcggccggcggacgagaaacggccgagggccgtcgccgtcgctgaggagggcgtcgacgtccgctgtccggatcgcccggaagaagtcgaagaagcgctgtcgcggctggaagccgcccagtcggtcgtcgtcgaggtgacgggcgacaacccgcacgacggcgaagtgcgcggcgtcgcatggtgggacggacatacggcgtatttcattccgtttgaacggctggtgcagtccgacatgcggccgctggccgactggctcgccgacgcgcgtcggccgaagcgtacgcacgactcccatcgcgctgaagtggcgctgttctggcacggccttgcgtttcgcggcacgtcgttctgcacgcatatcgccgcctatttgctcgaccccacggaatcgcgccatacgctggcggacctgtcgcgccgctacggtctgccgccggtaccggaagccgaggacgtttacggcaagggcgcgaagttcaaggttcccgatcgcgacacgctggcgcgttacgtcggccgcaaggccgccctagtcgcgcggctcgttccgctgctcgaggcggatttggcggcctgcggcatgcgttcgcttttttacgacctggagctgccgctttcatccgaactcgccgtcatggagacggtcggcgtccgcgtcgacgcggcggcgctcgccgcctacggcgaggaattgcgcgaggcggcggcgaaagtcgagcgggagatttacgagctggccgggacgacgttcaacatcggatcgacgaaacagctcggcgaaattttgttcgataagctggggctgcccgtcgtcaagaaaacgaaaaccggctattccaccgacgcagacgtgctggaggaactggcgccgtaccatccgatcgtcgaaaagattttgcattaccgccaactgacgaaattgcagtcgacctacatcgaggggcttttgaaagaaatccgtccgcaaaccggtaaaatccatacgtattatcagcagacgatcgcggcgacggggcggctgagcagtcagtttcccaatcttcagaacattccgatccgtctcgaagaggggcggaaaatccgcaaggcgttcgttccgtcagaaccgggatggctgatgctcgccgccgactattcgcagatcgaactgcgcgtgctcgcgcacgtttccggcgacgaacggctgaaggaagcgtttcggacaggcatggacatccacacgaagaccgcgatggacgtgttcggcgtttccgaagaccgcgtcgacgcgcgcatgcggcggtgtgcgaaggcggtcaatttcggcatcatctacggcatcagcgatttcggactggcgcaaaacctgaacatttcccgcaaggaggcggcggagttcatccggcaatatttcgccgtcttttcgggcgtcaaggcgtaccgcgagcggatcgtcgagcaggcgcgccgcgacggttacgtgacgaccctgctcggtcgcaggcgctatttgccggacatcaacgcgtcgaattacaacctccgctcgttcgcggagcggacggcgatgaatacgccgatccagggcacggccgccgacatcatcaagaccgcgatggtgcgtctgacgcggcggatgcgcgacgtcggactgaagagccgcatgctgctgcaggttcacgacgagctcgtgtttgaagtgccgccggacgagctcgacgcgatgcgggagcttgtgacggacgtcatggagtcggcggtcccgctcgacgtgccgctgaaggtcgacgtcagctggggcgccgactggtacgcggcgaagtgagggaagcgggatcc

SEQ ID NO: 1448 - DNA, 2792 bp, Artificial Sequence
  Description of Artificial Sequence: Synthetic Caldibacillus cellulovorans CompA.2 DNA Polymerase Q753D
atgaaatacctgctgccgaccgctgctgctggtctgctgctcctcgctgcccagccggcgatggccatgggcaaactgattctggtcgacggaaacagcgtcgccaaccgggcgttttacgccgtccggctgctcagcacgcgcggcggcctgcacacaaacgcggtgtacggattcgccaacatgttgctcaagctgatcgaggaggaacggccgacgcattttctcgtcgcgttcgacgcgggcaaggcgacgttccgtcatcgcgaatacgaggcctacaaggcgggtcgcctgcagacgccgcccgagctgtccgagcagtttccgtacatccgggagctcgtccgggcgttcggcgtcgcgtccggcgagctggaggaatacgaggcggacgacatgatcggtacgctggcgaaacgggcggaggccgagggcgtcgacacgctggtcgtcaccggcgaccgcgatttgctccagctcgtatcggaccgcgtgaccgtcgcgctgacgcgcaagggcatcacggaaacggagcggtacgacccggcgcgcatccgcgaggaatacggcttcgatcccgaccgcatccgcgacctcaaagggctgatgggcgacgcgtctgacaatcttcccggcgttcccggcgtcggtgagaaaaccgcactgaaactgctcaggcagtacggttcgctggagagcgtcctggaacacgcgtcggaaatcgccggaaagctcggtgaaaatctgcgggcgcacgccgacgccgcccgattgagcaagcggctggcgacgatcgactgcgcggtaccgttgcagtcgggatgggactggctgcgcctcggcgaaccggaccgcgccgcgctcgcctcgctgttgcggcagctcgaattcaagtcgctgttgaaacggctcggactcgacggcacgtccgccgatgccgacgtcgacggcgtccgttcctccgcgcggccggcggacgagaaacggccgagggccgtcgccgtcgctgaggagggcgtcgacgtccgctgtccggatcgcccggaagaagtcgaagaagcgctgtcgcggctggaagccgcccagtcggtcgtcgtcgaggtgacgggcgacaacccgcacgacggcgaagtgcgcggcgtcgcatggtgggacggacatacggcgtatttcattccgtttgaacggctggtgcagtccgacatgcggccgctggccgactggctcgccgacgcgcgtcggccgaagcgtacgcacgactcccatcgcgctgaagtggcgctgttctggcacggccttgcgtttcgcggcacgtcgttctgcacgcatatcgccgcctatttgctcgaccccacggaatcgcgccatacgctggcggacctgtcgcgccgctacggtctgccgccggtaccggaagccgaggacgtttacggcaagggcgcgaagttcaaggttcccgatcgcgacacgctggcgcgttacgtcggccgcaaggccgccctagtcgcgcggctcgttccgctgctcgaggcggatttggcggcctgcggcatgcgttcgcttttttacgacctggagctgccgctttcatccgaactcgccgtcatggagacggtcggcgtccgcgtcgacgcggcggcgctcgccgcctacggcgaggaattgcgcgaggcggcggcgaaagtcgagcgggagatttacgagctggccgggacgacgttcaacatcggatcgacgaaacagctcggcgaaattttgttcgataagctggggctgcccgtcgtcaagaaaacgaaaaccggctattccaccgacgcagacgtgctggaggaactggcgccgtaccatccgatcgtcgaaaagattttgcattaccgccaactgacgaaattgcagtcgacctacatcgaggggcttttgaaagaaatccgtccgcaaaccggtaaaatccatacgtattatcagcagacgatcgcggcgacggggcggctgagcagtcagtttcccaatcttcagaacattccgatccgtctcgaagaggggcggaaaatccgcaaggcgttcgttccgtcagaaccgggatggctgatgctcgccgccgactattcgcagatcgaactgcgcgtgctcgcgcacgtttccggcgacgaacggctgaaggaagcgtttcggacaggcatggacatccacacgaagaccgcgatggacgtgttcggcgtttccgaagaccgcgtcgacgcgcgcatgcggcgggatgcgaaggcggtcaatttcggcatcatctacggcatcagcgatttcggactggcgcaaaacctgaacatttcccgcaaggaggcggcggagttcatccggcaatatttcgccgtcttttcgggcgtcaaggcgtaccgcgagcggatcgtcgagcaggcgcgccgcgacggttacgtgacgaccctgctcggtcgcaggcgctatttgccggacatcaacgcgtcgaattacaacctccgctcgttcgcggagcggacggcgatgaatacgccgatccagggcacggccgccgacatcatcaagaccgcgatggtgcgtctgacgcggcggatgcgcgacgtcggactgaagagccgcatgctgctgcaggttcacgacgagctcgtgtttgaagtgccgccggacgagctcgacgcgatgcgggagcttgtgacggacgtcatggagtcggcggtcccgctcgacgtgccgctgaaggtcgacgtcagctggggcgccgactggtacgcggcgaagtgagggaagcgggatcc

SEQ ID NO: 1449 - DNA, 2792 bp, Artificial Sequence
  Description of Artificial Sequence: Synthetic Caldibacillus cellulovorans CompA.2 DNA Polymerase Q753F
atgaaatacctgctgccgaccgctgctgctggtctgctgctcctcgctgcccagccggcgatggccatgggcaaactgattctggtcgacggaaacagcgtcgccaaccgggcgttttacgccgtccggctgctcagcacgcgcggcggcctgcacacaaacgcggtgtacggattcgccaacatgttgctcaagctgatcgaggaggaacggccgacgcattttctcgtcgcgttcgacgcgggcaaggcgacgttccgtcatcgcgaatacgaggcctacaaggcgggtcgcctgcagacgccgcccgagctgtccgagcagtttccgtacatccgggagctcgtccgggcgttcggcgtcgcgtccggcgagctggaggaatacgaggcggacgacatgatcggtacgctggcgaaacgggcggaggccgagggcgtcgacacgctggtcgtcaccggcgaccgcgatttgctccagctcgtatcggaccgcgtgaccgtcgcgctgacgcgcaagggcatcacggaaacggagcggtacgacccggcgcgcatccgcgaggaatacggcttcgatcccgaccgcatccgcgacctcaaagggctgatgggcgacgcgtctgacaatcttcccggcgttcccggcgtcggtgagaaaaccgcactgaaactgctcaggcagtacggttcgctggagagcgtcctggaacacgcgtcggaaatcgccggaaagctcggtgaaaatctgcgggcgcacgccgacgccgcccgattgagcaagcggctggcgacgatcgactgcgcggtaccgttgcagtcgggatgggactggctgcgcctcggcgaaccggaccgcgccgcgctcgcctcgctgttgcggcagctcgaattcaagtcgctgttgaaacggctcggactcgacggcacgtccgccgatgccgacgtcgacggcgtccgttcctccgcgcggccggcggacgagaaacggccgagggccgtcgccgtcgctgaggagggcgtcgacgtccgctgtccggatcgcccggaagaagtcgaagaagcgctgtcgcggctggaagccgcccagtcggtcgtcgtcgaggtgacgggcgacaacccgcacgacggcgaagtgcgcggcgtcgcatggtgggacggacatacggcgtatttcattccgtttgaacggctggtgcagtccgacatgcggccgctggccgactggctcgccgacgcgcgtcggccgaagcgtacgcacgactcccatcgcgctgaagtggcgctgttctggcacggccttgcgtttcgcggcacgtcgttctgcacgcatatcgccgcctatttgctcgaccccacggaatcgcgccatacgctggcggacctgtcgcgccgctacggtctgccgccggtaccggaagccgaggacgtttacggcaagggcgcgaagttcaaggttcccgatcgcgacacgctggcgcgttacgtcggccgcaaggccgccctagtcgcgcggctcgttccgctgctcgaggcggatttggcggcctgcggcatgcgttcgcttttttacgacctggagctgccgctttcatccgaactcgccgtcatggagacggtcggcgtccgcgtcgacgcggcggcgctcgccgcctacggcgaggaattgcgcgaggcggcggcgaaagtcgagcgggagatttacgagctggccgggacgacgttcaacatcggatcgacgaaacagctcggcgaaattttgttcgataagctggggctgcccgtcgtcaagaaaacgaaaaccggctattccaccgacgcagacgtgctggaggaactggcgccgtaccatccgatcgtcgaaaagattttgcattaccgccaactgacgaaattgcagtcgacctacatcgaggggcttttgaaagaaatccgtccgcaaaccggtaaaatccatacgtattatcagcagacgatcgcggcgacggggcggctgagcagtcagtttcccaatcttcagaacattccgatccgtctcgaagaggggcggaaaatccgcaaggcgttcgttccgtcagaaccgggatggctgatgctcgccgccgactattcgcagatcgaactgcgcgtgctcgcgcacgtttccggcgacgaacggctgaaggaagcgtttcggacaggcatggacatccacacgaagaccgcgatggacgtgttcggcgtttccgaagaccgcgtcgacgcgcgcatgcggcggtttgcgaaggcggtcaatttcggcatcatctacggcatcagcgatttcggactggcgcaaaacctgaacatttcccgcaaggaggcggcggagttcatccggcaatatttcgccgtcttttcgggcgtcaaggcgtaccgcgagcggatcgtcgagcaggcgcgccgcgacggttacgtgacgaccctgctcggtcgcaggcgctatttgccggacatcaacgcgtcgaattacaacctccgctcgttcgcggagcggacggcgatgaatacgccgatccagggcacggccgccgacatcatcaagaccgcgatggtgcgtctgacgcggcggatgcgcgacgtcggactgaagagccgcatgctgctgcaggttcacgacgagctcgtgtttgaagtgccgccggacgagctcgacgcgatgcgggagcttgtgacggacgtcatggagtcggcggtcccgctcgacgtgccgctgaaggtcgacgtcagctggggcgccgactggtacgcggcgaagtgagggaagcgggatcc

SEQ ID NO: 1450 - DNA, 2792 bp, Artificial Sequence
  Description of Artificial Sequence: Synthetic Caldibacillus cellulovorans CompA.2 DNA Polymerase Q753G
atgaaatacctgctgccgaccgctgctgctggtctgctgctcctcgctgcccagccggcgatggccatgggcaaactgattctggtcgacggaaacagcgtcgccaaccgggcgttttacgccgtccggctgctcagcacgcgcggcggcctgcacacaaacgcggtgtacggattcgccaacatgttgctcaagctgatcgaggaggaacggccgacgcattttctcgtcgcgttcgacgcgggcaaggcgacgttccgtcatcgcgaatacgaggcctacaaggcgggtcgcctgcagacgccgcccgagctgtccgagcagtttccgtacatccgggagctcgtccgggcgttcggcgtcgcgtccggcgagctggaggaatacgaggcggacgacatgatcggtacgctggcgaaacgggcggaggccgagggcgtcgacacgctggtcgtcaccggcgaccgcgatttgctccagctcgtatcggaccgcgtgaccgtcgcgctgacgcgcaagggcatcacggaaacggagcggtacgacccggcgcgcatccgcgaggaatacggcttcgatcccgaccgcatccgcgacctcaaagggctgatgggcgacgcgtctgacaatcttcccggcgttcccggcgtcggtgagaaaaccgcactgaaactgctcaggcagtacggttcgctggagagcgtcctggaacacgcgtcggaaatcgccggaaagctcggtgaaaatctgcgggcgcacgccgacgccgcccgattgagcaagcggctggcgacgatcgactgcgcggtaccgttgcagtcgggatgggactggctgcgcctcggcgaaccggaccgcgccgcgctcgcctcgctgttgcggcagctcgaattcaagtcgctgttgaaacggctcggactcgacggcacgtccgccgatgccgacgtcgacggcgtccgttcctccgcgcggccggcggacgagaaacggccgagggccgtcgccgtcgctgaggagggcgtcgacgtccgctgtccggatcgcccggaagaagtcgaagaagcgctgtcgcggctggaagccgcccagtcggtcgtcgtcgaggtgacgggcgacaacccgcacgacggcgaagtgcgcggcgtcgcatggtgggacggacatacggcgtatttcattccgtttgaacggctggtgcagtccgacatgcggccgctggccgactggctcgccgacgcgcgtcggccgaagcgtacgcacgactcccatcgcgctgaagtggcgctgttctggcacggccttgcgtttcgcggcacgtcgttctgcacgcatatcgccgcctatttgctcgaccccacggaatcgcgccatacgctggcggacctgtcgcgccgctacggtctgccgccggtaccggaagccgaggacgtttacggcaagggcgcgaagttcaaggttcccgatcgcgacacgctggcgcgttacgtcggccgcaaggccgccctagtcgcgcggctcgttccgctgctcgaggcggatttggcggcctgcggcatgcgttcgcttttttacgacctggagctgccgctttcatccgaactcgccgtcatggagacggtcggcgtccgcgtcgacgcggcggcgctcgccgcctacggcgaggaattgcgcgaggcggcggcgaaagtcgagcgggagatttacgagctggccgggacgacgttcaacatcggatcgacgaaacagctcggcgaaattttgttcgataagctggggctgcccgtcgtcaagaaaacgaaaaccggctattccaccgacgcagacgtgctggaggaactggcgccgtaccatccgatcgtcgaaaagattttgcattaccgccaactgacgaaattgcagtcgacctacatcgaggggcttttgaaagaaatccgtccgcaaaccggtaaaatccatacgtattatcagcagacgatcgcggcgacggggcggctgagcagtcagtttcccaatcttcagaacattccgatccgtctcgaagaggggcggaaaatccgcaaggcgttcgttccgtcagaaccgggatggctgatgctcgccgccgactattcgcagatcgaactgcgcgtgctcgcgcacgtttccggcgacgaacggctgaaggaagcgtttcggacaggcatggacatccacacgaagaccgcgatggacgtgttcggcgtttccgaagaccgcgtcgacgcgcgcatgcggcggggtgcgaaggcggtcaatttcggcatcatctacggcatcagcgatttcggactggcgcaaaacctgaacatttcccgcaaggaggcggcggagttcatccggcaatatttcgccgtcttttcgggcgtcaaggcgtaccgcgagcggatcgtcgagcaggcgcgccgcgacggttacgtgacgaccctgctcggtcgcaggcgctatttgccggacatcaacgcgtcgaattacaacctccgctcgttcgcggagcggacggcgatgaatacgccgatccagggcacggccgccgacatcatcaagaccgcgatggtgcgtctgacgcggcggatgcgcgacgtcggactgaagagccgcatgctgctgcaggttcacgacgagctcgtgtttgaagtgccgccggacgagctcgacgcgatgcgggagcttgtgacggacgtcatggagtcggcggtcccgctcgacgtgccgctgaaggtcgacgtcagctggggcgccgactggtacgcggcgaagtgagggaagcgggatcc

SEQ ID NO: 1451 - DNA, 2792 bp, Artificial Sequence
  Description of Artificial Sequence: Synthetic Caldibacillus cellulovorans CompA.2 DNA Polymerase Q753H
atgaaatacctgctgccgaccgctgctgctggtctgctgctcctcgctgcccagccggcgatggccatgggcaaactgattctggtcgacggaaacagcgtcgccaaccgggcgttttacgccgtccggctgctcagcacgcgcggcggcctgcacacaaacgcggtgtacggattcgccaacatgttgctcaagctgatcgaggaggaacggccgacgcattttctcgtcgcgttcgacgcgggcaaggcgacgttccgtcatcgcgaatacgaggcctacaaggcgggtcgcctgcagacgccgcccgagctgtccgagcagtttccgtacatccgggagctcgtccgggcgttcggcgtcgcgtccggcgagctggaggaatacgaggcggacgacatgatcggtacgctggcgaaacgggcggaggccgagggcgtcgacacgctggtcgtcaccggcgaccgcgatttgctccagctcgtatcggaccgcgtgaccgtcgcgctgacgcgcaagggcatcacggaaacggagcggtacgacccggcgcgcatccgcgaggaatacggcttcgatcccgaccgcatccgcgacctcaaagggctgatgggcgacgcgtctgacaatcttcccggcgttcccggcgtcggtgagaaaaccgcactgaaactgctcaggcagtacggttcgctggagagcgtcctggaacacgcgtcggaaatcgccggaaagctcggtgaaaatctgcgggcgcacgccgacgccgcccgattgagcaagcggctggcgacgatcgactgcgcggtaccgttgcagtcgggatgggactggctgcgcctcggcgaaccggaccgcgccgcgctcgcctcgctgttgcggcagctcgaattcaagtcgctgttgaaacggctcggactcgacggcacgtccgccgatgccgacgtcgacggcgtccgttcctccgcgcggccggcggacgagaaacggccgagggccgtcgccgtcgctgaggagggcgtcgacgtccgctgtccggatcgcccggaagaagtcgaagaagcgctgtcgcggctggaagccgcccagtcggtcgtcgtcgaggtgacgggcgacaacccgcacgacggcgaagtgcgcggcgtcgcatggtgggacggacatacggcgtatttcattccgtttgaacggctggtgcagtccgacatgcggccgctggccgactggctcgccgacgcgcgtcggccgaagcgtacgcacgactcccatcgcgctgaagtggcgctgttctggcacggccttgcgtttcgcggcacgtcgttctgcacgcatatcgccgcctatttgctcgaccccacggaatcgcgccatacgctggcggacctgtcgcgccgctacggtctgccgccggtaccggaagccgaggacgtttacggcaagggcgcgaagttcaaggttcccgatcgcgacacgctggcgcgttacgtcggccgcaaggccgccctagtcgcgcggctcgttccgctgctcgaggcggatttggcggcctgcggcatgcgttcgcttttttacgacctggagctgccgctttcatccgaactcgccgtcatggagacggtcggcgtccgcgtcgacgcggcggcgctcgccgcctacggcgaggaattgcgcgaggcggcggcgaaagtcgagcgggagatttacgagctggccgggacgacgttcaacatcggatcgacgaaacagctcggcgaaattttgttcgataagctggggctgcccgtcgtcaagaaaacgaaaaccggctattccaccgacgcagacgtgctggaggaactggcgccgtaccatccgatcgtcgaaaagattttgcattaccgccaactgacgaaattgcagtcgacctacatcgaggggcttttgaaagaaatccgtccgcaaaccggtaaaatccatacgtattatcagcagacgatcgcggcgacggggcggctgagcagtcagtttcccaatcttcagaacattccgatccgtctcgaagaggggcggaaaatccgcaaggcgttcgttccgtcagaaccgggatggctgatgctcgccgccgactattcgcagatcgaactgcgcgtgctcgcgcacgtttccggcgacgaacggctgaaggaagcgtttcggacaggcatggacatccacacgaagaccgcgatggacgtgttcggcgtttccgaagaccgcgtcgacgcgcgcatgcggcggcatgcgaaggcggtcaatttcggcatcatctacggcatcagcgatttcggactggcgcaaaacctgaacatttcccgcaaggaggcggcggagttcatccggcaatatttcgccgtcttttcgggcgtcaaggcgtaccgcgagcggatcgtcgagcaggcgcgccgcgacggttacgtgacgaccctgctcggtcgcaggcgctatttgccggacatcaacgcgtcgaattacaacctccgctcgttcgcggagcggacggcgatgaatacgccgatccagggcacggccgccgacatcatcaagaccgcgatggtgcgtctgacgcggcggatgcgcgacgtcggactgaagagccgcatgctgctgcaggttcacgacgagctcgtgtttgaagtgccgccggacgagctcgacgcgatgcgggagcttgtgacggacgtcatggagtcggcggtcccgctcgacgtgccgctgaaggtcgacgtcagctggggcgccgactggtacgcggcgaagtgagggaagcgggatcc

SEQ ID NO: 1452 - DNA, 2792 bp, Artificial Sequence
  Description of Artificial Sequence: Synthetic Caldibacillus cellulovorans CompA.2 DNA Polymerase Q753I
atgaaatacctgctgccgaccgctgctgctggtctgctgctcctcgctgcccagccggcgatggccatgggcaaactgattctggtcgacggaaacagcgtcgccaaccgggcgttttacgccgtccggctgctcagcacgcgcggcggcctgcacacaaacgcggtgtacggattcgccaacatgttgctcaagctgatcgaggaggaacggccgacgcattttctcgtcgcgttcgacgcgggcaaggcgacgttccgtcatcgcgaatacgaggcctacaaggcgggtcgcctgcagacgccgcccgagctgtccgagcagtttccgtacatccgggagctcgtccgggcgttcggcgtcgcgtccggcgagctggaggaatacgaggcggacgacatgatcggtacgctggcgaaacgggcggaggccgagggcgtcgacacgctggtcgtcaccggcgaccgcgatttgctccagctcgtatcggaccgcgtgaccgtcgcgctgacgcgcaagggcatcacggaaacggagcggtacgacccggcgcgcatccgcgaggaatacggcttcgatcccgaccgcatccgcgacctcaaagggctgatgggcgacgcgtctgacaatcttcccggcgttcccggcgtcggtgagaaaaccgcactgaaactgctcaggcagtacggttcgctggagagcgtcctggaacacgcgtcggaaatcgccggaaagctcggtgaaaatctgcgggcgcacgccgacgccgcccgattgagcaagcggctggcgacgatcgactgcgcggtaccgttgcagtcgggatgggactggctgcgcctcggcgaaccggaccgcgccgcgctcgcctcgctgttgcggcagctcgaattcaagtcgctgttgaaacggctcggactcgacggcacgtccgccgatgccgacgtcgacggcgtccgttcctccgcgcggccggcggacgagaaacggccgagggccgtcgccgtcgctgaggagggcgtcgacgtccgctgtccggatcgcccggaagaagtcgaagaagcgctgtcgcggctggaagccgcccagtcggtcgtcgtcgaggtgacgggcgacaacccgcacgacggcgaagtgcgcggcgtcgcatggtgggacggacatacggcgtatttcattccgtttgaacggctggtgcagtccgacatgcggccgctggccgactggctcgccgacgcgcgtcggccgaagcgtacgcacgactcccatcgcgctgaagtggcgctgttctggcacggccttgcgtttcgcggcacgtcgttctgcacgcatatcgccgcctatttgctcgaccccacggaatcgcgccatacgctggcggacctgtcgcgccgctacggtctgccgccggtaccggaagccgaggacgtttacggcaagggcgcgaagttcaaggttcccgatcgcgacacgctggcgcgttacgtcggccgcaaggccgccctagtcgcgcggctcgttccgctgctcgaggcggatttggcggcctgcggcatgcgttcgcttttttacgacctggagctgccgctttcatccgaactcgccgtcatggagacggtcggcgtccgcgtcgacgcggcggcgctcgccgcctacggcgaggaattgcgcgaggcggcggcgaaagtcgagcgggagatttacgagctggccgggacgacgttcaacatcggatcgacgaaacagctcggcgaaattttgttcgataagctggggctgcccgtcgtcaagaaaacgaaaaccggctattccaccgacgcagacgtgctggaggaactggcgccgtaccatccgatcgtcgaaaagattttgcattaccgccaactgacgaaattgcagtcgacctacatcgaggggcttttgaaagaaatccgtccgcaaaccggtaaaatccatacgtattatcagcagacgatcgcggcgacggggcggctgagcagtcagtttcccaatcttcagaacattccgatccgtctcgaagaggggcggaaaatccgcaaggcgttcgttccgtcagaaccgggatggctgatgctcgccgccgactattcgcagatcgaactgcgcgtgctcgcgcacgtttccggcgacgaacggctgaaggaagcgtttcggacaggcatggacatccacacgaagaccgcgatggacgtgttcggcgtttccgaagaccgcgtcgacgcgcgcatgcggcggattgcgaaggcggtcaatttcggcatcatctacggcatcagcgatttcggactggcgcaaaacctgaacatttcccgcaaggaggcggcggagttcatccggcaatatttcgccgtcttttcgggcgtcaaggcgtaccgcgagcggatcgtcgagcaggcgcgccgcgacggttacgtgacgaccctgctcggtcgcaggcgctatttgccggacatcaacgcgtcgaattacaacctccgctcgttcgcggagcggacggcgatgaatacgccgatccagggcacggccgccgacatcatcaagaccgcgatggtgcgtctgacgcggcggatgcgcgacgtcggactgaagagccgcatgctgctgcaggttcacgacgagctcgtgtttgaagtgccgccggacgagctcgacgcgatgcgggagcttgtgacggacgtcatggagtcggcggtcccgctcgacgtgccgctgaaggtcgacgtcagctggggcgccgactggtacgcggcgaagtgagggaagcgggatcc

SEQ ID NO: 1453 - DNA, 2792 bp, Artificial Sequence
  Description of Artificial Sequence: Synthetic Caldibacillus cellulovorans CompA.2 DNA Polymerase Q753L
atgaaatacctgctgccgaccgctgctgctggtctgctgctcctcgctgcccagccggcgatggccatgggcaaactgattctggtcgacggaaacagcgtcgccaaccgggcgttttacgccgtccggctgctcagcacgcgcggcggcctgcacacaaacgcggtgtacggattcgccaacatgttgctcaagctgatcgaggaggaacggccgacgcattttctcgtcgcgttcgacgcgggcaaggcgacgttccgtcatcgcgaatacgaggcctacaaggcgggtcgcctgcagacgccgcccgagctgtccgagcagtttccgtacatccgggagctcgtccgggcgttcggcgtcgcgtccggcgagctggaggaatacgaggcggacgacatgatcggtacgctggcgaaacgggcggaggccgagggcgtcgacacgctggtcgtcaccggcgaccgcgatttgctccagctcgtatcggaccgcgtgaccgtcgcgctgacgcgcaagggcatcacggaaacggagcggtacgacccggcgcgcatccgcgaggaatacggcttcgatcccgaccgcatccgcgacctcaaagggctgatgggcgacgcgtctgacaatcttcccggcgttcccggcgtcggtgagaaaaccgcactgaaactgctcaggcagtacggttcgctggagagcgtcctggaacacgcgtcggaaatcgccggaaagctcggtgaaaatctgcgggcgcacgccgacgccgcccgattgagcaagcggctggcgacgatcgactgcgcggtaccgttgcagtcgggatgggactggctgcgcctcggcgaaccggaccgcgccgcgctcgcctcgctgttgcggcagctcgaattcaagtcgctgttgaaacggctcggactcgacggcacgtccgccgatgccgacgtcgacggcgtccgttcctccgcgcggccggcggacgagaaacggccgagggccgtcgccgtcgctgaggagggcgtcgacgtccgctgtccggatcgcccggaagaagtcgaagaagcgctgtcgcggctggaagccgcccagtcggtcgtcgtcgaggtgacgggcgacaacccgcacgacggcgaagtgcgcggcgtcgcatggtgggacggacatacggcgtatttcattccgtttgaacggctggtgcagtccgacatgcggccgctggccgactggctcgccgacgcgcgtcggccgaagcgtacgcacgactcccatcgcgctgaagtggcgctgttctggcacggccttgcgtttcgcggcacgtcgttctgcacgcatatcgccgcctatttgctcgaccccacggaatcgcgccatacgctggcggacctgtcgcgccgctacggtctgccgccggtaccggaagccgaggacgtttacggcaagggcgcgaagttcaaggttcccgatcgcgacacgctggcgcgttacgtcggccgcaaggccgccctagtcgcgcggctcgttccgctgctcgaggcggatttggcggcctgcggcatgcgttcgcttttttacgacctggagctgccgctttcatccgaactcgccgtcatggagacggtcggcgtccgcgtcgacgcggcggcgctcgccgcctacggcgaggaattgcgcgaggcggcggcgaaagtcgagcgggagatttacgagctggccgggacgacgttcaacatcggatcgacgaaacagctcggcgaaattttgttcgataagctggggctgcccgtcgtcaagaaaacgaaaaccggctattccaccgacgcagacgtgctggaggaactggcgccgtaccatccgatcgtcgaaaagattttgcattaccgccaactgacgaaattgcagtcgacctacatcgaggggcttttgaaagaaatccgtccgcaaaccggtaaaatccatacgtattatcagcagacgatcgcggcgacggggcggctgagcagtcagtttcccaatcttcagaacattccgatccgtctcgaagaggggcggaaaatccgcaaggcgttcgttccgtcagaaccgggatggctgatgctcgccgccgactattcgcagatcgaactgcgcgtgctcgcgcacgtttccggcgacgaacggctgaaggaagcgtttcggacaggcatggacatccacacgaagaccgcgatggacgtgttcggcgtttccgaagaccgcgtcgacgcgcgcatgcggcggcttgcgaaggcggtcaatttcggcatcatctacggcatcagcgatttcggactggcgcaaaacctgaacatttcccgcaaggaggcggcggagttcatccggcaatatttcgccgtcttttcgggcgtcaaggcgtaccgcgagcggatcgtcgagcaggcgcgccgcgacggttacgtgacgaccctgctcggtcgcaggcgctatttgccggacatcaacgcgtcgaattacaacctccgctcgttcgcggagcggacggcgatgaatacgccgatccagggcacggccgccgacatcatcaagaccgcgatggtgcgtctgacgcggcggatgcgcgacgtcggactgaagagccgcatgctgctgcaggttcacgacgagctcgtgtttgaagtgccgccggacgagctcgacgcgatgcgggagcttgtgacggacgtcatggagtcggcggtcccgctcgacgtgccgctgaaggtcgacgtcagctggggcgccgactggtacgcggcgaagtgagggaagcgggatcc

SEQ ID NO: 1454 - DNA, 2792 bp, Artificial Sequence
  Description of Artificial Sequence: Synthetic Caldibacillus cellulovorans CompA.2 DNA Polymerase Q753M
atgaaatacctgctgccgaccgctgctgctggtctgctgctcctcgctgcccagccggcgatggccatgggcaaactgattctggtcgacggaaacagcgtcgccaaccgggcgttttacgccgtccggctgctcagcacgcgcggcggcctgcacacaaacgcggtgtacggattcgccaacatgttgctcaagctgatcgaggaggaacggccgacgcattttctcgtcgcgttcgacgcgggcaaggcgacgttccgtcatcgcgaatacgaggcctacaaggcgggtcgcctgcagacgccgcccgagctgtccgagcagtttccgtacatccgggagctcgtccgggcgttcggcgtcgcgtccggcgagctggaggaatacgaggcggacgacatgatcggtacgctggcgaaacgggcggaggccgagggcgtcgacacgctggtcgtcaccggcgaccgcgatttgctccagctcgtatcggaccgcgtgaccgtcgcgctgacgcgcaagggcatcacggaaacggagcggtacgacccggcgcgcatccgcgaggaatacggcttcgatcccgaccgcatccgcgacctcaaagggctgatgggcgacgcgtctgacaatcttcccggcgttcccggcgtcggtgagaaaaccgcactgaaactgctcaggcagtacggttcgctggagagcgtcctggaacacgcgtcggaaatcgccggaaagctcggtgaaaatctgcgggcgcacgccgacgccgcccgattgagcaagcggctggcgacgatcgactgcgcggtaccgttgcagtcgggatgggactggctgcgcctcggcgaaccggaccgcgccgcgctcgcctcgctgttgcggcagctcgaattcaagtcgctgttgaaacggctcggactcgacggcacgtccgccgatgccgacgtcgacggcgtccgttcctccgcgcggccggcggacgagaaacggccgagggccgtcgccgtcgctgaggagggcgtcgacgtccgctgtccggatcgcccggaagaagtcgaagaagcgctgtcgcggctggaagccgcccagtcggtcgtcgtcgaggtgacgggcgacaacccgcacgacggcgaagtgcgcggcgtcgcatggtgggacggacatacggcgtatttcattccgtttgaacggctggtgcagtccgacatgcggccgctggccgactggctcgccgacgcgcgtcggccgaagcgtacgcacgactcccatcgcgctgaagtggcgctgttctggcacggccttgcgtttcgcggcacgtcgttctgcacgcatatcgccgcctatttgctcgaccccacggaatcgcgccatacgctggcggacctgtcgcgccgctacggtctgccgccggtaccggaagccgaggacgtttacggcaagggcgcgaagttcaaggttcccgatcgcgacacgctggcgcgttacgtcggccgcaaggccgccctagtcgcgcggctcgttccgctgctcgaggcggatttggcggcctgcggcatgcgttcgcttttttacgacctggagctgccgctttcatccgaactcgccgtcatggagacggtcggcgtccgcgtcgacgcggcggcgctcgccgcctacggcgaggaattgcgcgaggcggcggcgaaagtcgagcgggagatttacgagctggccgggacgacgttcaacatcggatcgacgaaacagctcggcgaaattttgttcgataagctggggctgcccgtcgtcaagaaaacgaaaaccggctattccaccgacgcagacgtgctggaggaactggcgccgtaccatccgatcgtcgaaaagattttgcattaccgccaactgacgaaattgcagtcgacctacatcgaggggcttttgaaagaaatccgtccgcaaaccggtaaaatccatacgtattatcagcagacgatcgcggcgacggggcggctgagcagtcagtttcccaatcttcagaacattccgatccgtctcgaagaggggcggaaaatccgcaaggcgttcgttccgtcagaaccgggatggctgatgctcgccgccgactattcgcagatcgaactgcgcgtgctcgcgcacgtttccggcgacgaacggctgaaggaagcgtttcggacaggcatggacatccacacgaagaccgcgatggacgtgttcggcgtttccgaagaccgcgtcgacgcgcgcatgcggcggatggcgaaggcggtcaatttcggcatcatctacggcatcagcgatttcggactggcgcaaaacctgaacatttcccgcaaggaggcggcggagttcatccggcaatatttcgccgtcttttcgggcgtcaaggcgtaccgcgagcggatcgtcgagcaggcgcgccgcgacggttacgtgacgaccctgctcggtcgcaggcgctatttgccggacatcaacgcgtcgaattacaacctccgctcgttcgcggagcggacggcgatgaatacgccgatccagggcacggccgccgacatcatcaagaccgcgatggtgcgtctgacgcggcggatgcgcgacgtcggactgaagagccgcatgctgctgcaggttcacgacgagctcgtgtttgaagtgccgccggacgagctcgacgcgatgcgggagcttgtgacggacgtcatggagtcggcggtcccgctcgacgtgccgctgaaggtcgacgtcagctggggcgccgactggtacgcggcgaagtgagggaagcgggatcc

SEQ ID NO: 1455 - DNA, 2792 bp, Artificial Sequence
  Description of Artificial Sequence: Synthetic Caldibacillus cellulovorans CompA.2 DNA Polymerase Q753N
atgaaatacctgctgccgaccgctgctgctggtctgctgctcctcgctgcccagccggcgatggccatgggcaaactgattctggtcgacggaaacagcgtcgccaaccgggcgttttacgccgtccggctgctcagcacgcgcggcggcctgcacacaaacgcggtgtacggattcgccaacatgttgctcaagctgatcgaggaggaacggccgacgcattttctcgtcgcgttcgacgcgggcaaggcgacgttccgtcatcgcgaatacgaggcctacaaggcgggtcgcctgcagacgccgcccgagctgtccgagcagtttccgtacatccgggagctcgtccgggcgttcggcgtcgcgtccggcgagctggaggaatacgaggcggacgacatgatcggtacgctggcgaaacgggcggaggccgagggcgtcgacacgctggtcgtcaccggcgaccgcgatttgctccagctcgtatcggaccgcgtgaccgtcgcgctgacgcgcaagggcatcacggaaacggagcggtacgacccggcgcgcatccgcgaggaatacggcttcgatcccgaccgcatccgcgacctcaaagggctgatgggcgacgcgtctgacaatcttcccggcgttcccggcgtcggtgagaaaaccgcactgaaactgctcaggcagtacggttcgctggagagcgtcctggaacacgcgtcggaaatcgccggaaagctcggtgaaaatctgcgggcgcacgccgacgccgcccgattgagcaagcggctggcgacgatcgactgcgcggtaccgttgcagtcgggatgggactggctgcgcctcggcgaaccggaccgcgccgcgctcgcctcgctgttgcggcagctcgaattcaagtcgctgttgaaacggctcggactcgacggcacgtccgccgatgccgacgtcgacggcgtccgttcctccgcgcggccggcggacgagaaacggccgagggccgtcgccgtcgctgaggagggcgtcgacgtccgctgtccggatcgcccggaagaagtcgaagaagcgctgtcgcggctggaagccgcccagtcggtcgtcgtcgaggtgacgggcgacaacccgcacgacggcgaagtgcgcggcgtcgcatggtgggacggacatacggcgtatttcattccgtttgaacggctggtgcagtccgacatgcggccgctggccgactggctcgccgacgcgcgtcggccgaagcgtacgcacgactcccatcgcgctgaagtggcgctgttctggcacggccttgcgtttcgcggcacgtcgttctgcacgcatatcgccgcctatttgctcgaccccacggaatcgcgccatacgctggcggacctgtcgcgccgctacggtctgccgccggtaccggaagccgaggacgtttacggcaagggcgcgaagttcaaggttcccgatcgcgacacgctggcgcgttacgtcggccgcaaggccgccctagtcgcgcggctcgttccgctgctcgaggcggatttggcggcctgcggcatgcgttcgcttttttacgacctggagctgccgctttcatccgaactcgccgtcatggagacggtcggcgtccgcgtcgacgcggcggcgctcgccgcctacggcgaggaattgcgcgaggcggcggcgaaagtcgagcgggagatttacgagctggccgggacgacgttcaacatcggatcgacgaaacagctcggcgaaattttgttcgataagctggggctgcccgtcgtcaagaaaacgaaaaccggctattccaccgacgcagacgtgctggaggaactggcgccgtaccatccgatcgtcgaaaagattttgcattaccgccaactgacgaaattgcagtcgacctacatcgaggggcttttgaaagaaatccgtccgcaaaccggtaaaatccatacgtattatcagcagacgatcgcggcgacggggcggctgagcagtcagtttcccaatcttcagaacattccgatccgtctcgaagaggggcggaaaatccgcaaggcgttcgttccgtcagaaccgggatggctgatgctcgccgccgactattcgcagatcgaactgcgcgtgctcgcgcacgtttccggcgacgaacggctgaaggaagcgtttcggacaggcatggacatccacacgaagaccgcgatggacgtgttcggcgtttccgaagaccgcgtcgacgcgcgcatgcggcggaatgcgaaggcggtcaatttcggcatcatctacggcatcagcgatttcggactggcgcaaaacctgaacatttcccgcaaggaggcggcggagttcatccggcaatatttcgccgtcttttcgggcgtcaaggcgtaccgcgagcggatcgtcgagcaggcgcgccgcgacggttacgtgacgaccctgctcggtcgcaggcgctatttgccggacatcaacgcgtcgaattacaacctccgctcgttcgcggagcggacggcgatgaatacgccgatccagggcacggccgccgacatcatcaagaccgcgatggtgcgtctgacgcggcggatgcgcgacgtcggactgaagagccgcatgctgctgcaggttcacgacgagctcgtgtttgaagtgccgccggacgagctcgacgcgatgcgggagcttgtgacggacgtcatggagtcggcggtcccgctcgacgtgccgctgaaggtcgacgtcagctggggcgccgactggtacgcggcgaagtgagggaagcgggatcc

SEQ ID NO: 1456 - DNA, 2792 bp, Artificial Sequence
  Description of Artificial Sequence: Synthetic Caldibacillus cellulovorans CompA.2 DNA Polymerase Q753P
atgaaatacctgctgccgaccgctgctgctggtctgctgctcctcgctgcccagccggcgatggccatgggcaaactgattctggtcgacggaaacagcgtcgccaaccgggcgttttacgccgtccggctgctcagcacgcgcggcggcctgcacacaaacgcggtgtacggattcgccaacatgttgctcaagctgatcgaggaggaacggccgacgcattttctcgtcgcgttcgacgcgggcaaggcgacgttccgtcatcgcgaatacgaggcctacaaggcgggtcgcctgcagacgccgcccgagctgtccgagcagtttccgtacatccgggagctcgtccgggcgttcggcgtcgcgtccggcgagctggaggaatacgaggcggacgacatgatcggtacgctggcgaaacgggcggaggccgagggcgtcgacacgctggtcgtcaccggcgaccgcgatttgctccagctcgtatcggaccgcgtgaccgtcgcgctgacgcgcaagggcatcacggaaacggagcggtacgacccggcgcgcatccgcgaggaatacggcttcgatcccgaccgcatccgcgacctcaaagggctgatgggcgacgcgtctgacaatcttcccggcgttcccggcgtcggtgagaaaaccgcactgaaactgctcaggcagtacggttcgctggagagcgtcctggaacacgcgtcggaaatcgccggaaagctcggtgaaaatctgcgggcgcacgccgacgccgcccgattgagcaagcggctggcgacgatcgactgcgcggtaccgttgcagtcgggatgggactggctgcgcctcggcgaaccggaccgcgccgcgctcgcctcgctgttgcggcagctcgaattcaagtcgctgttgaaacggctcggactcgacggcacgtccgccgatgccgacgtcgacggcgtccgttcctccgcgcggccggcggacgagaaacggccgagggccgtcgccgtcgctgaggagggcgtcgacgtccgctgtccggatcgcccggaagaagtcgaagaagcgctgtcgcggctggaagccgcccagtcggtcgtcgtcgaggtgacgggcgacaacccgcacgacggcgaagtgcgcggcgtcgcatggtgggacggacatacggcgtatttcattccgtttgaacggctggtgcagtccgacatgcggccgctggccgactggctcgccgacgcgcgtcggccgaagcgtacgcacgactcccatcgcgctgaagtggcgctgttctggcacggccttgcgtttcgcggcacgtcgttctgcacgcatatcgccgcctatttgctcgaccccacggaatcgcgccatacgctggcggacctgtcgcgccgctacggtctgccgccggtaccggaagccgaggacgtttacggcaagggcgcgaagttcaaggttcccgatcgcgacacgctggcgcgttacgtcggccgcaaggccgccctagtcgcgcggctcgttccgctgctcgaggcggatttggcggcctgcggcatgcgttcgcttttttacgacctggagctgccgctttcatccgaactcgccgtcatggagacggtcggcgtccgcgtcgacgcggcggcgctcgccgcctacggcgaggaattgcgcgaggcggcggcgaaagtcgagcgggagatttacgagctggccgggacgacgttcaacatcggatcgacgaaacagctcggcgaaattttgttcgataagctggggctgcccgtcgtcaagaaaacgaaaaccggctattccaccgacgcagacgtgctggaggaactggcgccgtaccatccgatcgtcgaaaagattttgcattaccgccaactgacgaaattgcagtcgacctacatcgaggggcttttgaaagaaatccgtccgcaaaccggtaaaatccatacgtattatcagcagacgatcgcggcgacggggcggctgagcagtcagtttcccaatcttcagaacattccgatccgtctcgaagaggggcggaaaatccgcaaggcgttcgttccgtcagaaccgggatggctgatgctcgccgccgactattcgcagatcgaactgcgcgtgctcgcgcacgtttccggcgacgaacggctgaaggaagcgtttcggacaggcatggacatccacacgaagaccgcgatggacgtgttcggcgtttccgaagaccgcgtcgacgcgcgcatgcggcggcctgcgaaggcggtcaatttcggcatcatctacggcatcagcgatttcggactggcgcaaaacctgaacatttcccgcaaggaggcggcggagttcatccggcaatatttcgccgtcttttcgggcgtcaaggcgtaccgcgagcggatcgtcgagcaggcgcgccgcgacggttacgtgacgaccctgctcggtcgcaggcgctatttgccggacatcaacgcgtcgaattacaacctccgctcgttcgcggagcggacggcgatgaatacgccgatccagggcacggccgccgacatcatcaagaccgcgatggtgcgtctgacgcggcggatgcgcgacgtcggactgaagagccgcatgctgctgcaggttcacgacgagctcgtgtttgaagtgccgccggacgagctcgacgcgatgcgggagcttgtgacggacgtcatggagtcggcggtcccgctcgacgtgccgctgaaggtcgacgtcagctggggcgccgactggtacgcggcgaagtgagggaagcgggatcc

SEQ ID NO: 1457 - DNA, 2792 bp, Artificial Sequence
  Description of Artificial Sequence: Synthetic Caldibacillus cellulovorans CompA.2 DNA Polymerase Q753R
atgaaatacctgctgccgaccgctgctgctggtctgctgctcctcgctgcccagccggcgatggccatgggcaaactgattctggtcgacggaaacagcgtcgccaaccgggcgttttacgccgtccggctgctcagcacgcgcggcggcctgcacacaaacgcggtgtacggattcgccaacatgttgctcaagctgatcgaggaggaacggccgacgcattttctcgtcgcgttcgacgcgggcaaggcgacgttccgtcatcgcgaatacgaggcctacaaggcgggtcgcctgcagacgccgcccgagctgtccgagcagtttccgtacatccgggagctcgtccgggcgttcggcgtcgcgtccggcgagctggaggaatacgaggcggacgacatgatcggtacgctggcgaaacgggcggaggccgagggcgtcgacacgctggtcgtcaccggcgaccgcgatttgctccagctcgtatcggaccgcgtgaccgtcgcgctgacgcgcaagggcatcacggaaacggagcggtacgacccggcgcgcatccgcgaggaatacggcttcgatcccgaccgcatccgcgacctcaaagggctgatgggcgacgcgtctgacaatcttcccggcgttcccggcgtcggtgagaaaaccgcactgaaactgctcaggcagtacggttcgctggagagcgtcctggaacacgcgtcggaaatcgccggaaagctcggtgaaaatctgcgggcgcacgccgacgccgcccgattgagcaagcggctggcgacgatcgactgcgcggtaccgttgcagtcgggatgggactggctgcgcctcggcgaaccggaccgcgccgcgctcgcctcgctgttgcggcagctcgaattcaagtcgctgttgaaacggctcggactcgacggcacgtccgccgatgccgacgtcgacggcgtccgttcctccgcgcggccggcggacgagaaacggccgagggccgtcgccgtcgctgaggagggcgtcgacgtccgctgtccggatcgcccggaagaagtcgaagaagcgctgtcgcggctggaagccgcccagtcggtcgtcgtcgaggtgacgggcgacaacccgcacgacggcgaagtgcgcggcgtcgcatggtgggacggacatacggcgtatttcattccgtttgaacggctggtgcagtccgacatgcggccgctggccgactggctcgccgacgcgcgtcggccgaagcgtacgcacgactcccatcgcgctgaagtggcgctgttctggcacggccttgcgtttcgcggcacgtcgttctgcacgcatatcgccgcctatttgctcgaccccacggaatcgcgccatacgctggcggacctgtcgcgccgctacggtctgccgccggtaccggaagccgaggacgtttacggcaagggcgcgaagttcaaggttcccgatcgcgacacgctggcgcgttacgtcggccgcaaggccgccctagtcgcgcggctcgttccgctgctcgaggcggatttggcggcctgcggcatgcgttcgcttttttacgacctggagctgccgctttcatccgaactcgccgtcatggagacggtcggcgtccgcgtcgacgcggcggcgctcgccgcctacggcgaggaattgcgcgaggcggcggcgaaagtcgagcgggagatttacgagctggccgggacgacgttcaacatcggatcgacgaaacagctcggcgaaattttgttcgataagctggggctgcccgtcgtcaagaaaacgaaaaccggctattccaccgacgcagacgtgctggaggaactggcgccgtaccatccgatcgtcgaaaagattttgcattaccgccaactgacgaaattgcagtcgacctacatcgaggggcttttgaaagaaatccgtccgcaaaccggtaaaatccatacgtattatcagcagacgatcgcggcgacggggcggctgagcagtcagtttcccaatcttcagaacattccgatccgtctcgaagaggggcggaaaatccgcaaggcgttcgttccgtcagaaccgggatggctgatgctcgccgccgactattcgcagatcgaactgcgcgtgctcgcgcacgtttccggcgacgaacggctgaaggaagcgtttcggacaggcatggacatccacacgaagaccgcgatggacgtgttcggcgtttccgaagaccgcgtcgacgcgcgcatgcggcggcgtgcgaaggcggtcaatttcggcatcatctacggcatcagcgatttcggactggcgcaaaacctgaacatttcccgcaaggaggcggcggagttcatccggcaatatttcgccgtcttttcgggcgtcaaggcgtaccgcgagcggatcgtcgagcaggcgcgccgcgacggttacgtgacgaccctgctcggtcgcaggcgctatttgccggacatcaacgcgtcgaattacaacctccgctcgttcgcggagcggacggcgatgaatacgccgatccagggcacggccgccgacatcatcaagaccgcgatggtgcgtctgacgcggcggatgcgcgacgtcggactgaagagccgcatgctgctgcaggttcacgacgagctcgtgtttgaagtgccgccggacgagctcgacgcgatgcgggagcttgtgacggacgtcatggagtcggcggtcccgctcgacgtgccgctgaaggtcgacgtcagctggggcgccgactggtacgcggcgaagtgagggaagcgggatcc

SEQ ID NO: 1458 - DNA, 2792 bp, Artificial Sequence
  Description of Artificial Sequence: Synthetic Caldibacillus cellulovorans CompA.2 DNA Polymerase Q753S
atgaaatacctgctgccgaccgctgctgctggtctgctgctcctcgctgcccagccggcgatggccatgggcaaactgattctggtcgacggaaacagcgtcgccaaccgggcgttttacgccgtccggctgctcagcacgcgcggcggcctgcacacaaacgcggtgtacggattcgccaacatgttgctcaagctgatcgaggaggaacggccgacgcattttctcgtcgcgttcgacgcgggcaaggcgacgttccgtcatcgcgaatacgaggcctacaaggcgggtcgcctgcagacgccgcccgagctgtccgagcagtttccgtacatccgggagctcgtccgggcgttcggcgtcgcgtccggcgagctggaggaatacgaggcggacgacatgatcggtacgctggcgaaacgggcggaggccgagggcgtcgacacgctggtcgtcaccggcgaccgcgatttgctccagctcgtatcggaccgcgtgaccgtcgcgctgacgcgcaagggcatcacggaaacggagcggtacgacccggcgcgcatccgcgaggaatacggcttcgatcccgaccgcatccgcgacctcaaagggctgatgggcgacgcgtctgacaatcttcccggcgttcccggcgtcggtgagaaaaccgcactgaaactgctcaggcagtacggttcgctggagagcgtcctggaacacgcgtcggaaatcgccggaaagctcggtgaaaatctgcgggcgcacgccgacgccgcccgattgagcaagcggctggcgacgatcgactgcgcggtaccgttgcagtcgggatgggactggctgcgcctcggcgaaccggaccgcgccgcgctcgcctcgctgttgcggcagctcgaattcaagtcgctgttgaaacggctcggactcgacggcacgtccgccgatgccgacgtcgacggcgtccgttcctccgcgcggccggcggacgagaaacggccgagggccgtcgccgtcgctgaggagggcgtcgacgtccgctgtccggatcgcccggaagaagtcgaagaagcgctgtcgcggctggaagccgcccagtcggtcgtcgtcgaggtgacgggcgacaacccgcacgacggcgaagtgcgcggcgtcgcatggtgggacggacatacggcgtatttcattccgtttgaacggctggtgcagtccgacatgcggccgctggccgactggctcgccgacgcgcgtcggccgaagcgtacgcacgactcccatcgcgctgaagtggcgctgttctggcacggccttgcgtttcgcggcacgtcgttctgcacgcatatcgccgcctatttgctcgaccccacggaatcgcgccatacgctggcggacctgtcgcgccgctacggtctgccgccggtaccggaagccgaggacgtttacggcaagggcgcgaagttcaaggttcccgatcgcgacacgctggcgcgttacgtcggccgcaaggccgccctagtcgcgcggctcgttccgctgctcgaggcggatttggcggcctgcggcatgcgttcgcttttttacgacctggagctgccgctttcatccgaactcgccgtcatggagacggtcggcgtccgcgtcgacgcggcggcgctcgccgcctacggcgaggaattgcgcgaggcggcggcgaaagtcgagcgggagatttacgagctggccgggacgacgttcaacatcggatcgacgaaacagctcggcgaaattttgttcgataagctggggctgcccgtcgtcaagaaaacgaaaaccggctattccaccgacgcagacgtgctggaggaactggcgccgtaccatccgatcgtcgaaaagattttgcattaccgccaactgacgaaattgcagtcgacctacatcgaggggcttttgaaagaaatccgtccgcaaaccggtaaaatccatacgtattatcagcagacgatcgcggcgacggggcggctgagcagtcagtttcccaatcttcagaacattccgatccgtctcgaagaggggcggaaaatccgcaaggcgttcgttccgtcagaaccgggatggctgatgctcgccgccgactattcgcagatcgaactgcgcgtgctcgcgcacgtttccggcgacgaacggctgaaggaagcgtttcggacaggcatggacatccacacgaagaccgcgatggacgtgttcggcgtttccgaagaccgcgtcgacgcgcgcatgcggcggtctgcgaaggcggtcaatttcggcatcatctacggcatcagcgatttcggactggcgcaaaacctgaacatttcccgcaaggaggcggcggagttcatccggcaatatttcgccgtcttttcgggcgtcaaggcgtaccgcgagcggatcgtcgagcaggcgcgccgcgacggttacgtgacgaccctgctcggtcgcaggcgctatttgccggacatcaacgcgtcgaattacaacctccgctcgttcgcggagcggacggcgatgaatacgccgatccagggcacggccgccgacatcatcaagaccgcgatggtgcgtctgacgcggcggatgcgcgacgtcggactgaagagccgcatgctgctgcaggttcacgacgagctcgtgtttgaagtgccgccggacgagctcgacgcgatgcgggagcttgtgacggacgtcatggagtcggcggtcccgctcgacgtgccgctgaaggtcgacgtcagctggggcgccgactggtacgcggcgaagtgagggaagcgggatcc

SEQ ID NO: 1459 - DNA, 2792 bp, Artificial Sequence
  Description of Artificial Sequence: Synthetic Caldibacillus cellulovorans CompA.2 DNA Polymerase Q753T
atgaaatacctgctgccgaccgctgctgctggtctgctgctcctcgctgcccagccggcgatggccatgggcaaactgattctggtcgacggaaacagcgtcgccaaccgggcgttttacgccgtccggctgctcagcacgcgcggcggcctgcacacaaacgcggtgtacggattcgccaacatgttgctcaagctgatcgaggaggaacggccgacgcattttctcgtcgcgttcgacgcgggcaaggcgacgttccgtcatcgcgaatacgaggcctacaaggcgggtcgcctgcagacgccgcccgagctgtccgagcagtttccgtacatccgggagctcgtccgggcgttcggcgtcgcgtccggcgagctggaggaatacgaggcggacgacatgatcggtacgctggcgaaacgggcggaggccgagggcgtcgacacgctggtcgtcaccggcgaccgcgatttgctccagctcgtatcggaccgcgtgaccgtcgcgctgacgcgcaagggcatcacggaaacggagcggtacgacccggcgcgcatccgcgaggaatacggcttcgatcccgaccgcatccgcgacctcaaagggctgatgggcgacgcgtctgacaatcttcccggcgttcccggcgtcggtgagaaaaccgcactgaaactgctcaggcagtacggttcgctggagagcgtcctggaacacgcgtcggaaatcgccggaaagctcggtgaaaatctgcgggcgcacgccgacgccgcccgattgagcaagcggctggcgacgatcgactgcgcggtaccgttgcagtcgggatgggactggctgcgcctcggcgaaccggaccgcgccgcgctcgcctcgctgttgcggcagctcgaattcaagtcgctgttgaaacggctcggactcgacggcacgtccgccgatgccgacgtcgacggcgtccgttcctccgcgcggccggcggacgagaaacggccgagggccgtcgccgtcgctgaggagggcgtcgacgtccgctgtccggatcgcccggaagaagtcgaagaagcgctgtcgcggctggaagccgcccagtcggtcgtcgtcgaggtgacgggcgacaacccgcacgacggcgaagtgcgcggcgtcgcatggtgggacggacatacggcgtatttcattccgtttgaacggctggtgcagtccgacatgcggccgctggccgactggctcgccgacgcgcgtcggccgaagcgtacgcacgactcccatcgcgctgaagtggcgctgttctggcacggccttgcgtttcgcggcacgtcgttctgcacgcatatcgccgcctatttgctcgaccccacggaatcgcgccatacgctggcggacctgtcgcgccgctacggtctgccgccggtaccggaagccgaggacgtttacggcaagggcgcgaagttcaaggttcccgatcgcgacacgctggcgcgttacgtcggccgcaaggccgccctagtcgcgcggctcgttccgctgctcgaggcggatttggcggcctgcggcatgcgttcgcttttttacgacctggagctgccgctttcatccgaactcgccgtcatggagacggtcggcgtccgcgtcgacgcggcggcgctcgccgcctacggcgaggaattgcgcgaggcggcggcgaaagtcgagcgggagatttacgagctggccgggacgacgttcaacatcggatcgacgaaacagctcggcgaaattttgttcgataagctggggctgcccgtcgtcaagaaaacgaaaaccggctattccaccgacgcagacgtgctggaggaactggcgccgtaccatccgatcgtcgaaaagattttgcattaccgccaactgacgaaattgcagtcgacctacatcgaggggcttttgaaagaaatccgtccgcaaaccggtaaaatccatacgtattatcagcagacgatcgcggcgacggggcggctgagcagtcagtttcccaatcttcagaacattccgatccgtctcgaagaggggcggaaaatccgcaaggcgttcgttccgtcagaaccgggatggctgatgctcgccgccgactattcgcagatcgaactgcgcgtgctcgcgcacgtttccggcgacgaacggctgaaggaagcgtttcggacaggcatggacatccacacgaagaccgcgatggacgtgttcggcgtttccgaagaccgcgtcgacgcgcgcatgcggcggactgcgaaggcggtcaatttcggcatcatctacggcatcagcgatttcggactggcgcaaaacctgaacatttcccgcaaggaggcggcggagttcatccggcaatatttcgccgtcttttcgggcgtcaaggcgtaccgcgagcggatcgtcgagcaggcgcgccgcgacggttacgtgacgaccctgctcggtcgcaggcgctatttgccggacatcaacgcgtcgaattacaacctccgctcgttcgcggagcggacggcgatgaatacgccgatccagggcacggccgccgacatcatcaagaccgcgatggtgcgtctgacgcggcggatgcgcgacgtcggactgaagagccgcatgctgctgcaggttcacgacgagctcgtgtttgaagtgccgccggacgagctcgacgcgatgcgggagcttgtgacggacgtcatggagtcggcggtcccgctcgacgtgccgctgaaggtcgacgtcagctggggcgccgactggtacgcggcgaagtgagggaagcgggatcc

SEQ ID NO: 1460 - DNA, 2792 bp, Artificial Sequence
  Description of Artificial Sequence: Synthetic Caldibacillus cellulovorans CompA.2 DNA Polymerase Q753V
atgaaatacctgctgccgaccgctgctgctggtctgctgctcctcgctgcccagccggcgatggccatgggcaaactgattctggtcgacggaaacagcgtcgccaaccgggcgttttacgccgtccggctgctcagcacgcgcggcggcctgcacacaaacgcggtgtacggattcgccaacatgttgctcaagctgatcgaggaggaacggccgacgcattttctcgtcgcgttcgacgcgggcaaggcgacgttccgtcatcgcgaatacgaggcctacaaggcgggtcgcctgcagacgccgcccgagctgtccgagcagtttccgtacatccgggagctcgtccgggcgttcggcgtcgcgtccggcgagctggaggaatacgaggcggacgacatgatcggtacgctggcgaaacgggcggaggccgagggcgtcgacacgctggtcgtcaccggcgaccgcgatttgctccagctcgtatcggaccgcgtgaccgtcgcgctgacgcgcaagggcatcacggaaacggagcggtacgacccggcgcgcatccgcgaggaatacggcttcgatcccgaccgcatccgcgacctcaaagggctgatgggcgacgcgtctgacaatcttcccggcgttcccggcgtcggtgagaaaaccgcactgaaactgctcaggcagtacggttcgctggagagcgtcctggaacacgcgtcggaaatcgccggaaagctcggtgaaaatctgcgggcgcacgccgacgccgcccgattgagcaagcggctggcgacgatcgactgcgcggtaccgttgcagtcgggatgggactggctgcgcctcggcgaaccggaccgcgccgcgctcgcctcgctgttgcggcagctcgaattcaagtcgctgttgaaacggctcggactcgacggcacgtccgccgatgccgacgtcgacggcgtccgttcctccgcgcggccggcggacgagaaacggccgagggccgtcgccgtcgctgaggagggcgtcgacgtccgctgtccggatcgcccggaagaagtcgaagaagcgctgtcgcggctggaagccgcccagtcggtcgtcgtcgaggtgacgggcgacaacccgcacgacggcgaagtgcgcggcgtcgcatggtgggacggacatacggcgtatttcattccgtttgaacggctggtgcagtccgacatgcggccgctggccgactggctcgccgacgcgcgtcggccgaagcgtacgcacgactcccatcgcgctgaagtggcgctgttctggcacggccttgcgtttcgcggcacgtcgttctgcacgcatatcgccgcctatttgctcgaccccacggaatcgcgccatacgctggcggacctgtcgcgccgctacggtctgccgccggtaccggaagccgaggacgtttacggcaagggcgcgaagttcaaggttcccgatcgcgacacgctggcgcgttacgtcggccgcaaggccgccctagtcgcgcggctcgttccgctgctcgaggcggatttggcggcctgcggcatgcgttcgcttttttacgacctggagctgccgctttcatccgaactcgccgtcatggagacggtcggcgtccgcgtcgacgcggcggcgctcgccgcctacggcgaggaattgcgcgaggcggcggcgaaagtcgagcgggagatttacgagctggccgggacgacgttcaacatcggatcgacgaaacagctcggcgaaattttgttcgataagctggggctgcccgtcgtcaagaaaacgaaaaccggctattccaccgacgcagacgtgctggaggaactggcgccgtaccatccgatcgtcgaaaagattttgcattaccgccaactgacgaaattgcagtcgacctacatcgaggggcttttgaaagaaatccgtccgcaaaccggtaaaatccatacgtattatcagcagacgatcgcggcgacggggcggctgagcagtcagtttcccaatcttcagaacattccgatccgtctcgaagaggggcggaaaatccgcaaggcgttcgttccgtcagaaccgggatggctgatgctcgccgccgactattcgcagatcgaactgcgcgtgctcgcgcacgtttccggcgacgaacggctgaaggaagcgtttcggacaggcatggacatccacacgaagaccgcgatggacgtgttcggcgtttccgaagaccgcgtcgacgcgcgcatgcggcgggttgcgaaggcggtcaatttcggcatcatctacggcatcagcgatttcggactggcgcaaaacctgaacatttcccgcaaggaggcggcggagttcatccggcaatatttcgccgtcttttcgggcgtcaaggcgtaccgcgagcggatcgtcgagcaggcgcgccgcgacggttacgtgacgaccctgctcggtcgcaggcgctatttgccggacatcaacgcgtcgaattacaacctccgctcgttcgcggagcggacggcgatgaatacgccgatccagggcacggccgccgacatcatcaagaccgcgatggtgcgtctgacgcggcggatgcgcgacgtcggactgaagagccgcatgctgctgcaggttcacgacgagctcgtgtttgaagtgccgccggacgagctcgacgcgatgcgggagcttgtgacggacgtcatggagtcggcggtcccgctcgacgtgccgctgaaggtcgacgtcagctggggcgccgactggtacgcggcgaagtgagggaagcgggatcc

SEQ ID NO: 1461 - DNA, 2792 bp, Artificial Sequence
  Description of Artificial Sequence: Synthetic Caldibacillus cellulovorans CompA.2 DNA Polymerase Q753W
atgaaatacctgctgccgaccgctgctgctggtctgctgctcctcgctgcccagccggcgatggccatgggcaaactgattctggtcgacggaaacagcgtcgccaaccgggcgttttacgccgtccggctgctcagcacgcgcggcggcctgcacacaaacgcggtgtacggattcgccaacatgttgctcaagctgatcgaggaggaacggccgacgcattttctcgtcgcgttcgacgcgggcaaggcgacgttccgtcatcgcgaatacgaggcctacaaggcgggtcgcctgcagacgccgcccgagctgtccgagcagtttccgtacatccgggagctcgtccgggcgttcggcgtcgcgtccggcgagctggaggaatacgaggcggacgacatgatcggtacgctggcgaaacgggcggaggccgagggcgtcgacacgctggtcgtcaccggcgaccgcgatttgctccagctcgtatcggaccgcgtgaccgtcgcgctgacgcgcaagggcatcacggaaacggagcggtacgacccggcgcgcatccgcgaggaatacggcttcgatcccgaccgcatccgcgacctcaaagggctgatgggcgacgcgtctgacaatcttcccggcgttcccggcgtcggtgagaaaaccgcactgaaactgctcaggcagtacggttcgctggagagcgtcctggaacacgcgtcggaaatcgccggaaagctcggtgaaaatctgcgggcgcacgccgacgccgcccgattgagcaagcggctggcgacgatcgactgcgcggtaccgttgcagtcgggatgggactggctgcgcctcggcgaaccggaccgcgccgcgctcgcctcgctgttgcggcagctcgaattcaagtcgctgttgaaacggctcggactcgacggcacgtccgccgatgccgacgtcgacggcgtccgttcctccgcgcggccggcggacgagaaacggccgagggccgtcgccgtcgctgaggagggcgtcgacgtccgctgtccggatcgcccggaagaagtcgaagaagcgctgtcgcggctggaagccgcccagtcggtcgtcgtcgaggtgacgggcgacaacccgcacgacggcgaagtgcgcggcgtcgcatggtgggacggacatacggcgtatttcattccgtttgaacggctggtgcagtccgacatgcggccgctggccgactggctcgccgacgcgcgtcggccgaagcgtacgcacgactcccatcgcgctgaagtggcgctgttctggcacggccttgcgtttcgcggcacgtcgttctgcacgcatatcgccgcctatttgctcgaccccacggaatcgcgccatacgctggcggacctgtcgcgccgctacggtctgccgccggtaccggaagccgaggacgtttacggcaagggcgcgaagttcaaggttcccgatcgcgacacgctggcgcgttacgtcggccgcaaggccgccctagtcgcgcggctcgttccgctgctcgaggcggatttggcggcctgcggcatgcgttcgcttttttacgacctggagctgccgctttcatccgaactcgccgtcatggagacggtcggcgtccgcgtcgacgcggcggcgctcgccgcctacggcgaggaattgcgcgaggcggcggcgaaagtcgagcgggagatttacgagctggccgggacgacgttcaacatcggatcgacgaaacagctcggcgaaattttgttcgataagctggggctgcccgtcgtcaagaaaacgaaaaccggctattccaccgacgcagacgtgctggaggaactggcgccgtaccatccgatcgtcgaaaagattttgcattaccgccaactgacgaaattgcagtcgacctacatcgaggggcttttgaaagaaatccgtccgcaaaccggtaaaatccatacgtattatcagcagacgatcgcggcgacggggcggctgagcagtcagtttcccaatcttcagaacattccgatccgtctcgaagaggggcggaaaatccgcaaggcgttcgttccgtcagaaccgggatggctgatgctcgccgccgactattcgcagatcgaactgcgcgtgctcgcgcacgtttccggcgacgaacggctgaaggaagcgtttcggacaggcatggacatccacacgaagaccgcgatggacgtgttcggcgtttccgaagaccgcgtcgacgcgcgcatgcggcggtgggcgaaggcggtcaatttcggcatcatctacggcatcagcgatttcggactggcgcaaaacctgaacatttcccgcaaggaggcggcggagttcatccggcaatatttcgccgtcttttcgggcgtcaaggcgtaccgcgagcggatcgtcgagcaggcgcgccgcgacggttacgtgacgaccctgctcggtcgcaggcgctatttgccggacatcaacgcgtcgaattacaacctccgctcgttcgcggagcggacggcgatgaatacgccgatccagggcacggccgccgacatcatcaagaccgcgatggtgcgtctgacgcggcggatgcgcgacgtcggactgaagagccgcatgctgctgcaggttcacgacgagctcgtgtttgaagtgccgccggacgagctcgacgcgatgcgggagcttgtgacggacgtcatggagtcggcggtcccgctcgacgtgccgctgaaggtcgacgtcagctggggcgccgactggtacgcggcgaagtgagggaagcgggatcc

SEQ ID NO: 1462 - DNA, 2792 bp, Artificial Sequence
  Description of Artificial Sequence: Synthetic Caldibacillus cellulovorans CompA.2 DNA Polymerase Q753Y
atgaaatacctgctgccgaccgctgctgctggtctgctgctcctcgctgcccagccggcgatggccatgggcaaactgattctggtcgacggaaacagcgtcgccaaccgggcgttttacgccgtccggctgctcagcacgcgcggcggcctgcacacaaacgcggtgtacggattcgccaacatgttgctcaagctgatcgaggaggaacggccgacgcattttctcgtcgcgttcgacgcgggcaaggcgacgttccgtcatcgcgaatacgaggcctacaaggcgggtcgcctgcagacgccgcccgagctgtccgagcagtttccgtacatccgggagctcgtccgggcgttcggcgtcgcgtccggcgagctggaggaatacgaggcggacgacatgatcggtacgctggcgaaacgggcggaggccgagggcgtcgacacgctggtcgtcaccggcgaccgcgatttgctccagctcgtatcggaccgcgtgaccgtcgcgctgacgcgcaagggcatcacggaaacggagcggtacgacccggcgcgcatccgcgaggaatacggcttcgatcccgaccgcatccgcgacctcaaagggctgatgggcgacgcgtctgacaatcttcccggcgttcccggcgtcggtgagaaaaccgcactgaaactgctcaggcagtacggttcgctggagagcgtcctggaacacgcgtcggaaatcgccggaaagctcggtgaaaatctgcgggcgcacgccgacgccgcccgattgagcaagcggctggcgacgatcgactgcgcggtaccgttgcagtcgggatgggactggctgcgcctcggcgaaccggaccgcgccgcgctcgcctcgctgttgcggcagctcgaattcaagtcgctgttgaaacggctcggactcgacggcacgtccgccgatgccgacgtcgacggcgtccgttcctccgcgcggccggcggacgagaaacggccgagggccgtcgccgtcgctgaggagggcgtcgacgtccgctgtccggatcgcccggaagaagtcgaagaagcgctgtcgcggctggaagccgcccagtcggtcgtcgtcgaggtgacgggcgacaacccgcacgacggcgaagtgcgcggcgtcgcatggtgggacggacatacggcgtatttcattccgtttgaacggctggtgcagtccgacatgcggccgctggccgactggctcgccgacgcgcgtcggccgaagcgtacgcacgactcccatcgcgctgaagtggcgctgttctggcacggccttgcgtttcgcggcacgtcgttctgcacgcatatcgccgcctatttgctcgaccccacggaatcgcgccatacgctggcggacctgtcgcgccgctacggtctgccgccggtaccggaagccgaggacgtttacggcaagggcgcgaagttcaaggttcccgatcgcgacacgctggcgcgttacgtcggccgcaaggccgccctagtcgcgcggctcgttccgctgctcgaggcggatttggcggcctgcggcatgcgttcgcttttttacgacctggagctgccgctttcatccgaactcgccgtcatggagacggtcggcgtccgcgtcgacgcggcggcgctcgccgcctacggcgaggaattgcgcgaggcggcggcgaaagtcgagcgggagatttacgagctggccgggacgacgttcaacatcggatcgacgaaacagctcggcgaaattttgttcgataagctggggctgcccgtcgtcaagaaaacgaaaaccggctattccaccgacgcagacgtgctggaggaactggcgccgtaccatccgatcgtcgaaaagattttgcattaccgccaactgacgaaattgcagtcgacctacatcgaggggcttttgaaagaaatccgtccgcaaaccggtaaaatccatacgtattatcagcagacgatcgcggcgacggggcggctgagcagtcagtttcccaatcttcagaacattccgatccgtctcgaagaggggcggaaaatccgcaaggcgttcgttccgtcagaaccgggatggctgatgctcgccgccgactattcgcagatcgaactgcgcgtgctcgcgcacgtttccggcgacgaacggctgaaggaagcgtttcggacaggcatggacatccacacgaagaccgcgatggacgtgttcggcgtttccgaagaccgcgtcgacgcgcgcatgcggcggtatgcgaaggcggtcaatttcggcatcatctacggcatcagcgatttcggactggcgcaaaacctgaacatttcccgcaaggaggcggcggagttcatccggcaatatttcgccgtcttttcgggcgtcaaggcgtaccgcgagcggatcgtcgagcaggcgcgccgcgacggttacgtgacgaccctgctcggtcgcaggcgctatttgccggacatcaacgcgtcgaattacaacctccgctcgttcgcggagcggacggcgatgaatacgccgatccagggcacggccgccgacatcatcaagaccgcgatggtgcgtctgacgcggcggatgcgcgacgtcggactgaagagccgcatgctgctgcaggttcacgacgagctcgtgtttgaagtgccgccggacgagctcgacgcgatgcgggagcttgtgacggacgtcatggagtcggcggtcccgctcgacgtgccgctgaaggtcgacgtcagctggggcgccgactggtacgcggcgaagtgagggaagcgggatcc

SEQ ID NO: 1463 - DNA, 2623 bp, Artificial Sequence
  Description of Artificial Sequence: Synthetic DNA sequence of Caldicellulosiruptor TOK13B DNA Polymerase R766A
atgaaatacctgctgccgaccgctgctgctggtctgctgctcctcgctgcccagccggcgatggccatggaatttgttatttttgatgggaatagtattctgtatagagctttttttgccttgccacagcttactacctcaacaggcatacctacaaatgctatatatggttttttgaatgtgctgttaaaatacttagattctgaaaaaccggattatgtagcagtagcttttgacaaaaaaggcagagctgtccgaaaaagtgaatatgaagaatacaaggctaacagaaaaccgatgccagattctcttcaggttcagataccttacgtaagagaaatacttgctgctctgaacattcctgtactgaaatgtgaagggtatgaagctgatgacgttataggcacacttgtaaatagatttaaagcccaggatttagagattgtgataataaccggagacagagatacacttcagttacttgataaaaatgtaattgtcaaaatagtcacaacaaggtttgacaggacaactgaagatttgtatgctgtagaaaatgtaaaagaaaaatatggtgtttttgcgcatcaggttgttgactataaagcattagtaggtgatgcgtcagacaatataccaggtgttaagggaattggagataaaactgccataaagctgttagaagagtaccagactctggagaatatatatcagaatctaaataacattaaaggagcgctaaaagagaagttggaatcaggaaaagacatggcatttttatcaaaaagactggctactatcatatgcgatttaccaattgaggtgaatcttgaagaattaaaaaccaaagaatgggacaaagaaagactttatcagattttacttcaacttgagtttaaaagctttattaaaagactgggcttttcagaagagattaactatgcaaggcagaactttcagctacctgaatttagtattaaagaacttcgtgatgtttcagcaatagggggcaaagaaatctatctattgtactcagatgaagaaggacttttttatatttatgaccatcaaacctcaaccatttttacaacttctgataaggaagctattaaagatcttttaacactccaaagcattcaaaaggttgtatatgatttaaaaaatatactccataaggtggactttgatgaagctaatcagataaaaaattgtaatgatgttatgttggcttcatatgttttggacagtacacgcagttcgtacgatttggaaacattgtttatttcttatctcaacactgatatagctgcaatcaaagagaatagatgggctggtgctacagttttattaagaaatctttgggatgaactttcaaaactcattgatttaaactcggcccaatacgtttatgagagcatagagatgcctcttgttcccattttatatgaaatggagaaaatcggttttaaggttgacaaaaacactttgcaggagtatacaaaagagattgagagcaagcttttaaagttggaatcacagatttatcaaatagccggtgaatggtttaacataaactcgccaaaacaactctcatatatattattcgaaaaactgaagcttccggttgttaaaaagaccaaaacaggatattcaacagatgccgaggtattagaagagctgtatgataaacatgacataataccgcttattctggattatagaatgtatacgaaaatactgacaacttactgtcagggactggttcaggcaataaatcctgcaactggaagaattcataccaactttattcagacaggtacggcaactggaagacttgcaagtgcagagcccaatctgcaaaatattcctgtaaaatatgatgagggaaagctaataagaaaggcatttgttccagatgaaggttatgtgttgatagatgctgattattctcagattgagcttagaatacttgcacatatctctgaggatgaacgactgataaatgcttttaaaaataaccttgatattcattcacagacggcggcagagatctttggtgtggatataagtcaggttacaccaattatgcgaagccaggcaaaagcagttaactttggaattgtatatggtatatctgattatggactttcacgggatataaagatttcaagaaaagaagcagccgagtttattaatcgttattttgaaaagtatcccagagtaaaagaatatttggacaatgtcgtcaagtttgcccgtgaaaacggatttgttttgacaatatttaacaggaaagcttatatcaaggatataaagtctactaataaaaacctgagaaactatgcagagagaatagcaatgaattcacctatccagggaagtgctgcagatattatgaaaatagcaatgataagagtttataaaaagctaaaagaaaacaatttaaaatcaagaattattctgcaggtccatgacgaacttttgattgaatcaccctatgaagagaaagagatagtaaaggaaatagtaaaatcggagatggaaaatgcggttttattgaaagttcctttggtagttgaagtgaaagaaggttcaaattggtatgaaacaaagtaaaggatcc

SEQ ID NO: 1464 - DNA, 2623 bp, Artificial Sequence
  Description of Artificial Sequence: Synthetic DNA sequence of Caldicellulosiruptor TOK13B DNA Polymerase R766N
atgaaatacctgctgccgaccgctgctgctggtctgctgctcctcgctgcccagccggcgatggccatggaatttgttatttttgatgggaatagtattctgtatagagctttttttgccttgccacagcttactacctcaacaggcatacctacaaatgctatatatggttttttgaatgtgctgttaaaatacttagattctgaaaaaccggattatgtagcagtagcttttgacaaaaaaggcagagctgtccgaaaaagtgaatatgaagaatacaaggctaacagaaaaccgatgccagattctcttcaggttcagataccttacgtaagagaaatacttgctgctctgaacattcctgtactgaaatgtgaagggtatgaagctgatgacgttataggcacacttgtaaatagatttaaagcccaggatttagagattgtgataataaccggagacagagatacacttcagttacttgataaaaatgtaattgtcaaaatagtcacaacaaggtttgacaggacaactgaagatttgtatgctgtagaaaatgtaaaagaaaaatatggtgtttttgcgcatcaggttgttgactataaagcattagtaggtgatgcgtcagacaatataccaggtgttaagggaattggagataaaactgccataaagctgttagaagagtaccagactctggagaatatatatcagaatctaaataacattaaaggagcgctaaaagagaagttggaatcaggaaaagacatggcatttttatcaaaaagactggctactatcatatgcgatttaccaattgaggtgaatcttgaagaattaaaaaccaaagaatgggacaaagaaagactttatcagattttacttcaacttgagtttaaaagctttattaaaagactgggcttttcagaagagattaactatgcaaggcagaactttcagctacctgaatttagtattaaagaacttcgtgatgtttcagcaatagggggcaaagaaatctatctattgtactcagatgaagaaggacttttttatatttatgaccatcaaacctcaaccatttttacaacttctgataaggaagctattaaagatcttttaacactccaaagcattcaaaaggttgtatatgatttaaaaaatatactccataaggtggactttgatgaagctaatcagataaaaaattgtaatgatgttatgttggcttcatatgttttggacagtacacgcagttcgtacgatttggaaacattgtttatttcttatctcaacactgatatagctgcaatcaaagagaatagatgggctggtgctacagttttattaagaaatctttgggatgaactttcaaaactcattgatttaaactcggcccaatacgtttatgagagcatagagatgcctcttgttcccattttatatgaaatggagaaaatcggttttaaggttgacaaaaacactttgcaggagtatacaaaagagattgagagcaagcttttaaagttggaatcacagatttatcaaatagccggtgaatggtttaacataaactcgccaaaacaactctcatatatattattcgaaaaactgaagcttccggttgttaaaaagaccaaaacaggatattcaacagatgccgaggtattagaagagctgtatgataaacatgacataataccgcttattctggattatagaatgtatacgaaaatactgacaacttactgtcagggactggttcaggcaataaatcctgcaactggaagaattcataccaactttattcagacaggtacggcaactggaagacttgcaagtgcagagcccaatctgcaaaatattcctgtaaaatatgatgagggaaagctaataagaaaggcatttgttccagatgaaggttatgtgttgatagatgctgattattctcagattgagcttagaatacttgcacatatctctgaggatgaacgactgataaatgcttttaaaaataaccttgatattcattcacagacggcggcagagatctttggtgtggatataagtcaggttacaccaattatgcgaagccaggcaaaagcagttaactttggaattgtatatggtatatctgattatggactttcacgggatataaagatttcaagaaaagaagcagccgagtttattaatcgttattttgaaaagtatcccagagtaaaagaatatttggacaatgtcgtcaagtttgcccgtgaaaacggatttgttttgacaatatttaacaggaaaaattatatcaaggatataaagtctactaataaaaacctgagaaactatgcagagagaatagcaatgaattcacctatccagggaagtgctgcagatattatgaaaatagcaatgataagagtttataaaaagctaaaagaaaacaatttaaaatcaagaattattctgcaggtccatgacgaacttttgattgaatcaccctatgaagagaaagagatagtaaaggaaatagtaaaatcggagatggaaaatgcggttttattgaaagttcctttggtagttgaagtgaaagaaggttcaaattggtatgaaacaaagtaaaggatcc

SEQ ID NO: 1465 - DNA, 2623 bp, Artificial Sequence
  Description of Artificial Sequence: Synthetic DNA sequence of Caldicellulosiruptor TOK13B DNA Polymerase R766D
atgaaatacctgctgccgaccgctgctgctggtctgctgctcctcgctgcccagccggcgatggccatggaatttgttatttttgatgggaatagtattctgtatagagctttttttgccttgccacagcttactacctcaacaggcatacctacaaatgctatatatggttttttgaatgtgctgttaaaatacttagattctgaaaaaccggattatgtagcagtagcttttgacaaaaaaggcagagctgtccgaaaaagtgaatatgaagaatacaaggctaacagaaaaccgatgccagattctcttcaggttcagataccttacgtaagagaaatacttgctgctctgaacattcctgtactgaaatgtgaagggtatgaagctgatgacgttataggcacacttgtaaatagatttaaagcccaggatttagagattgtgataataaccggagacagagatacacttcagttacttgataaaaatgtaattgtcaaaatagtcacaacaaggtttgacaggacaactgaagatttgtatgctgtagaaaatgtaaaagaaaaatatggtgtttttgcgcatcaggttgttgactataaagcattagtaggtgatgcgtcagacaatataccaggtgttaagggaattggagataaaactgccataaagctgttagaagagtaccagactctggagaatatatatcagaatctaaataacattaaaggagcgctaaaagagaagttggaatcaggaaaagacatggcatttttatcaaaaagactggctactatcatatgcgatttaccaattgaggtgaatcttgaagaattaaaaaccaaagaatgggacaaagaaagactttatcagattttacttcaacttgagtttaaaagctttattaaaagactgggcttttcagaagagattaactatgcaaggcagaactttcagctacctgaatttagtattaaagaacttcgtgatgtttcagcaatagggggcaaagaaatctatctattgtactcagatgaagaaggacttttttatatttatgaccatcaaacctcaaccatttttacaacttctgataaggaagctattaaagatcttttaacactccaaagcattcaaaaggttgtatatgatttaaaaaatatactccataaggtggactttgatgaagctaatcagataaaaaattgtaatgatgttatgttggcttcatatgttttggacagtacacgcagttcgtacgatttggaaacattgtttatttcttatctcaacactgatatagctgcaatcaaagagaatagatgggctggtgctacagttttattaagaaatctttgggatgaactttcaaaactcattgatttaaactcggcccaatacgtttatgagagcatagagatgcctcttgttcccattttatatgaaatggagaaaatcggttttaaggttgacaaaaacactttgcaggagtatacaaaagagattgagagcaagcttttaaagttggaatcacagatttatcaaatagccggtgaatggtttaacataaactcgccaaaacaactctcatatatattattcgaaaaactgaagcttccggttgttaaaaagaccaaaacaggatattcaacagatgccgaggtattagaagagctgtatgataaacatgacataataccgcttattctggattatagaatgtatacgaaaatactgacaacttactgtcagggactggttcaggcaataaatcctgcaactggaagaattcataccaactttattcagacaggtacggcaactggaagacttgcaagtgcagagcccaatctgcaaaatattcctgtaaaatatgatgagggaaagctaataagaaaggcatttgttccagatgaaggttatgtgttgatagatgctgattattctcagattgagcttagaatacttgcacatatctctgaggatgaacgactgataaatgcttttaaaaataaccttgatattcattcacagacggcggcagagatctttggtgtggatataagtcaggttacaccaattatgcgaagccaggcaaaagcagttaactttggaattgtatatggtatatctgattatggactttcacgggatataaagatttcaagaaaagaagcagccgagtttattaatcgttattttgaaaagtatcccagagtaaaagaatatttggacaatgtcgtcaagtttgcccgtgaaaacggatttgttttgacaatatttaacaggaaagattatatcaaggatataaagtctactaataaaaacctgagaaactatgcagagagaatagcaatgaattcacctatccagggaagtgctgcagatattatgaaaatagcaatgataagagtttataaaaagctaaaagaaaacaatttaaaatcaagaattattctgcaggtccatgacgaacttttgattgaatcaccctatgaagagaaagagatagtaaaggaaatagtaaaatcggagatggaaaatgcggttttattgaaagttcctttggtagttgaagtgaaagaaggttcaaattggtatgaaacaaagtaaaggatcc

SEQ ID NO: 1466 - DNA, 2623 bp, Artificial Sequence
  Description of Artificial Sequence: Synthetic DNA sequence of Caldicellulosiruptor TOK13B DNA Polymerase R766C
atgaaatacctgctgccgaccgctgctgctggtctgctgctcctcgctgcccagccggcgatggccatggaatttgttatttttgatgggaatagtattctgtatagagctttttttgccttgccacagcttactacctcaacaggcatacctacaaatgctatatatggttttttgaatgtgctgttaaaatacttagattctgaaaaaccggattatgtagcagtagcttttgacaaaaaaggcagagctgtccgaaaaagtgaatatgaagaatacaaggctaacagaaaaccgatgccagattctcttcaggttcagataccttacgtaagagaaatacttgctgctctgaacattcctgtactgaaatgtgaagggtatgaagctgatgacgttataggcacacttgtaaatagatttaaagcccaggatttagagattgtgataataaccggagacagagatacacttcagttacttgataaaaatgtaattgtcaaaatagtcacaacaaggtttgacaggacaactgaagatttgtatgctgtagaaaatgtaaaagaaaaatatggtgtttttgcgcatcaggttgttgactataaagcattagtaggtgatgcgtcagacaatataccaggtgttaagggaattggagataaaactgccataaagctgttagaagagtaccagactctggagaatatatatcagaatctaaataacattaaaggagcgctaaaagagaagttggaatcaggaaaagacatggcatttttatcaaaaagactggctactatcatatgcgatttaccaattgaggtgaatcttgaagaattaaaaaccaaagaatgggacaaagaaagactttatcagattttacttcaacttgagtttaaaagctttattaaaagactgggcttttcagaagagattaactatgcaaggcagaactttcagctacctgaatttagtattaaagaacttcgtgatgtttcagcaatagggggcaaagaaatctatctattgtactcagatgaagaaggacttttttatatttatgaccatcaaacctcaaccatttttacaacttctgataaggaagctattaaagatcttttaacactccaaagcattcaaaaggttgtatatgatttaaaaaatatactccataaggtggactttgatgaagctaatcagataaaaaattgtaatgatgttatgttggcttcatatgttttggacagtacacgcagttcgtacgatttggaaacattgtttatttcttatctcaacactgatatagctgcaatcaaagagaatagatgggctggtgctacagttttattaagaaatctttgggatgaactttcaaaactcattgatttaaactcggcccaatacgtttatgagagcatagagatgcctcttgttcccattttatatgaaatggagaaaatcggttttaaggttgacaaaaacactttgcaggagtatacaaaagagattgagagcaagcttttaaagttggaatcacagatttatcaaatagccggtgaatggtttaacataaactcgccaaaacaactctcatatatattattcgaaaaactgaagcttccggttgttaaaaagaccaaaacaggatattcaacagatgccgaggtattagaagagctgtatgataaacatgacataataccgcttattctggattatagaatgtatacgaaaatactgacaacttactgtcagggactggttcaggcaataaatcctgcaactggaagaattcataccaactttattcagacaggtacggcaactggaagacttgcaagtgcagagcccaatctgcaaaatattcctgtaaaatatgatgagggaaagctaataagaaaggcatttgttccagatgaaggttatgtgttgatagatgctgattattctcagattgagcttagaatacttgcacatatctctgaggatgaacgactgataaatgcttttaaaaataaccttgatattcattcacagacggcggcagagatctttggtgtggatataagtcaggttacaccaattatgcgaagccaggcaaaagcagttaactttggaattgtatatggtatatctgattatggactttcacgggatataaagatttcaagaaaagaagcagccgagtttattaatcgttattttgaaaagtatcccagagtaaaagaatatttggacaatgtcgtcaagtttgcccgtgaaaacggatttgttttgacaatatttaacaggaaatgttatatcaaggatataaagtctactaataaaaacctgagaaactatgcagagagaatagcaatgaattcacctatccagggaagtgctgcagatattatgaaaatagcaatgataagagtttataaaaagctaaaagaaaacaatttaaaatcaagaattattctgcaggtccatgacgaacttttgattgaatcaccctatgaagagaaagagatagtaaaggaaatagtaaaatcggagatggaaaatgcggttttattgaaagttcctttggtagttgaagtgaaagaaggttcaaattggtatgaaacaaagtaaaggatcc

SEQ ID NO: 1467 - DNA, 2623 bp, Artificial Sequence
  Description of Artificial Sequence: Synthetic DNA sequence of Caldicellulosiruptor TOK13B DNA Polymerase R766E
atgaaatacctgctgccgaccgctgctgctggtctgctgctcctcgctgcccagccggcgatggccatggaatttgttatttttgatgggaatagtattctgtatagagctttttttgccttgccacagcttactacctcaacaggcatacctacaaatgctatatatggttttttgaatgtgctgttaaaatacttagattctgaaaaaccggattatgtagcagtagcttttgacaaaaaaggcagagctgtccgaaaaagtgaatatgaagaatacaaggctaacagaaaaccgatgccagattctcttcaggttcagataccttacgtaagagaaatacttgctgctctgaacattcctgtactgaaatgtgaagggtatgaagctgatgacgttataggcacacttgtaaatagatttaaagcccaggatttagagattgtgataataaccggagacagagatacacttcagttacttgataaaaatgtaattgtcaaaatagtcacaacaaggtttgacaggacaactgaagatttgtatgctgtagaaaatgtaaaagaaaaatatggtgtttttgcgcatcaggttgttgactataaagcattagtaggtgatgcgtcagacaatataccaggtgttaagggaattggagataaaactgccataaagctgttagaagagtaccagactctggagaatatatatcagaatctaaataacattaaaggagcgctaaaagagaagttggaatcaggaaaagacatggcatttttatcaaaaagactggctactatcatatgcgatttaccaattgaggtgaatcttgaagaattaaaaaccaaagaatgggacaaagaaagactttatcagattttacttcaacttgagtttaaaagctttattaaaagactgggcttttcagaagagattaactatgcaaggcagaactttcagctacctgaatttagtattaaagaacttcgtgatgtttcagcaatagggggcaaagaaatctatctattgtactcagatgaagaaggacttttttatatttatgaccatcaaacctcaaccatttttacaacttctgataaggaagctattaaagatcttttaacactccaaagcattcaaaaggttgtatatgatttaaaaaatatactccataaggtggactttgatgaagctaatcagataaaaaattgtaatgatgttatgttggcttcatatgttttggacagtacacgcagttcgtacgatttggaaacattgtttatttcttatctcaacactgatatagctgcaatcaaagagaatagatgggctggtgctacagttttattaagaaatctttgggatgaactttcaaaactcattgatttaaactcggcccaatacgtttatgagagcatagagatgcctcttgttcccattttatatgaaatggagaaaatcggttttaaggttgacaaaaacactttgcaggagtatacaaaagagattgagagcaagcttttaaagttggaatcacagatttatcaaatagccggtgaatggtttaacataaactcgccaaaacaactctcatatatattattcgaaaaactgaagcttccggttgttaaaaagaccaaaacaggatattcaacagatgccgaggtattagaagagctgtatgataaacatgacataataccgcttattctggattatagaatgtatacgaaaatactgacaacttactgtcagggactggttcaggcaataaatcctgcaactggaagaattcataccaactttattcagacaggtacggcaactggaagacttgcaagtgcagagcccaatctgcaaaatattcctgtaaaatatgatgagggaaagctaataagaaaggcatttgttccagatgaaggttatgtgttgatagatgctgattattctcagattgagcttagaatacttgcacatatctctgaggatgaacgactgataaatgcttttaaaaataaccttgatattcattcacagacggcggcagagatctttggtgtggatataagtcaggttacaccaattatgcgaagccaggcaaaagcagttaactttggaattgtatatggtatatctgattatggactttcacgggatataaagatttcaagaaaagaagcagccgagtttattaatcgttattttgaaaagtatcccagagtaaaagaatatttggacaatgtcgtcaagtttgcccgtgaaaacggatttgttttgacaatatttaacaggaaagaatatatcaaggatataaagtctactaataaaaacctgagaaactatgcagagagaatagcaatgaattcacctatccagggaagtgctgcagatattatgaaaatagcaatgataagagtttataaaaagctaaaagaaaacaatttaaaatcaagaattattctgcaggtccatgacgaacttttgattgaatcaccctatgaagagaaagagatagtaaaggaaatagtaaaatcggagatggaaaatgcggttttattgaaagttcctttggtagttgaagtgaaagaaggttcaaattggtatgaaacaaagtaaaggatcc

SEQ ID NO: 1468 - DNA, 2623 bp, Artificial Sequence
  Description of Artificial Sequence: Synthetic DNA sequence of Caldicellulosiruptor TOK13B DNA Polymerase R766Q
atgaaatacctgctgccgaccgctgctgctggtctgctgctcctcgctgcccagccggcgatggccatggaatttgttatttttgatgggaatagtattctgtatagagctttttttgccttgccacagcttactacctcaacaggcatacctacaaatgctatatatggttttttgaatgtgctgttaaaatacttagattctgaaaaaccggattatgtagcagtagcttttgacaaaaaaggcagagctgtccgaaaaagtgaatatgaagaatacaaggctaacagaaaaccgatgccagattctcttcaggttcagataccttacgtaagagaaatacttgctgctctgaacattcctgtactgaaatgtgaagggtatgaagctgatgacgttataggcacacttgtaaatagatttaaagcccaggatttagagattgtgataataaccggagacagagatacacttcagttacttgataaaaatgtaattgtcaaaatagtcacaacaaggtttgacaggacaactgaagatttgtatgctgtagaaaatgtaaaagaaaaatatggtgtttttgcgcatcaggttgttgactataaagcattagtaggtgatgcgtcagacaatataccaggtgttaagggaattggagataaaactgccataaagctgttagaagagtaccagactctggagaatatatatcagaatctaaataacattaaaggagcgctaaaagagaagttggaatcaggaaaagacatggcatttttatcaaaaagactggctactatcatatgcgatttaccaattgaggtgaatcttgaagaattaaaaaccaaagaatgggacaaagaaagactttatcagattttacttcaacttgagtttaaaagctttattaaaagactgggcttttcagaagagattaactatgcaaggcagaactttcagctacctgaatttagtattaaagaacttcgtgatgtttcagcaatagggggcaaagaaatctatctattgtactcagatgaagaaggacttttttatatttatgaccatcaaacctcaaccatttttacaacttctgataaggaagctattaaagatcttttaacactccaaagcattcaaaaggttgtatatgatttaaaaaatatactccataaggtggactttgatgaagctaatcagataaaaaattgtaatgatgttatgttggcttcatatgttttggacagtacacgcagttcgtacgatttggaaacattgtttatttcttatctcaacactgatatagctgcaatcaaagagaatagatgggctggtgctacagttttattaagaaatctttgggatgaactttcaaaactcattgatttaaactcggcccaatacgtttatgagagcatagagatgcctcttgttcccattttatatgaaatggagaaaatcggttttaaggttgacaaaaacactttgcaggagtatacaaaagagattgagagcaagcttttaaagttggaatcacagatttatcaaatagccggtgaatggtttaacataaactcgccaaaacaactctcatatatattattcgaaaaactgaagcttccggttgttaaaaagaccaaaacaggatattcaacagatgccgaggtattagaagagctgtatgataaacatgacataataccgcttattctggattatagaatgtatacgaaaatactgacaacttactgtcagggactggttcaggcaataaatcctgcaactggaagaattcataccaactttattcagacaggtacggcaactggaagacttgcaagtgcagagcccaatctgcaaaatattcctgtaaaatatgatgagggaaagctaataagaaaggcatttgttccagatgaaggttatgtgttgatagatgctgattattctcagattgagcttagaatacttgcacatatctctgaggatgaacgactgataaatgcttttaaaaataaccttgatattcattcacagacggcggcagagatctttggtgtggatataagtcaggttacaccaattatgcgaagccaggcaaaagcagttaactttggaattgtatatggtatatctgattatggactttcacgggatataaagatttcaagaaaagaagcagccgagtttattaatcgttattttgaaaagtatcccagagtaaaagaatatttggacaatgtcgtcaagtttgcccgtgaaaacggatttgttttgacaatatttaacaggaaacaatatatcaaggatataaagtctactaataaaaacctgagaaactatgcagagagaatagcaatgaattcacctatccagggaagtgctgcagatattatgaaaatagcaatgataagagtttataaaaagctaaaagaaaacaatttaaaatcaagaattattctgcaggtccatgacgaacttttgattgaatcaccctatgaagagaaagagatagtaaaggaaatagtaaaatcggagatggaaaatgcggttttattgaaagttcctttggtagttgaagtgaaagaaggttcaaattggtatgaaacaaagtaaaggatcc

SEQ ID NO: 1469 - DNA, 2623 bp, Artificial Sequence
  Description of Artificial Sequence: Synthetic DNA sequence of Caldicellulosiruptor TOK13B DNA Polymerase R766G
atgaaatacctgctgccgaccgctgctgctggtctgctgctcctcgctgcccagccggcgatggccatggaatttgttatttttgatgggaatagtattctgtatagagctttttttgccttgccacagcttactacctcaacaggcatacctacaaatgctatatatggttttttgaatgtgctgttaaaatacttagattctgaaaaaccggattatgtagcagtagcttttgacaaaaaaggcagagctgtccgaaaaagtgaatatgaagaatacaaggctaacagaaaaccgatgccagattctcttcaggttcagataccttacgtaagagaaatacttgctgctctgaacattcctgtactgaaatgtgaagggtatgaagctgatgacgttataggcacacttgtaaatagatttaaagcccaggatttagagattgtgataataaccggagacagagatacacttcagttacttgataaaaatgtaattgtcaaaatagtcacaacaaggtttgacaggacaactgaagatttgtatgctgtagaaaatgtaaaagaaaaatatggtgtttttgcgcatcaggttgttgactataaagcattagtaggtgatgcgtcagacaatataccaggtgttaagggaattggagataaaactgccataaagctgttagaagagtaccagactctggagaatatatatcagaatctaaataacattaaaggagcgctaaaagagaagttggaatcaggaaaagacatggcatttttatcaaaaagactggctactatcatatgcgatttaccaattgaggtgaatcttgaagaattaaaaaccaaagaatgggacaaagaaagactttatcagattttacttcaacttgagtttaaaagctttattaaaagactgggcttttcagaagagattaactatgcaaggcagaactttcagctacctgaatttagtattaaagaacttcgtgatgtttcagcaatagggggcaaagaaatctatctattgtactcagatgaagaaggacttttttatatttatgaccatcaaacctcaaccatttttacaacttctgataaggaagctattaaagatcttttaacactccaaagcattcaaaaggttgtatatgatttaaaaaatatactccataaggtggactttgatgaagctaatcagataaaaaattgtaatgatgttatgttggcttcatatgttttggacagtacacgcagttcgtacgatttggaaacattgtttatttcttatctcaacactgatatagctgcaatcaaagagaatagatgggctggtgctacagttttattaagaaatctttgggatgaactttcaaaactcattgatttaaactcggcccaatacgtttatgagagcatagagatgcctcttgttcccattttatatgaaatggagaaaatcggttttaaggttgacaaaaacactttgcaggagtatacaaaagagattgagagcaagcttttaaagttggaatcacagatttatcaaatagccggtgaatggtttaacataaactcgccaaaacaactctcatatatattattcgaaaaactgaagcttccggttgttaaaaagaccaaaacaggatattcaacagatgccgaggtattagaagagctgtatgataaacatgacataataccgcttattctggattatagaatgtatacgaaaatactgacaacttactgtcagggactggttcaggcaataaatcctgcaactggaagaattcataccaactttattcagacaggtacggcaactggaagacttgcaagtgcagagcccaatctgcaaaatattcctgtaaaatatgatgagggaaagctaataagaaaggcatttgttccagatgaaggttatgtgttgatagatgctgattattctcagattgagcttagaatacttgcacatatctctgaggatgaacgactgataaatgcttttaaaaataaccttgatattcattcacagacggcggcagagatctttggtgtggatataagtcaggttacaccaattatgcgaagccaggcaaaagcagttaactttggaattgtatatggtatatctgattatggactttcacgggatataaagatttcaagaaaagaagcagccgagtttattaatcgttattttgaaaagtatcccagagtaaaagaatatttggacaatgtcgtcaagtttgcccgtgaaaacggatttgttttgacaatatttaacaggaaaggttatatcaaggatataaagtctactaataaaaacctgagaaactatgcagagagaatagcaatgaattcacctatccagggaagtgctgcagatattatgaaaatagcaatgataagagtttataaaaagctaaaagaaaacaatttaaaatcaagaattattctgcaggtccatgacgaacttttgattgaatcaccctatgaagagaaagagatagtaaaggaaatagtaaaatcggagatggaaaatgcggttttattgaaagttcctttggtagttgaagtgaaagaaggttcaaattggtatgaaacaaagtaaaggatcc

SEQ ID NO: 1470 - DNA, 2623 bp, Artificial Sequence
  Description of Artificial Sequence: Synthetic DNA sequence of Caldicellulosiruptor TOK13B DNA Polymerase R766H
atgaaatacctgctgccgaccgctgctgctggtctgctgctcctcgctgcccagccggcgatggccatggaatttgttatttttgatgggaatagtattctgtatagagctttttttgccttgccacagcttactacctcaacaggcatacctacaaatgctatatatggttttttgaatgtgctgttaaaatacttagattctgaaaaaccggattatgtagcagtagcttttgacaaaaaaggcagagctgtccgaaaaagtgaatatgaagaatacaaggctaacagaaaaccgatgccagattctcttcaggttcagataccttacgtaagagaaatacttgctgctctgaacattcctgtactgaaatgtgaagggtatgaagctgatgacgttataggcacacttgtaaatagatttaaagcccaggatttagagattgtgataataaccggagacagagatacacttcagttacttgataaaaatgtaattgtcaaaatagtcacaacaaggtttgacaggacaactgaagatttgtatgctgtagaaaatgtaaaagaaaaatatggtgtttttgcgcatcaggttgttgactataaagcattagtaggtgatgcgtcagacaatataccaggtgttaagggaattggagataaaactgccataaagctgttagaagagtaccagactctggagaatatatatcagaatctaaataacattaaaggagcgctaaaagagaagttggaatcaggaaaagacatggcatttttatcaaaaagactggctactatcatatgcgatttaccaattgaggtgaatcttgaagaattaaaaaccaaagaatgggacaaagaaagactttatcagattttacttcaacttgagtttaaaagctttattaaaagactgggcttttcagaagagattaactatgcaaggcagaactttcagctacctgaatttagtattaaagaacttcgtgatgtttcagcaatagggggcaaagaaatctatctattgtactcagatgaagaaggacttttttatatttatgaccatcaaacctcaaccatttttacaacttctgataaggaagctattaaagatcttttaacactccaaagcattcaaaaggttgtatatgatttaaaaaatatactccataaggtggactttgatgaagctaatcagataaaaaattgtaatgatgttatgttggcttcatatgttttggacagtacacgcagttcgtacgatttggaaacattgtttatttcttatctcaacactgatatagctgcaatcaaagagaatagatgggctggtgctacagttttattaagaaatctttgggatgaactttcaaaactcattgatttaaactcggcccaatacgtttatgagagcatagagatgcctcttgttcccattttatatgaaatggagaaaatcggttttaaggttgacaaaaacactttgcaggagtatacaaaagagattgagagcaagcttttaaagttggaatcacagatttatcaaatagccggtgaatggtttaacataaactcgccaaaacaactctcatatatattattcgaaaaactgaagcttccggttgttaaaaagaccaaaacaggatattcaacagatgccgaggtattagaagagctgtatgataaacatgacataataccgcttattctggattatagaatgtatacgaaaatactgacaacttactgtcagggactggttcaggcaataaatcctgcaactggaagaattcataccaactttattcagacaggtacggcaactggaagacttgcaagtgcagagcccaatctgcaaaatattcctgtaaaatatgatgagggaaagctaataagaaaggcatttgttccagatgaaggttatgtgttgatagatgctgattattctcagattgagcttagaatacttgcacatatctctgaggatgaacgactgataaatgcttttaaaaataaccttgatattcattcacagacggcggcagagatctttggtgtggatataagtcaggttacaccaattatgcgaagccaggcaaaagcagttaactttggaattgtatatggtatatctgattatggactttcacgggatataaagatttcaagaaaagaagcagccgagtttattaatcgttattttgaaaagtatcccagagtaaaagaatatttggacaatgtcgtcaagtttgcccgtgaaaacggatttgttttgacaatatttaacaggaaacattatatcaaggatataaagtctactaataaaaacctgagaaactatgcagagagaatagcaatgaattcacctatccagggaagtgctgcagatattatgaaaatagcaatgataagagtttataaaaagctaaaagaaaacaatttaaaatcaagaattattctgcaggtccatgacgaacttttgattgaatcaccctatgaagagaaagagatagtaaaggaaatagtaaaatcggagatggaaaatgcggttttattgaaagttcctttggtagttgaagtgaaagaaggttcaaattggtatgaaacaaagtaaaggatcc

SEQ ID NO: 1471 - DNA, 2623 bp, Artificial Sequence
  Description of Artificial Sequence: Synthetic DNA sequence of Caldicellulosiruptor TOK13B DNA Polymerase R766I
atgaaatacctgctgccgaccgctgctgctggtctgctgctcctcgctgcccagccggcgatggccatggaatttgttatttttgatgggaatagtattctgtatagagctttttttgccttgccacagcttactacctcaacaggcatacctacaaatgctatatatggttttttgaatgtgctgttaaaatacttagattctgaaaaaccggattatgtagcagtagcttttgacaaaaaaggcagagctgtccgaaaaagtgaatatgaagaatacaaggctaacagaaaaccgatgccagattctcttcaggttcagataccttacgtaagagaaatacttgctgctctgaacattcctgtactgaaatgtgaagggtatgaagctgatgacgttataggcacacttgtaaatagatttaaagcccaggatttagagattgtgataataaccggagacagagatacacttcagttacttgataaaaatgtaattgtcaaaatagtcacaacaaggtttgacaggacaactgaagatttgtatgctgtagaaaatgtaaaagaaaaatatggtgtttttgcgcatcaggttgttgactataaagcattagtaggtgatgcgtcagacaatataccaggtgttaagggaattggagataaaactgccataaagctgttagaagagtaccagactctggagaatatatatcagaatctaaataacattaaaggagcgctaaaagagaagttggaatcaggaaaagacatggcatttttatcaaaaagactggctactatcatatgcgatttaccaattgaggtgaatcttgaagaattaaaaaccaaagaatgggacaaagaaagactttatcagattttacttcaacttgagtttaaaagctttattaaaagactgggcttttcagaagagattaactatgcaaggcagaactttcagctacctgaatttagtattaaagaacttcgtgatgtttcagcaatagggggcaaagaaatctatctattgtactcagatgaagaaggacttttttatatttatgaccatcaaacctcaaccatttttacaacttctgataaggaagctattaaagatcttttaacactccaaagcattcaaaaggttgtatatgatttaaaaaatatactccataaggtggactttgatgaagctaatcagataaaaaattgtaatgatgttatgttggcttcatatgttttggacagtacacgcagttcgtacgatttggaaacattgtttatttcttatctcaacactgatatagctgcaatcaaagagaatagatgggctggtgctacagttttattaagaaatctttgggatgaactttcaaaactcattgatttaaactcggcccaatacgtttatgagagcatagagatgcctcttgttcccattttatatgaaatggagaaaatcggttttaaggttgacaaaaacactttgcaggagtatacaaaagagattgagagcaagcttttaaagttggaatcacagatttatcaaatagccggtgaatggtttaacataaactcgccaaaacaactctcatatatattattcgaaaaactgaagcttccggttgttaaaaagaccaaaacaggatattcaacagatgccgaggtattagaagagctgtatgataaacatgacataataccgcttattctggattatagaatgtatacgaaaatactgacaacttactgtcagggactggttcaggcaataaatcctgcaactggaagaattcataccaactttattcagacaggtacggcaactggaagacttgcaagtgcagagcccaatctgcaaaatattcctgtaaaatatgatgagggaaagctaataagaaaggcatttgttccagatgaaggttatgtgttgatagatgctgattattctcagattgagcttagaatacttgcacatatctctgaggatgaacgactgataaatgcttttaaaaataaccttgatattcattcacagacggcggcagagatctttggtgtggatataagtcaggttacaccaattatgcgaagccaggcaaaagcagttaactttggaattgtatatggtatatctgattatggactttcacgggatataaagatttcaagaaaagaagcagccgagtttattaatcgttattttgaaaagtatcccagagtaaaagaatatttggacaatgtcgtcaagtttgcccgtgaaaacggatttgttttgacaatatttaacaggaaaatttatatcaaggatataaagtctactaataaaaacctgagaaactatgcagagagaatagcaatgaattcacctatccagggaagtgctgcagatattatgaaaatagcaatgataagagtttataaaaagctaaaagaaaacaatttaaaatcaagaattattctgcaggtccatgacgaacttttgattgaatcaccctatgaagagaaagagatagtaaaggaaatagtaaaatcggagatggaaaatgcggttttattgaaagttcctttggtagttgaagtgaaagaaggttcaaattggtatgaaacaaagtaaaggatcc

SEQ ID NO: 1472 - DNA, 2623 bp, Artificial Sequence
  Description of Artificial Sequence: Synthetic DNA sequence of Caldicellulosiruptor TOK13B DNA Polymerase R766L
atgaaatacctgctgccgaccgctgctgctggtctgctgctcctcgctgcccagccggcgatggccatggaatttgttatttttgatgggaatagtattctgtatagagctttttttgccttgccacagcttactacctcaacaggcatacctacaaatgctatatatggttttttgaatgtgctgttaaaatacttagattctgaaaaaccggattatgtagcagtagcttttgacaaaaaaggcagagctgtccgaaaaagtgaatatgaagaatacaaggctaacagaaaaccgatgccagattctcttcaggttcagataccttacgtaagagaaatacttgctgctctgaacattcctgtactgaaatgtgaagggtatgaagctgatgacgttataggcacacttgtaaatagatttaaagcccaggatttagagattgtgataataaccggagacagagatacacttcagttacttgataaaaatgtaattgtcaaaatagtcacaacaaggtttgacaggacaactgaagatttgtatgctgtagaaaatgtaaaagaaaaatatggtgtttttgcgcatcaggttgttgactataaagcattagtaggtgatgcgtcagacaatataccaggtgttaagggaattggagataaaactgccataaagctgttagaagagtaccagactctggagaatatatatcagaatctaaataacattaaaggagcgctaaaagagaagttggaatcaggaaaagacatggcatttttatcaaaaagactggctactatcatatgcgatttaccaattgaggtgaatcttgaagaattaaaaaccaaagaatgggacaaagaaagactttatcagattttacttcaacttgagtttaaaagctttattaaaagactgggcttttcagaagagattaactatgcaaggcagaactttcagctacctgaatttagtattaaagaacttcgtgatgtttcagcaatagggggcaaagaaatctatctattgtactcagatgaagaaggacttttttatatttatgaccatcaaacctcaaccatttttacaacttctgataaggaagctattaaagatcttttaacactccaaagcattcaaaaggttgtatatgatttaaaaaatatactccataaggtggactttgatgaagctaatcagataaaaaattgtaatgatgttatgttggcttcatatgttttggacagtacacgcagttcgtacgatttggaaacattgtttatttcttatctcaacactgatatagctgcaatcaaagagaatagatgggctggtgctacagttttattaagaaatctttgggatgaactttcaaaactcattgatttaaactcggcccaatacgtttatgagagcatagagatgcctcttgttcccattttatatgaaatggagaaaatcggttttaaggttgacaaaaacactttgcaggagtatacaaaagagattgagagcaagcttttaaagttggaatcacagatttatcaaatagccggtgaatggtttaacataaactcgccaaaacaactctcatatatattattcgaaaaactgaagcttccggttgttaaaaagaccaaaacaggatattcaacagatgccgaggtattagaagagctgtatgataaacatgacataataccgcttattctggattatagaatgtatacgaaaatactgacaacttactgtcagggactggttcaggcaataaatcctgcaactggaagaattcataccaactttattcagacaggtacggcaactggaagacttgcaagtgcagagcccaatctgcaaaatattcctgtaaaatatgatgagggaaagctaataagaaaggcatttgttccagatgaaggttatgtgttgatagatgctgattattctcagattgagcttagaatacttgcacatatctctgaggatgaacgactgataaatgcttttaaaaataaccttgatattcattcacagacggcggcagagatctttggtgtggatataagtcaggttacaccaattatgcgaagccaggcaaaagcagttaactttggaattgtatatggtatatctgattatggactttcacgggatataaagatttcaagaaaagaagcagccgagtttattaatcgttattttgaaaagtatcccagagtaaaagaatatttggacaatgtcgtcaagtttgcccgtgaaaacggatttgttttgacaatatttaacaggaaactttatatcaaggatataaagtctactaataaaaacctgagaaactatgcagagagaatagcaatgaattcacctatccagggaagtgctgcagatattatgaaaatagcaatgataagagtttataaaaagctaaaagaaaacaatttaaaatcaagaattattctgcaggtccatgacgaacttttgattgaatcaccctatgaagagaaagagatagtaaaggaaatagtaaaatcggagatggaaaatgcggttttattgaaagttcctttggtagttgaagtgaaagaaggttcaaattggtatgaaacaaagtaaaggatcc

SEQ ID NO: 1473 - DNA, 2623 bp, Artificial Sequence
  Description of Artificial Sequence: Synthetic DNA sequence of Caldicellulosiruptor TOK13B DNA Polymerase R766K
atgaaatacctgctgccgaccgctgctgctggtctgctgctcctcgctgcccagccggcgatggccatggaatttgttatttttgatgggaatagtattctgtatagagctttttttgccttgccacagcttactacctcaacaggcatacctacaaatgctatatatggttttttgaatgtgctgttaaaatacttagattctgaaaaaccggattatgtagcagtagcttttgacaaaaaaggcagagctgtccgaaaaagtgaatatgaagaatacaaggctaacagaaaaccgatgccagattctcttcaggttcagataccttacgtaagagaaatacttgctgctctgaacattcctgtactgaaatgtgaagggtatgaagctgatgacgttataggcacacttgtaaatagatttaaagcccaggatttagagattgtgataataaccggagacagagatacacttcagttacttgataaaaatgtaattgtcaaaatagtcacaacaaggtttgacaggacaactgaagatttgtatgctgtagaaaatgtaaaagaaaaatatggtgtttttgcgcatcaggttgttgactataaagcattagtaggtgatgcgtcagacaatataccaggtgttaagggaattggagataaaactgccataaagctgttagaagagtaccagactctggagaatatatatcagaatctaaataacattaaaggagcgctaaaagagaagttggaatcaggaaaagacatggcatttttatcaaaaagactggctactatcatatgcgatttaccaattgaggtgaatcttgaagaattaaaaaccaaagaatgggacaaagaaagactttatcagattttacttcaacttgagtttaaaagctttattaaaagactgggcttttcagaagagattaactatgcaaggcagaactttcagctacctgaatttagtattaaagaacttcgtgatgtttcagcaatagggggcaaagaaatctatctattgtactcagatgaagaaggacttttttatatttatgaccatcaaacctcaaccatttttacaacttctgataaggaagctattaaagatcttttaacactccaaagcattcaaaaggttgtatatgatttaaaaaatatactccataaggtggactttgatgaagctaatcagataaaaaattgtaatgatgttatgttggcttcatatgttttggacagtacacgcagttcgtacgatttggaaacattgtttatttcttatctcaacactgatatagctgcaatcaaagagaatagatgggctggtgctacagttttattaagaaatctttgggatgaactttcaaaactcattgatttaaactcggcccaatacgtttatgagagcatagagatgcctcttgttcccattttatatgaaatggagaaaatcggttttaaggttgacaaaaacactttgcaggagtatacaaaagagattgagagcaagcttttaaagttggaatcacagatttatcaaatagccggtgaatggtttaacataaactcgccaaaacaactctcatatatattattcgaaaaactgaagcttccggttgttaaaaagaccaaaacaggatattcaacagatgccgaggtattagaagagctgtatgataaacatgacataataccgcttattctggattatagaatgtatacgaaaatactgacaacttactgtcagggactggttcaggcaataaatcctgcaactggaagaattcataccaactttattcagacaggtacggcaactggaagacttgcaagtgcagagcccaatctgcaaaatattcctgtaaaatatgatgagggaaagctaataagaaaggcatttgttccagatgaaggttatgtgttgatagatgctgattattctcagattgagcttagaatacttgcacatatctctgaggatgaacgactgataaatgcttttaaaaataaccttgatattcattcacagacggcggcagagatctttggtgtggatataagtcaggttacaccaattatgcgaagccaggcaaaagcagttaactttggaattgtatatggtatatctgattatggactttcacgggatataaagatttcaagaaaagaagcagccgagtttattaatcgttattttgaaaagtatcccagagtaaaagaatatttggacaatgtcgtcaagtttgcccgtgaaaacggatttgttttgacaatatttaacaggaaaaaatatatcaaggatataaagtctactaataaaaacctgagaaactatgcagagagaatagcaatgaattcacctatccagggaagtgctgcagatattatgaaaatagcaatgataagagtttataaaaagctaaaagaaaacaatttaaaatcaagaattattctgcaggtccatgacgaacttttgattgaatcaccctatgaagagaaagagatagtaaaggaaatagtaaaatcggagatggaaaatgcggttttattgaaagttcctttggtagttgaagtgaaagaaggttcaaattggtatgaaacaaagtaaaggatcc

SEQ ID NO: 1474 - DNA, 2623 bp, Artificial Sequence
  Description of Artificial Sequence: Synthetic DNA sequence of Caldicellulosiruptor TOK13B DNA Polymerase R766M
atgaaatacctgctgccgaccgctgctgctggtctgctgctcctcgctgcccagccggcgatggccatggaatttgttatttttgatgggaatagtattctgtatagagctttttttgccttgccacagcttactacctcaacaggcatacctacaaatgctatatatggttttttgaatgtgctgttaaaatacttagattctgaaaaaccggattatgtagcagtagcttttgacaaaaaaggcagagctgtccgaaaaagtgaatatgaagaatacaaggctaacagaaaaccgatgccagattctcttcaggttcagataccttacgtaagagaaatacttgctgctctgaacattcctgtactgaaatgtgaagggtatgaagctgatgacgttataggcacacttgtaaatagatttaaagcccaggatttagagattgtgataataaccggagacagagatacacttcagttacttgataaaaatgtaattgtcaaaatagtcacaacaaggtttgacaggacaactgaagatttgtatgctgtagaaaatgtaaaagaaaaatatggtgtttttgcgcatcaggttgttgactataaagcattagtaggtgatgcgtcagacaatataccaggtgttaagggaattggagataaaactgccataaagctgttagaagagtaccagactctggagaatatatatcagaatctaaataacattaaaggagcgctaaaagagaagttggaatcaggaaaagacatggcatttttatcaaaaagactggctactatcatatgcgatttaccaattgaggtgaatcttgaagaattaaaaaccaaagaatgggacaaagaaagactttatcagattttacttcaacttgagtttaaaagctttattaaaagactgggcttttcagaagagattaactatgcaaggcagaactttcagctacctgaatttagtattaaagaacttcgtgatgtttcagcaatagggggcaaagaaatctatctattgtactcagatgaagaaggacttttttatatttatgaccatcaaacctcaaccatttttacaacttctgataaggaagctattaaagatcttttaacactccaaagcattcaaaaggttgtatatgatttaaaaaatatactccataaggtggactttgatgaagctaatcagataaaaaattgtaatgatgttatgttggcttcatatgttttggacagtacacgcagttcgtacgatttggaaacattgtttatttcttatctcaacactgatatagctgcaatcaaagagaatagatgggctggtgctacagttttattaagaaatctttgggatgaactttcaaaactcattgatttaaactcggcccaatacgtttatgagagcatagagatgcctcttgttcccattttatatgaaatggagaaaatcggttttaaggttgacaaaaacactttgcaggagtatacaaaagagattgagagcaagcttttaaagttggaatcacagatttatcaaatagccggtgaatggtttaacataaactcgccaaaacaactctcatatatattattcgaaaaactgaagcttccggttgttaaaaagaccaaaacaggatattcaacagatgccgaggtattagaagagctgtatgataaacatgacataataccgcttattctggattatagaatgtatacgaaaatactgacaacttactgtcagggactggttcaggcaataaatcctgcaactggaagaattcataccaactttattcagacaggtacggcaactggaagacttgcaagtgcagagcccaatctgcaaaatattcctgtaaaatatgatgagggaaagctaataagaaaggcatttgttccagatgaaggttatgtgttgatagatgctgattattctcagattgagcttagaatacttgcacatatctctgaggatgaacgactgataaatgcttttaaaaataaccttgatattcattcacagacggcggcagagatctttggtgtggatataagtcaggttacaccaattatgcgaagccaggcaaaagcagttaactttggaattgtatatggtatatctgattatggactttcacgggatataaagatttcaagaaaagaagcagccgagtttattaatcgttattttgaaaagtatcccagagtaaaagaatatttggacaatgtcgtcaagtttgcccgtgaaaacggatttgttttgacaatatttaacaggaaaatgtatatcaaggatataaagtctactaataaaaacctgagaaactatgcagagagaatagcaatgaattcacctatccagggaagtgctgcagatattatgaaaatagcaatgataagagtttataaaaagctaaaagaaaacaatttaaaatcaagaattattctgcaggtccatgacgaacttttgattgaatcaccctatgaagagaaagagatagtaaaggaaatagtaaaatcggagatggaaaatgcggttttattgaaagttcctttggtagttgaagtgaaagaaggttcaaattggtatgaaacaaagtaaaggatcc

SEQ ID NO: 1475 - DNA, 2623 bp, Artificial Sequence
  Description of Artificial Sequence: Synthetic DNA sequence of Caldicellulosiruptor TOK13B DNA Polymerase R766F
atgaaatacctgctgccgaccgctgctgctggtctgctgctcctcgctgcccagccggcgatggccatggaatttgttatttttgatgggaatagtattctgtatagagctttttttgccttgccacagcttactacctcaacaggcatacctacaaatgctatatatggttttttgaatgtgctgttaaaatacttagattctgaaaaaccggattatgtagcagtagcttttgacaaaaaaggcagagctgtccgaaaaagtgaatatgaagaatacaaggctaacagaaaaccgatgccagattctcttcaggttcagataccttacgtaagagaaatacttgctgctctgaacattcctgtactgaaatgtgaagggtatgaagctgatgacgttataggcacacttgtaaatagatttaaagcccaggatttagagattgtgataataaccggagacagagatacacttcagttacttgataaaaatgtaattgtcaaaatagtcacaacaaggtttgacaggacaactgaagatttgtatgctgtagaaaatgtaaaagaaaaatatggtgtttttgcgcatcaggttgttgactataaagcattagtaggtgatgcgtcagacaatataccaggtgttaagggaattggagataaaactgccataaagctgttagaagagtaccagactctggagaatatatatcagaatctaaataacattaaaggagcgctaaaagagaagttggaatcaggaaaagacatggcatttttatcaaaaagactggctactatcatatgcgatttaccaattgaggtgaatcttgaagaattaaaaaccaaagaatgggacaaagaaagactttatcagattttacttcaacttgagtttaaaagctttattaaaagactgggcttttcagaagagattaactatgcaaggcagaactttcagctacctgaatttagtattaaagaacttcgtgatgtttcagcaatagggggcaaagaaatctatctattgtactcagatgaagaaggacttttttatatttatgaccatcaaacctcaaccatttttacaacttctgataaggaagctattaaagatcttttaacactccaaagcattcaaaaggttgtatatgatttaaaaaatatactccataaggtggactttgatgaagctaatcagataaaaaattgtaatgatgttatgttggcttcatatgttttggacagtacacgcagttcgtacgatttggaaacattgtttatttcttatctcaacactgatatagctgcaatcaaagagaatagatgggctggtgctacagttttattaagaaatctttgggatgaactttcaaaactcattgatttaaactcggcccaatacgtttatgagagcatagagatgcctcttgttcccattttatatgaaatggagaaaatcggttttaaggttgacaaaaacactttgcaggagtatacaaaagagattgagagcaagcttttaaagttggaatcacagatttatcaaatagccggtgaatggtttaacataaactcgccaaaacaactctcatatatattattcgaaaaactgaagcttccggttgttaaaaagaccaaaacaggatattcaacagatgccgaggtattagaagagctgtatgataaacatgacataataccgcttattctggattatagaatgtatacgaaaatactgacaacttactgtcagggactggttcaggcaataaatcctgcaactggaagaattcataccaactttattcagacaggtacggcaactggaagacttgcaagtgcagagcccaatctgcaaaatattcctgtaaaatatgatgagggaaagctaataagaaaggcatttgttccagatgaaggttatgtgttgatagatgctgattattctcagattgagcttagaatacttgcacatatctctgaggatgaacgactgataaatgcttttaaaaataaccttgatattcattcacagacggcggcagagatctttggtgtggatataagtcaggttacaccaattatgcgaagccaggcaaaagcagttaactttggaattgtatatggtatatctgattatggactttcacgggatataaagatttcaagaaaagaagcagccgagtttattaatcgttattttgaaaagtatcccagagtaaaagaatatttggacaatgtcgtcaagtttgcccgtgaaaacggatttgttttgacaatatttaacaggaaattttatatcaaggatataaagtctactaataaaaacctgagaaactatgcagagagaatagcaatgaattcacctatccagggaagtgctgcagatattatgaaaatagcaatgataagagtttataaaaagctaaaagaaaacaatttaaaatcaagaattattctgcaggtccatgacgaacttttgattgaatcaccctatgaagagaaagagatagtaaaggaaatagtaaaatcggagatggaaaatgcggttttattgaaagttcctttggtagttgaagtgaaagaaggttcaaattggtatgaaacaaagtaaaggatcc

SEQ ID NO: 1476 - DNA, 2623 bp, Artificial Sequence
  Description of Artificial Sequence: Synthetic DNA sequence of Caldicellulosiruptor TOK13B DNA Polymerase R766P
atgaaatacctgctgccgaccgctgctgctggtctgctgctcctcgctgcccagccggcgatggccatggaatttgttatttttgatgggaatagtattctgtatagagctttttttgccttgccacagcttactacctcaacaggcatacctacaaatgctatatatggttttttgaatgtgctgttaaaatacttagattctgaaaaaccggattatgtagcagtagcttttgacaaaaaaggcagagctgtccgaaaaagtgaatatgaagaatacaaggctaacagaaaaccgatgccagattctcttcaggttcagataccttacgtaagagaaatacttgctgctctgaacattcctgtactgaaatgtgaagggtatgaagctgatgacgttataggcacacttgtaaatagatttaaagcccaggatttagagattgtgataataaccggagacagagatacacttcagttacttgataaaaatgtaattgtcaaaatagtcacaacaaggtttgacaggacaactgaagatttgtatgctgtagaaaatgtaaaagaaaaatatggtgtttttgcgcatcaggttgttgactataaagcattagtaggtgatgcgtcagacaatataccaggtgttaagggaattggagataaaactgccataaagctgttagaagagtaccagactctggagaatatatatcagaatctaaataacattaaaggagcgctaaaagagaagttggaatcaggaaaagacatggcatttttatcaaaaagactggctactatcatatgcgatttaccaattgaggtgaatcttgaagaattaaaaaccaaagaatgggacaaagaaagactttatcagattttacttcaacttgagtttaaaagctttattaaaagactgggcttttcagaagagattaactatgcaaggcagaactttcagctacctgaatttagtattaaagaacttcgtgatgtttcagcaatagggggcaaagaaatctatctattgtactcagatgaagaaggacttttttatatttatgaccatcaaacctcaaccatttttacaacttctgataaggaagctattaaagatcttttaacactccaaagcattcaaaaggttgtatatgatttaaaaaatatactccataaggtggactttgatgaagctaatcagataaaaaattgtaatgatgttatgttggcttcatatgttttggacagtacacgcagttcgtacgatttggaaacattgtttatttcttatctcaacactgatatagctgcaatcaaagagaatagatgggctggtgctacagttttattaagaaatctttgggatgaactttcaaaactcattgatttaaactcggcccaatacgtttatgagagcatagagatgcctcttgttcccattttatatgaaatggagaaaatcggttttaaggttgacaaaaacactttgcaggagtatacaaaagagattgagagcaagcttttaaagttggaatcacagatttatcaaatagccggtgaatggtttaacataaactcgccaaaacaactctcatatatattattcgaaaaactgaagcttccggttgttaaaaagaccaaaacaggatattcaacagatgccgaggtattagaagagctgtatgataaacatgacataataccgcttattctggattatagaatgtatacgaaaatactgacaacttactgtcagggactggttcaggcaataaatcctgcaactggaagaattcataccaactttattcagacaggtacggcaactggaagacttgcaagtgcagagcccaatctgcaaaatattcctgtaaaatatgatgagggaaagctaataagaaaggcatttgttccagatgaaggttatgtgttgatagatgctgattattctcagattgagcttagaatacttgcacatatctctgaggatgaacgactgataaatgcttttaaaaataaccttgatattcattcacagacggcggcagagatctttggtgtggatataagtcaggttacaccaattatgcgaagccaggcaaaagcagttaactttggaattgtatatggtatatctgattatggactttcacgggatataaagatttcaagaaaagaagcagccgagtttattaatcgttattttgaaaagtatcccagagtaaaagaatatttggacaatgtcgtcaagtttgcccgtgaaaacggatttgttttgacaatatttaacaggaaaccttatatcaaggatataaagtctactaataaaaacctgagaaactatgcagagagaatagcaatgaattcacctatccagggaagtgctgcagatattatgaaaatagcaatgataagagtttataaaaagctaaaagaaaacaatttaaaatcaagaattattctgcaggtccatgacgaacttttgattgaatcaccctatgaagagaaagagatagtaaaggaaatagtaaaatcggagatggaaaatgcggttttattgaaagttcctttggtagttgaagtgaaagaaggttcaaattggtatgaaacaaagtaaaggatcc

SEQ ID NO: 1477 - DNA, 2623 bp, Artificial Sequence
  Description of Artificial Sequence: Synthetic DNA sequence of Caldicellulosiruptor TOK13B DNA Polymerase R766S
atgaaatacctgctgccgaccgctgctgctggtctgctgctcctcgctgcccagccggcgatggccatggaatttgttatttttgatgggaatagtattctgtatagagctttttttgccttgccacagcttactacctcaacaggcatacctacaaatgctatatatggttttttgaatgtgctgttaaaatacttagattctgaaaaaccggattatgtagcagtagcttttgacaaaaaaggcagagctgtccgaaaaagtgaatatgaagaatacaaggctaacagaaaaccgatgccagattctcttcaggttcagataccttacgtaagagaaatacttgctgctctgaacattcctgtactgaaatgtgaagggtatgaagctgatgacgttataggcacacttgtaaatagatttaaagcccaggatttagagattgtgataataaccggagacagagatacacttcagttacttgataaaaatgtaattgtcaaaatagtcacaacaaggtttgacaggacaactgaagatttgtatgctgtagaaaatgtaaaagaaaaatatggtgtttttgcgcatcaggttgttgactataaagcattagtaggtgatgcgtcagacaatataccaggtgttaagggaattggagataaaactgccataaagctgttagaagagtaccagactctggagaatatatatcagaatctaaataacattaaaggagcgctaaaagagaagttggaatcaggaaaagacatggcatttttatcaaaaagactggctactatcatatgcgatttaccaattgaggtgaatcttgaagaattaaaaaccaaagaatgggacaaagaaagactttatcagattttacttcaacttgagtttaaaagctttattaaaagactgggcttttcagaagagattaactatgcaaggcagaactttcagctacctgaatttagtattaaagaacttcgtgatgtttcagcaatagggggcaaagaaatctatctattgtactcagatgaagaaggacttttttatatttatgaccatcaaacctcaaccatttttacaacttctgataaggaagctattaaagatcttttaacactccaaagcattcaaaaggttgtatatgatttaaaaaatatactccataaggtggactttgatgaagctaatcagataaaaaattgtaatgatgttatgttggcttcatatgttttggacagtacacgcagttcgtacgatttggaaacattgtttatttcttatctcaacactgatatagctgcaatcaaagagaatagatgggctggtgctacagttttattaagaaatctttgggatgaactttcaaaactcattgatttaaactcggcccaatacgtttatgagagcatagagatgcctcttgttcccattttatatgaaatggagaaaatcggttttaaggttgacaaaaacactttgcaggagtatacaaaagagattgagagcaagcttttaaagttggaatcacagatttatcaaatagccggtgaatggtttaacataaactcgccaaaacaactctcatatatattattcgaaaaactgaagcttccggttgttaaaaagaccaaaacaggatattcaacagatgccgaggtattagaagagctgtatgataaacatgacataataccgcttattctggattatagaatgtatacgaaaatactgacaacttactgtcagggactggttcaggcaataaatcctgcaactggaagaattcataccaactttattcagacaggtacggcaactggaagacttgcaagtgcagagcccaatctgcaaaatattcctgtaaaatatgatgagggaaagctaataagaaaggcatttgttccagatgaaggttatgtgttgatagatgctgattattctcagattgagcttagaatacttgcacatatctctgaggatgaacgactgataaatgcttttaaaaataaccttgatattcattcacagacggcggcagagatctttggtgtggatataagtcaggttacaccaattatgcgaagccaggcaaaagcagttaactttggaattgtatatggtatatctgattatggactttcacgggatataaagatttcaagaaaagaagcagccgagtttattaatcgttattttgaaaagtatcccagagtaaaagaatatttggacaatgtcgtcaagtttgcccgtgaaaacggatttgttttgacaatatttaacaggaaatcttatatcaaggatataaagtctactaataaaaacctgagaaactatgcagagagaatagcaatgaattcacctatccagggaagtgctgcagatattatgaaaatagcaatgataagagtttataaaaagctaaaagaaaacaatttaaaatcaagaattattctgcaggtccatgacgaacttttgattgaatcaccctatgaagagaaagagatagtaaaggaaatagtaaaatcggagatggaaaatgcggttttattgaaagttcctttggtagttgaagtgaaagaaggttcaaattggtatgaaacaaagtaaaggatcc

SEQ ID NO: 1478 - DNA, 2623 bp, Artificial Sequence
  Description of Artificial Sequence: Synthetic DNA sequence of Caldicellulosiruptor TOK13B DNA Polymerase R766T
atgaaatacctgctgccgaccgctgctgctggtctgctgctcctcgctgcccagccggcgatggccatggaatttgttatttttgatgggaatagtattctgtatagagctttttttgccttgccacagcttactacctcaacaggcatacctacaaatgctatatatggttttttgaatgtgctgttaaaatacttagattctgaaaaaccggattatgtagcagtagcttttgacaaaaaaggcagagctgtccgaaaaagtgaatatgaagaatacaaggctaacagaaaaccgatgccagattctcttcaggttcagataccttacgtaagagaaatacttgctgctctgaacattcctgtactgaaatgtgaagggtatgaagctgatgacgttataggcacacttgtaaatagatttaaagcccaggatttagagattgtgataataaccggagacagagatacacttcagttacttgataaaaatgtaattgtcaaaatagtcacaacaaggtttgacaggacaactgaagatttgtatgctgtagaaaatgtaaaagaaaaatatggtgtttttgcgcatcaggttgttgactataaagcattagtaggtgatgcgtcagacaatataccaggtgttaagggaattggagataaaactgccataaagctgttagaagagtaccagactctggagaatatatatcagaatctaaataacattaaaggagcgctaaaagagaagttggaatcaggaaaagacatggcatttttatcaaaaagactggctactatcatatgcgatttaccaattgaggtgaatcttgaagaattaaaaaccaaagaatgggacaaagaaagactttatcagattttacttcaacttgagtttaaaagctttattaaaagactgggcttttcagaagagattaactatgcaaggcagaactttcagctacctgaatttagtattaaagaacttcgtgatgtttcagcaatagggggcaaagaaatctatctattgtactcagatgaagaaggacttttttatatttatgaccatcaaacctcaaccatttttacaacttctgataaggaagctattaaagatcttttaacactccaaagcattcaaaaggttgtatatgatttaaaaaatatactccataaggtggactttgatgaagctaatcagataaaaaattgtaatgatgttatgttggcttcatatgttttggacagtacacgcagttcgtacgatttggaaacattgtttatttcttatctcaacactgatatagctgcaatcaaagagaatagatgggctggtgctacagttttattaagaaatctttgggatgaactttcaaaactcattgatttaaactcggcccaatacgtttatgagagcatagagatgcctcttgttcccattttatatgaaatggagaaaatcggttttaaggttgacaaaaacactttgcaggagtatacaaaagagattgagagcaagcttttaaagttggaatcacagatttatcaaatagccggtgaatggtttaacataaactcgccaaaacaactctcatatatattattcgaaaaactgaagcttccggttgttaaaaagaccaaaacaggatattcaacagatgccgaggtattagaagagctgtatgataaacatgacataataccgcttattctggattatagaatgtatacgaaaatactgacaacttactgtcagggactggttcaggcaataaatcctgcaactggaagaattcataccaactttattcagacaggtacggcaactggaagacttgcaagtgcagagcccaatctgcaaaatattcctgtaaaatatgatgagggaaagctaataagaaaggcatttgttccagatgaaggttatgtgttgatagatgctgattattctcagattgagcttagaatacttgcacatatctctgaggatgaacgactgataaatgcttttaaaaataaccttgatattcattcacagacggcggcagagatctttggtgtggatataagtcaggttacaccaattatgcgaagccaggcaaaagcagttaactttggaattgtatatggtatatctgattatggactttcacgggatataaagatttcaagaaaagaagcagccgagtttattaatcgttattttgaaaagtatcccagagtaaaagaatatttggacaatgtcgtcaagtttgcccgtgaaaacggatttgttttgacaatatttaacaggaaaacttatatcaaggatataaagtctactaataaaaacctgagaaactatgcagagagaatagcaatgaattcacctatccagggaagtgctgcagatattatgaaaatagcaatgataagagtttataaaaagctaaaagaaaacaatttaaaatcaagaattattctgcaggtccatgacgaacttttgattgaatcaccctatgaagagaaagagatagtaaaggaaatagtaaaatcggagatggaaaatgcggttttattgaaagttcctttggtagttgaagtgaaagaaggttcaaattggtatgaaacaaagtaaaggatcc

SEQ ID NO: 1479 - DNA, 2623 bp, Artificial Sequence
  Description of Artificial Sequence: Synthetic DNA sequence of Caldicellulosiruptor TOK13B DNA Polymerase R766W
atgaaatacctgctgccgaccgctgctgctggtctgctgctcctcgctgcccagccggcgatggccatggaatttgttatttttgatgggaatagtattctgtatagagctttttttgccttgccacagcttactacctcaacaggcatacctacaaatgctatatatggttttttgaatgtgctgttaaaatacttagattctgaaaaaccggattatgtagcagtagcttttgacaaaaaaggcagagctgtccgaaaaagtgaatatgaagaatacaaggctaacagaaaaccgatgccagattctcttcaggttcagataccttacgtaagagaaatacttgctgctctgaacattcctgtactgaaatgtgaagggtatgaagctgatgacgttataggcacacttgtaaatagatttaaagcccaggatttagagattgtgataataaccggagacagagatacacttcagttacttgataaaaatgtaattgtcaaaatagtcacaacaaggtttgacaggacaactgaagatttgtatgctgtagaaaatgtaaaagaaaaatatggtgtttttgcgcatcaggttgttgactataaagcattagtaggtgatgcgtcagacaatataccaggtgttaagggaattggagataaaactgccataaagctgttagaagagtaccagactctggagaatatatatcagaatctaaataacattaaaggagcgctaaaagagaagttggaatcaggaaaagacatggcatttttatcaaaaagactggctactatcatatgcgatttaccaattgaggtgaatcttgaagaattaaaaaccaaagaatgggacaaagaaagactttatcagattttacttcaacttgagtttaaaagctttattaaaagactgggcttttcagaagagattaactatgcaaggcagaactttcagctacctgaatttagtattaaagaacttcgtgatgtttcagcaatagggggcaaagaaatctatctattgtactcagatgaagaaggacttttttatatttatgaccatcaaacctcaaccatttttacaacttctgataaggaagctattaaagatcttttaacactccaaagcattcaaaaggttgtatatgatttaaaaaatatactccataaggtggactttgatgaagctaatcagataaaaaattgtaatgatgttatgttggcttcatatgttttggacagtacacgcagttcgtacgatttggaaacattgtttatttcttatctcaacactgatatagctgcaatcaaagagaatagatgggctggtgctacagttttattaagaaatctttgggatgaactttcaaaactcattgatttaaactcggcccaatacgtttatgagagcatagagatgcctcttgttcccattttatatgaaatggagaaaatcggttttaaggttgacaaaaacactttgcaggagtatacaaaagagattgagagcaagcttttaaagttggaatcacagatttatcaaatagccggtgaatggtttaacataaactcgccaaaacaactctcatatatattattcgaaaaactgaagcttccggttgttaaaaagaccaaaacaggatattcaacagatgccgaggtattagaagagctgtatgataaacatgacataataccgcttattctggattatagaatgtatacgaaaatactgacaacttactgtcagggactggttcaggcaataaatcctgcaactggaagaattcataccaactttattcagacaggtacggcaactggaagacttgcaagtgcagagcccaatctgcaaaatattcctgtaaaatatgatgagggaaagctaataagaaaggcatttgttccagatgaaggttatgtgttgatagatgctgattattctcagattgagcttagaatacttgcacatatctctgaggatgaacgactgataaatgcttttaaaaataaccttgatattcattcacagacggcggcagagatctttggtgtggatataagtcaggttacaccaattatgcgaagccaggcaaaagcagttaactttggaattgtatatggtatatctgattatggactttcacgggatataaagatttcaagaaaagaagcagccgagtttattaatcgttattttgaaaagtatcccagagtaaaagaatatttggacaatgtcgtcaagtttgcccgtgaaaacggatttgttttgacaatatttaacaggaaatggtatatcaaggatataaagtctactaataaaaacctgagaaactatgcagagagaatagcaatgaattcacctatccagggaagtgctgcagatattatgaaaatagcaatgataagagtttataaaaagctaaaagaaaacaatttaaaatcaagaattattctgcaggtccatgacgaacttttgattgaatcaccctatgaagagaaagagatagtaaaggaaatagtaaaatcggagatggaaaatgcggttttattgaaagttcctttggtagttgaagtgaaagaaggttcaaattggtatgaaacaaagtaaaggatcc

SEQ ID NO: 1480 - DNA, 2623 bp, Artificial Sequence
  Description of Artificial Sequence: Synthetic DNA sequence of Caldicellulosiruptor TOK13B DNA Polymerase R766Y
atgaaatacctgctgccgaccgctgctgctggtctgctgctcctcgctgcccagccggcgatggccatggaatttgttatttttgatgggaatagtattctgtatagagctttttttgccttgccacagcttactacctcaacaggcatacctacaaatgctatatatggttttttgaatgtgctgttaaaatacttagattctgaaaaaccggattatgtagcagtagcttttgacaaaaaaggcagagctgtccgaaaaagtgaatatgaagaatacaaggctaacagaaaaccgatgccagattctcttcaggttcagataccttacgtaagagaaatacttgctgctctgaacattcctgtactgaaatgtgaagggtatgaagctgatgacgttataggcacacttgtaaatagatttaaagcccaggatttagagattgtgataataaccggagacagagatacacttcagttacttgataaaaatgtaattgtcaaaatagtcacaacaaggtttgacaggacaactgaagatttgtatgctgtagaaaatgtaaaagaaaaatatggtgtttttgcgcatcaggttgttgactataaagcattagtaggtgatgcgtcagacaatataccaggtgttaagggaattggagataaaactgccataaagctgttagaagagtaccagactctggagaatatatatcagaatctaaataacattaaaggagcgctaaaagagaagttggaatcaggaaaagacatggcatttttatcaaaaagactggctactatcatatgcgatttaccaattgaggtgaatcttgaagaattaaaaaccaaagaatgggacaaagaaagactttatcagattttacttcaacttgagtttaaaagctttattaaaagactgggcttttcagaagagattaactatgcaaggcagaactttcagctacctgaatttagtattaaagaacttcgtgatgtttcagcaatagggggcaaagaaatctatctattgtactcagatgaagaaggacttttttatatttatgaccatcaaacctcaaccatttttacaacttctgataaggaagctattaaagatcttttaacactccaaagcattcaaaaggttgtatatgatttaaaaaatatactccataaggtggactttgatgaagctaatcagataaaaaattgtaatgatgttatgttggcttcatatgttttggacagtacacgcagttcgtacgatttggaaacattgtttatttcttatctcaacactgatatagctgcaatcaaagagaatagatgggctggtgctacagttttattaagaaatctttgggatgaactttcaaaactcattgatttaaactcggcccaatacgtttatgagagcatagagatgcctcttgttcccattttatatgaaatggagaaaatcggttttaaggttgacaaaaacactttgcaggagtatacaaaagagattgagagcaagcttttaaagttggaatcacagatttatcaaatagccggtgaatggtttaacataaactcgccaaaacaactctcatatatattattcgaaaaactgaagcttccggttgttaaaaagaccaaaacaggatattcaacagatgccgaggtattagaagagctgtatgataaacatgacataataccgcttattctggattatagaatgtatacgaaaatactgacaacttactgtcagggactggttcaggcaataaatcctgcaactggaagaattcataccaactttattcagacaggtacggcaactggaagacttgcaagtgcagagcccaatctgcaaaatattcctgtaaaatatgatgagggaaagctaataagaaaggcatttgttccagatgaaggttatgtgttgatagatgctgattattctcagattgagcttagaatacttgcacatatctctgaggatgaacgactgataaatgcttttaaaaataaccttgatattcattcacagacggcggcagagatctttggtgtggatataagtcaggttacaccaattatgcgaagccaggcaaaagcagttaactttggaattgtatatggtatatctgattatggactttcacgggatataaagatttcaagaaaagaagcagccgagtttattaatcgttattttgaaaagtatcccagagtaaaagaatatttggacaatgtcgtcaagtttgcccgtgaaaacggatttgttttgacaatatttaacaggaaatattatatcaaggatataaagtctactaataaaaacctgagaaactatgcagagagaatagcaatgaattcacctatccagggaagtgctgcagatattatgaaaatagcaatgataagagtttataaaaagctaaaagaaaacaatttaaaatcaagaattattctgcaggtccatgacgaacttttgattgaatcaccctatgaagagaaagagatagtaaaggaaatagtaaaatcggagatggaaaatgcggttttattgaaagttcctttggtagttgaagtgaaagaaggttcaaattggtatgaaacaaagtaaaggatcc

SEQ ID NO: 1481 - DNA, 2623 bp, Artificial Sequence
  Description of Artificial Sequence: Synthetic DNA sequence of Caldicellulosiruptor TOK13B DNA Polymerase R766V
atgaaatacctgctgccgaccgctgctgctggtctgctgctcctcgctgcccagccggcgatggccatggaatttgttatttttgatgggaatagtattctgtatagagctttttttgccttgccacagcttactacctcaacaggcatacctacaaatgctatatatggttttttgaatgtgctgttaaaatacttagattctgaaaaaccggattatgtagcagtagcttttgacaaaaaaggcagagctgtccgaaaaagtgaatatgaagaatacaaggctaacagaaaaccgatgccagattctcttcaggttcagataccttacgtaagagaaatacttgctgctctgaacattcctgtactgaaatgtgaagggtatgaagctgatgacgttataggcacacttgtaaatagatttaaagcccaggatttagagattgtgataataaccggagacagagatacacttcagttacttgataaaaatgtaattgtcaaaatagtcacaacaaggtttgacaggacaactgaagatttgtatgctgtagaaaatgtaaaagaaaaatatggtgtttttgcgcatcaggttgttgactataaagcattagtaggtgatgcgtcagacaatataccaggtgttaagggaattggagataaaactgccataaagctgttagaagagtaccagactctggagaatatatatcagaatctaaataacattaaaggagcgctaaaagagaagttggaatcaggaaaagacatggcatttttatcaaaaagactggctactatcatatgcgatttaccaattgaggtgaatcttgaagaattaaaaaccaaagaatgggacaaagaaagactttatcagattttacttcaacttgagtttaaaagctttattaaaagactgggcttttcagaagagattaactatgcaaggcagaactttcagctacctgaatttagtattaaagaacttcgtgatgtttcagcaatagggggcaaagaaatctatctattgtactcagatgaagaaggacttttttatatttatgaccatcaaacctcaaccatttttacaacttctgataaggaagctattaaagatcttttaacactccaaagcattcaaaaggttgtatatgatttaaaaaatatactccataaggtggactttgatgaagctaatcagataaaaaattgtaatgatgttatgttggcttcatatgttttggacagtacacgcagttcgtacgatttggaaacattgtttatttcttatctcaacactgatatagctgcaatcaaagagaatagatgggctggtgctacagttttattaagaaatctttgggatgaactttcaaaactcattgatttaaactcggcccaatacgtttatgagagcatagagatgcctcttgttcccattttatatgaaatggagaaaatcggttttaaggttgacaaaaacactttgcaggagtatacaaaagagattgagagcaagcttttaaagttggaatcacagatttatcaaatagccggtgaatggtttaacataaactcgccaaaacaactctcatatatattattcgaaaaactgaagcttccggttgttaaaaagaccaaaacaggatattcaacagatgccgaggtattagaagagctgtatgataaacatgacataataccgcttattctggattatagaatgtatacgaaaatactgacaacttactgtcagggactggttcaggcaataaatcctgcaactggaagaattcataccaactttattcagacaggtacggcaactggaagacttgcaagtgcagagcccaatctgcaaaatattcctgtaaaatatgatgagggaaagctaataagaaaggcatttgttccagatgaaggttatgtgttgatagatgctgattattctcagattgagcttagaatacttgcacatatctctgaggatgaacgactgataaatgcttttaaaaataaccttgatattcattcacagacggcggcagagatctttggtgtggatataagtcaggttacaccaattatgcgaagccaggcaaaagcagttaactttggaattgtatatggtatatctgattatggactttcacgggatataaagatttcaagaaaagaagcagccgagtttattaatcgttattttgaaaagtatcccagagtaaaagaatatttggacaatgtcgtcaagtttgcccgtgaaaacggatttgttttgacaatatttaacaggaaagtttatatcaaggatataaagtctactaataaaaacctgagaaactatgcagagagaatagcaatgaattcacctatccagggaagtgctgcagatattatgaaaatagcaatgataagagtttataaaaagctaaaagaaaacaatttaaaatcaagaattattctgcaggtccatgacgaacttttgattgaatcaccctatgaagagaaagagatagtaaaggaaatagtaaaatcggagatggaaaatgcggttttattgaaagttcctttggtagttgaagtgaaagaaggttcaaattggtatgaaacaaagtaaaggatcc

SEQ ID NO: 1482 - DNA, 2623 bp, Artificial Sequence
  Description of Artificial Sequence: Synthetic DNA sequence of Caldicellulosiruptor TOK13B DNA Polymerase Y767A
atgaaatacctgctgccgaccgctgctgctggtctgctgctcctcgctgcccagccggcgatggccatggaatttgttatttttgatgggaatagtattctgtatagagctttttttgccttgccacagcttactacctcaacaggcatacctacaaatgctatatatggttttttgaatgtgctgttaaaatacttagattctgaaaaaccggattatgtagcagtagcttttgacaaaaaaggcagagctgtccgaaaaagtgaatatgaagaatacaaggctaacagaaaaccgatgccagattctcttcaggttcagataccttacgtaagagaaatacttgctgctctgaacattcctgtactgaaatgtgaagggtatgaagctgatgacgttataggcacacttgtaaatagatttaaagcccaggatttagagattgtgataataaccggagacagagatacacttcagttacttgataaaaatgtaattgtcaaaatagtcacaacaaggtttgacaggacaactgaagatttgtatgctgtagaaaatgtaaaagaaaaatatggtgtttttgcgcatcaggttgttgactataaagcattagtaggtgatgcgtcagacaatataccaggtgttaagggaattggagataaaactgccataaagctgttagaagagtaccagactctggagaatatatatcagaatctaaataacattaaaggagcgctaaaagagaagttggaatcaggaaaagacatggcatttttatcaaaaagactggctactatcatatgcgatttaccaattgaggtgaatcttgaagaattaaaaaccaaagaatgggacaaagaaagactttatcagattttacttcaacttgagtttaaaagctttattaaaagactgggcttttcagaagagattaactatgcaaggcagaactttcagctacctgaatttagtattaaagaacttcgtgatgtttcagcaatagggggcaaagaaatctatctattgtactcagatgaagaaggacttttttatatttatgaccatcaaacctcaaccatttttacaacttctgataaggaagctattaaagatcttttaacactccaaagcattcaaaaggttgtatatgatttaaaaaatatactccataaggtggactttgatgaagctaatcagataaaaaattgtaatgatgttatgttggcttcatatgttttggacagtacacgcagttcgtacgatttggaaacattgtttatttcttatctcaacactgatatagctgcaatcaaagagaatagatgggctggtgctacagttttattaagaaatctttgggatgaactttcaaaactcattgatttaaactcggcccaatacgtttatgagagcatagagatgcctcttgttcccattttatatgaaatggagaaaatcggttttaaggttgacaaaaacactttgcaggagtatacaaaagagattgagagcaagcttttaaagttggaatcacagatttatcaaatagccggtgaatggtttaacataaactcgccaaaacaactctcatatatattattcgaaaaactgaagcttccggttgttaaaaagaccaaaacaggatattcaacagatgccgaggtattagaagagctgtatgataaacatgacataataccgcttattctggattatagaatgtatacgaaaatactgacaacttactgtcagggactggttcaggcaataaatcctgcaactggaagaattcataccaactttattcagacaggtacggcaactggaagacttgcaagtgcagagcccaatctgcaaaatattcctgtaaaatatgatgagggaaagctaataagaaaggcatttgttccagatgaaggttatgtgttgatagatgctgattattctcagattgagcttagaatacttgcacatatctctgaggatgaacgactgataaatgcttttaaaaataaccttgatattcattcacagacggcggcagagatctttggtgtggatataagtcaggttacaccaattatgcgaagccaggcaaaagcagttaactttggaattgtatatggtatatctgattatggactttcacgggatataaagatttcaagaaaagaagcagccgagtttattaatcgttattttgaaaagtatcccagagtaaaagaatatttggacaatgtcgtcaagtttgcccgtgaaaacggatttgttttgacaatatttaacaggaaaagggctatcaaggatataaagtctactaataaaaacctgagaaactatgcagagagaatagcaatgaattcacctatccagggaagtgctgcagatattatgaaaatagcaatgataagagtttataaaaagctaaaagaaaacaatttaaaatcaagaattattctgcaggtccatgacgaacttttgattgaatcaccctatgaagagaaagagatagtaaaggaaatagtaaaatcggagatggaaaatgcggttttattgaaagttcctttggtagttgaagtgaaagaaggttcaaattggtatgaaacaaagtaaaggatcc

SEQ ID NO: 1483 - DNA, 2623 bp, Artificial Sequence
  Description of Artificial Sequence: Synthetic DNA sequence of Caldicellulosiruptor TOK13B DNA Polymerase Y767R
atgaaatacctgctgccgaccgctgctgctggtctgctgctcctcgctgcccagccggcgatggccatggaatttgttatttttgatgggaatagtattctgtatagagctttttttgccttgccacagcttactacctcaacaggcatacctacaaatgctatatatggttttttgaatgtgctgttaaaatacttagattctgaaaaaccggattatgtagcagtagcttttgacaaaaaaggcagagctgtccgaaaaagtgaatatgaagaatacaaggctaacagaaaaccgatgccagattctcttcaggttcagataccttacgtaagagaaatacttgctgctctgaacattcctgtactgaaatgtgaagggtatgaagctgatgacgttataggcacacttgtaaatagatttaaagcccaggatttagagattgtgataataaccggagacagagatacacttcagttacttgataaaaatgtaattgtcaaaatagtcacaacaaggtttgacaggacaactgaagatttgtatgctgtagaaaatgtaaaagaaaaatatggtgtttttgcgcatcaggttgttgactataaagcattagtaggtgatgcgtcagacaatataccaggtgttaagggaattggagataaaactgccataaagctgttagaagagtaccagactctggagaatatatatcagaatctaaataacattaaaggagcgctaaaagagaagttggaatcaggaaaagacatggcatttttatcaaaaagactggctactatcatatgcgatttaccaattgaggtgaatcttgaagaattaaaaaccaaagaatgggacaaagaaagactttatcagattttacttcaacttgagtttaaaagctttattaaaagactgggcttttcagaagagattaactatgcaaggcagaactttcagctacctgaatttagtattaaagaacttcgtgatgtttcagcaatagggggcaaagaaatctatctattgtactcagatgaagaaggacttttttatatttatgaccatcaaacctcaaccatttttacaacttctgataaggaagctattaaagatcttttaacactccaaagcattcaaaaggttgtatatgatttaaaaaatatactccataaggtggactttgatgaagctaatcagataaaaaattgtaatgatgttatgttggcttcatatgttttggacagtacacgcagttcgtacgatttggaaacattgtttatttcttatctcaacactgatatagctgcaatcaaagagaatagatgggctggtgctacagttttattaagaaatctttgggatgaactttcaaaactcattgatttaaactcggcccaatacgtttatgagagcatagagatgcctcttgttcccattttatatgaaatggagaaaatcggttttaaggttgacaaaaacactttgcaggagtatacaaaagagattgagagcaagcttttaaagttggaatcacagatttatcaaatagccggtgaatggtttaacataaactcgccaaaacaactctcatatatattattcgaaaaactgaagcttccggttgttaaaaagaccaaaacaggatattcaacagatgccgaggtattagaagagctgtatgataaacatgacataataccgcttattctggattatagaatgtatacgaaaatactgacaacttactgtcagggactggttcaggcaataaatcctgcaactggaagaattcataccaactttattcagacaggtacggcaactggaagacttgcaagtgcagagcccaatctgcaaaatattcctgtaaaatatgatgagggaaagctaataagaaaggcatttgttccagatgaaggttatgtgttgatagatgctgattattctcagattgagcttagaatacttgcacatatctctgaggatgaacgactgataaatgcttttaaaaataaccttgatattcattcacagacggcggcagagatctttggtgtggatataagtcaggttacaccaattatgcgaagccaggcaaaagcagttaactttggaattgtatatggtatatctgattatggactttcacgggatataaagatttcaagaaaagaagcagccgagtttattaatcgttattttgaaaagtatcccagagtaaaagaatatttggacaatgtcgtcaagtttgcccgtgaaaacggatttgttttgacaatatttaacaggaaaaggcgtatcaaggatataaagtctactaataaaaacctgagaaactatgcagagagaatagcaatgaattcacctatccagggaagtgctgcagatattatgaaaatagcaatgataagagtttataaaaagctaaaagaaaacaatttaaaatcaagaattattctgcaggtccatgacgaacttttgattgaatcaccctatgaagagaaagagatagtaaaggaaatagtaaaatcggagatggaaaatgcggttttattgaaagttcctttggtagttgaagtgaaagaaggttcaaattggtatgaaacaaagtaaaggatcc

SEQ ID NO: 1484 - DNA, 2623 bp, Artificial Sequence
  Description of Artificial Sequence: Synthetic DNA sequence of Caldicellulosiruptor TOK13B DNA Polymerase Y767N
atgaaatacctgctgccgaccgctgctgctggtctgctgctcctcgctgcccagccggcgatggccatggaatttgttatttttgatgggaatagtattctgtatagagctttttttgccttgccacagcttactacctcaacaggcatacctacaaatgctatatatggttttttgaatgtgctgttaaaatacttagattctgaaaaaccggattatgtagcagtagcttttgacaaaaaaggcagagctgtccgaaaaagtgaatatgaagaatacaaggctaacagaaaaccgatgccagattctcttcaggttcagataccttacgtaagagaaatacttgctgctctgaacattcctgtactgaaatgtgaagggtatgaagctgatgacgttataggcacacttgtaaatagatttaaagcccaggatttagagattgtgataataaccggagacagagatacacttcagttacttgataaaaatgtaattgtcaaaatagtcacaacaaggtttgacaggacaactgaagatttgtatgctgtagaaaatgtaaaagaaaaatatggtgtttttgcgcatcaggttgttgactataaagcattagtaggtgatgcgtcagacaatataccaggtgttaagggaattggagataaaactgccataaagctgttagaagagtaccagactctggagaatatatatcagaatctaaataacattaaaggagcgctaaaagagaagttggaatcaggaaaagacatggcatttttatcaaaaagactggctactatcatatgcgatttaccaattgaggtgaatcttgaagaattaaaaaccaaagaatgggacaaagaaagactttatcagattttacttcaacttgagtttaaaagctttattaaaagactgggcttttcagaagagattaactatgcaaggcagaactttcagctacctgaatttagtattaaagaacttcgtgatgtttcagcaatagggggcaaagaaatctatctattgtactcagatgaagaaggacttttttatatttatgaccatcaaacctcaaccatttttacaacttctgataaggaagctattaaagatcttttaacactccaaagcattcaaaaggttgtatatgatttaaaaaatatactccataaggtggactttgatgaagctaatcagataaaaaattgtaatgatgttatgttggcttcatatgttttggacagtacacgcagttcgtacgatttggaaacattgtttatttcttatctcaacactgatatagctgcaatcaaagagaatagatgggctggtgctacagttttattaagaaatctttgggatgaactttcaaaactcattgatttaaactcggcccaatacgtttatgagagcatagagatgcctcttgttcccattttatatgaaatggagaaaatcggttttaaggttgacaaaaacactttgcaggagtatacaaaagagattgagagcaagcttttaaagttggaatcacagatttatcaaatagccggtgaatggtttaacataaactcgccaaaacaactctcatatatattattcgaaaaactgaagcttccggttgttaaaaagaccaaaacaggatattcaacagatgccgaggtattagaagagctgtatgataaacatgacataataccgcttattctggattatagaatgtatacgaaaatactgacaacttactgtcagggactggttcaggcaataaatcctgcaactggaagaattcataccaactttattcagacaggtacggcaactggaagacttgcaagtgcagagcccaatctgcaaaatattcctgtaaaatatgatgagggaaagctaataagaaaggcatttgttccagatgaaggttatgtgttgatagatgctgattattctcagattgagcttagaatacttgcacatatctctgaggatgaacgactgataaatgcttttaaaaataaccttgatattcattcacagacggcggcagagatctttggtgtggatataagtcaggttacaccaattatgcgaagccaggcaaaagcagttaactttggaattgtatatggtatatctgattatggactttcacgggatataaagatttcaagaaaagaagcagccgagtttattaatcgttattttgaaaagtatcccagagtaaaagaatatttggacaatgtcgtcaagtttgcccgtgaaaacggatttgttttgacaatatttaacaggaaaaggaatatcaaggatataaagtctactaataaaaacctgagaaactatgcagagagaatagcaatgaattcacctatccagggaagtgctgcagatattatgaaaatagcaatgataagagtttataaaaagctaaaagaaaacaatttaaaatcaagaattattctgcaggtccatgacgaacttttgattgaatcaccctatgaagagaaagagatagtaaaggaaatagtaaaatcggagatggaaaatgcggttttattgaaagttcctttggtagttgaagtgaaagaaggttcaaattggtatgaaacaaagtaaaggatcc

SEQ ID NO: 1485 - DNA, 2623 bp, Artificial Sequence
  Description of Artificial Sequence: Synthetic DNA sequence of Caldicellulosiruptor TOK13B DNA Polymerase Y767D
atgaaatacctgctgccgaccgctgctgctggtctgctgctcctcgctgcccagccggcgatggccatggaatttgttatttttgatgggaatagtattctgtatagagctttttttgccttgccacagcttactacctcaacaggcatacctacaaatgctatatatggttttttgaatgtgctgttaaaatacttagattctgaaaaaccggattatgtagcagtagcttttgacaaaaaaggcagagctgtccgaaaaagtgaatatgaagaatacaaggctaacagaaaaccgatgccagattctcttcaggttcagataccttacgtaagagaaatacttgctgctctgaacattcctgtactgaaatgtgaagggtatgaagctgatgacgttataggcacacttgtaaatagatttaaagcccaggatttagagattgtgataataaccggagacagagatacacttcagttacttgataaaaatgtaattgtcaaaatagtcacaacaaggtttgacaggacaactgaagatttgtatgctgtagaaaatgtaaaagaaaaatatggtgtttttgcgcatcaggttgttgactataaagcattagtaggtgatgcgtcagacaatataccaggtgttaagggaattggagataaaactgccataaagctgttagaagagtaccagactctggagaatatatatcagaatctaaataacattaaaggagcgctaaaagagaagttggaatcaggaaaagacatggcatttttatcaaaaagactggctactatcatatgcgatttaccaattgaggtgaatcttgaagaattaaaaaccaaagaatgggacaaagaaagactttatcagattttacttcaacttgagtttaaaagctttattaaaagactgggcttttcagaagagattaactatgcaaggcagaactttcagctacctgaatttagtattaaagaacttcgtgatgtttcagcaatagggggcaaagaaatctatctattgtactcagatgaagaaggacttttttatatttatgaccatcaaacctcaaccatttttacaacttctgataaggaagctattaaagatcttttaacactccaaagcattcaaaaggttgtatatgatttaaaaaatatactccataaggtggactttgatgaagctaatcagataaaaaattgtaatgatgttatgttggcttcatatgttttggacagtacacgcagttcgtacgatttggaaacattgtttatttcttatctcaacactgatatagctgcaatcaaagagaatagatgggctggtgctacagttttattaagaaatctttgggatgaactttcaaaactcattgatttaaactcggcccaatacgtttatgagagcatagagatgcctcttgttcccattttatatgaaatggagaaaatcggttttaaggttgacaaaaacactttgcaggagtatacaaaagagattgagagcaagcttttaaagttggaatcacagatttatcaaatagccggtgaatggtttaacataaactcgccaaaacaactctcatatatattattcgaaaaactgaagcttccggttgttaaaaagaccaaaacaggatattcaacagatgccgaggtattagaagagctgtatgataaacatgacataataccgcttattctggattatagaatgtatacgaaaatactgacaacttactgtcagggactggttcaggcaataaatcctgcaactggaagaattcataccaactttattcagacaggtacggcaactggaagacttgcaagtgcagagcccaatctgcaaaatattcctgtaaaatatgatgagggaaagctaataagaaaggcatttgttccagatgaaggttatgtgttgatagatgctgattattctcagattgagcttagaatacttgcacatatctctgaggatgaacgactgataaatgcttttaaaaataaccttgatattcattcacagacggcggcagagatctttggtgtggatataagtcaggttacaccaattatgcgaagccaggcaaaagcagttaactttggaattgtatatggtatatctgattatggactttcacgggatataaagatttcaagaaaagaagcagccgagtttattaatcgttattttgaaaagtatcccagagtaaaagaatatttggacaatgtcgtcaagtttgcccgtgaaaacggatttgttttgacaatatttaacaggaaaagggatatcaaggatataaagtctactaataaaaacctgagaaactatgcagagagaatagcaatgaattcacctatccagggaagtgctgcagatattatgaaaatagcaatgataagagtttataaaaagctaaaagaaaacaatttaaaatcaagaattattctgcaggtccatgacgaacttttgattgaatcaccctatgaagagaaagagatagtaaaggaaatagtaaaatcggagatggaaaatgcggttttattgaaagttcctttggtagttgaagtgaaagaaggttcaaattggtatgaaacaaagtaaaggatcc

SEQ ID NO: 1486 - DNA, 2623 bp, Artificial Sequence
  Description of Artificial Sequence: Synthetic DNA sequence of Caldicellulosiruptor TOK13B DNA Polymerase Y767C
atgaaatacctgctgccgaccgctgctgctggtctgctgctcctcgctgcccagccggcgatggccatggaatttgttatttttgatgggaatagtattctgtatagagctttttttgccttgccacagcttactacctcaacaggcatacctacaaatgctatatatggttttttgaatgtgctgttaaaatacttagattctgaaaaaccggattatgtagcagtagcttttgacaaaaaaggcagagctgtccgaaaaagtgaatatgaagaatacaaggctaacagaaaaccgatgccagattctcttcaggttcagataccttacgtaagagaaatacttgctgctctgaacattcctgtactgaaatgtgaagggtatgaagctgatgacgttataggcacacttgtaaatagatttaaagcccaggatttagagattgtgataataaccggagacagagatacacttcagttacttgataaaaatgtaattgtcaaaatagtcacaacaaggtttgacaggacaactgaagatttgtatgctgtagaaaatgtaaaagaaaaatatggtgtttttgcgcatcaggttgttgactataaagcattagtaggtgatgcgtcagacaatataccaggtgttaagggaattggagataaaactgccataaagctgttagaagagtaccagactctggagaatatatatcagaatctaaataacattaaaggagcgctaaaagagaagttggaatcaggaaaagacatggcatttttatcaaaaagactggctactatcatatgcgatttaccaattgaggtgaatcttgaagaattaaaaaccaaagaatgggacaaagaaagactttatcagattttacttcaacttgagtttaaaagctttattaaaagactgggcttttcagaagagattaactatgcaaggcagaactttcagctacctgaatttagtattaaagaacttcgtgatgtttcagcaatagggggcaaagaaatctatctattgtactcagatgaagaaggacttttttatatttatgaccatcaaacctcaaccatttttacaacttctgataaggaagctattaaagatcttttaacactccaaagcattcaaaaggttgtatatgatttaaaaaatatactccataaggtggactttgatgaagctaatcagataaaaaattgtaatgatgttatgttggcttcatatgttttggacagtacacgcagttcgtacgatttggaaacattgtttatttcttatctcaacactgatatagctgcaatcaaagagaatagatgggctggtgctacagttttattaagaaatctttgggatgaactttcaaaactcattgatttaaactcggcccaatacgtttatgagagcatagagatgcctcttgttcccattttatatgaaatggagaaaatcggttttaaggttgacaaaaacactttgcaggagtatacaaaagagattgagagcaagcttttaaagttggaatcacagatttatcaaatagccggtgaatggtttaacataaactcgccaaaacaactctcatatatattattcgaaaaactgaagcttccggttgttaaaaagaccaaaacaggatattcaacagatgccgaggtattagaagagctgtatgataaacatgacataataccgcttattctggattatagaatgtatacgaaaatactgacaacttactgtcagggactggttcaggcaataaatcctgcaactggaagaattcataccaactttattcagacaggtacggcaactggaagacttgcaagtgcagagcccaatctgcaaaatattcctgtaaaatatgatgagggaaagctaataagaaaggcatttgttccagatgaaggttatgtgttgatagatgctgattattctcagattgagcttagaatacttgcacatatctctgaggatgaacgactgataaatgcttttaaaaataaccttgatattcattcacagacggcggcagagatctttggtgtggatataagtcaggttacaccaattatgcgaagccaggcaaaagcagttaactttggaattgtatatggtatatctgattatggactttcacgggatataaagatttcaagaaaagaagcagccgagtttattaatcgttattttgaaaagtatcccagagtaaaagaatatttggacaatgtcgtcaagtttgcccgtgaaaacggatttgttttgacaatatttaacaggaaaaggtgtatcaaggatataaagtctactaataaaaacctgagaaactatgcagagagaatagcaatgaattcacctatccagggaagtgctgcagatattatgaaaatagcaatgataagagtttataaaaagctaaaagaaaacaatttaaaatcaagaattattctgcaggtccatgacgaacttttgattgaatcaccctatgaagagaaagagatagtaaaggaaatagtaaaatcggagatggaaaatgcggttttattgaaagttcctttggtagttgaagtgaaagaaggttcaaattggtatgaaacaaagtaaaggatcc

SEQ ID NO: 1487 - DNA, 2623 bp, Artificial Sequence
  Description of Artificial Sequence: Synthetic DNA sequence of Caldicellulosiruptor TOK13B DNA Polymerase Y767E
atgaaatacctgctgccgaccgctgctgctggtctgctgctcctcgctgcccagccggcgatggccatggaatttgttatttttgatgggaatagtattctgtatagagctttttttgccttgccacagcttactacctcaacaggcatacctacaaatgctatatatggttttttgaatgtgctgttaaaatacttagattctgaaaaaccggattatgtagcagtagcttttgacaaaaaaggcagagctgtccgaaaaagtgaatatgaagaatacaaggctaacagaaaaccgatgccagattctcttcaggttcagataccttacgtaagagaaatacttgctgctctgaacattcctgtactgaaatgtgaagggtatgaagctgatgacgttataggcacacttgtaaatagatttaaagcccaggatttagagattgtgataataaccggagacagagatacacttcagttacttgataaaaatgtaattgtcaaaatagtcacaacaaggtttgacaggacaactgaagatttgtatgctgtagaaaatgtaaaagaaaaatatggtgtttttgcgcatcaggttgttgactataaagcattagtaggtgatgcgtcagacaatataccaggtgttaagggaattggagataaaactgccataaagctgttagaagagtaccagactctggagaatatatatcagaatctaaataacattaaaggagcgctaaaagagaagttggaatcaggaaaagacatggcatttttatcaaaaagactggctactatcatatgcgatttaccaattgaggtgaatcttgaagaattaaaaaccaaagaatgggacaaagaaagactttatcagattttacttcaacttgagtttaaaagctttattaaaagactgggcttttcagaagagattaactatgcaaggcagaactttcagctacctgaatttagtattaaagaacttcgtgatgtttcagcaatagggggcaaagaaatctatctattgtactcagatgaagaaggacttttttatatttatgaccatcaaacctcaaccatttttacaacttctgataaggaagctattaaagatcttttaacactccaaagcattcaaaaggttgtatatgatttaaaaaatatactccataaggtggactttgatgaagctaatcagataaaaaattgtaatgatgttatgttggcttcatatgttttggacagtacacgcagttcgtacgatttggaaacattgtttatttcttatctcaacactgatatagctgcaatcaaagagaatagatgggctggtgctacagttttattaagaaatctttgggatgaactttcaaaactcattgatttaaactcggcccaatacgtttatgagagcatagagatgcctcttgttcccattttatatgaaatggagaaaatcggttttaaggttgacaaaaacactttgcaggagtatacaaaagagattgagagcaagcttttaaagttggaatcacagatttatcaaatagccggtgaatggtttaacataaactcgccaaaacaactctcatatatattattcgaaaaactgaagcttccggttgttaaaaagaccaaaacaggatattcaacagatgccgaggtattagaagagctgtatgataaacatgacataataccgcttattctggattatagaatgtatacgaaaatactgacaacttactgtcagggactggttcaggcaataaatcctgcaactggaagaattcataccaactttattcagacaggtacggcaactggaagacttgcaagtgcagagcccaatctgcaaaatattcctgtaaaatatgatgagggaaagctaataagaaaggcatttgttccagatgaaggttatgtgttgatagatgctgattattctcagattgagcttagaatacttgcacatatctctgaggatgaacgactgataaatgcttttaaaaataaccttgatattcattcacagacggcggcagagatctttggtgtggatataagtcaggttacaccaattatgcgaagccaggcaaaagcagttaactttggaattgtatatggtatatctgattatggactttcacgggatataaagatttcaagaaaagaagcagccgagtttattaatcgttattttgaaaagtatcccagagtaaaagaatatttggacaatgtcgtcaagtttgcccgtgaaaacggatttgttttgacaatatttaacaggaaaagggaaatcaaggatataaagtctactaataaaaacctgagaaactatgcagagagaatagcaatgaattcacctatccagggaagtgctgcagatattatgaaaatagcaatgataagagtttataaaaagctaaaagaaaacaatttaaaatcaagaattattctgcaggtccatgacgaacttttgattgaatcaccctatgaagagaaagagatagtaaaggaaatagtaaaatcggagatggaaaatgcggttttattgaaagttcctttggtagttgaagtgaaagaaggttcaaattggtatgaaacaaagtaaaggatcc

SEQ ID NO: 1488 - DNA, 2623 bp, Artificial Sequence
  Description of Artificial Sequence: Synthetic DNA sequence of Caldicellulosiruptor TOK13B DNA Polymerase Y767Q
atgaaatacctgctgccgaccgctgctgctggtctgctgctcctcgctgcccagccggcgatggccatggaatttgttatttttgatgggaatagtattctgtatagagctttttttgccttgccacagcttactacctcaacaggcatacctacaaatgctatatatggttttttgaatgtgctgttaaaatacttagattctgaaaaaccggattatgtagcagtagcttttgacaaaaaaggcagagctgtccgaaaaagtgaatatgaagaatacaaggctaacagaaaaccgatgccagattctcttcaggttcagataccttacgtaagagaaatacttgctgctctgaacattcctgtactgaaatgtgaagggtatgaagctgatgacgttataggcacacttgtaaatagatttaaagcccaggatttagagattgtgataataaccggagacagagatacacttcagttacttgataaaaatgtaattgtcaaaatagtcacaacaaggtttgacaggacaactgaagatttgtatgctgtagaaaatgtaaaagaaaaatatggtgtttttgcgcatcaggttgttgactataaagcattagtaggtgatgcgtcagacaatataccaggtgttaagggaattggagataaaactgccataaagctgttagaagagtaccagactctggagaatatatatcagaatctaaataacattaaaggagcgctaaaagagaagttggaatcaggaaaagacatggcatttttatcaaaaagactggctactatcatatgcgatttaccaattgaggtgaatcttgaagaattaaaaaccaaagaatgggacaaagaaagactttatcagattttacttcaacttgagtttaaaagctttattaaaagactgggcttttcagaagagattaactatgcaaggcagaactttcagctacctgaatttagtattaaagaacttcgtgatgtttcagcaatagggggcaaagaaatctatctattgtactcagatgaagaaggacttttttatatttatgaccatcaaacctcaaccatttttacaacttctgataaggaagctattaaagatcttttaacactccaaagcattcaaaaggttgtatatgatttaaaaaatatactccataaggtggactttgatgaagctaatcagataaaaaattgtaatgatgttatgttggcttcatatgttttggacagtacacgcagttcgtacgatttggaaacattgtttatttcttatctcaacactgatatagctgcaatcaaagagaatagatgggctggtgctacagttttattaagaaatctttgggatgaactttcaaaactcattgatttaaactcggcccaatacgtttatgagagcatagagatgcctcttgttcccattttatatgaaatggagaaaatcggttttaaggttgacaaaaacactttgcaggagtatacaaaagagattgagagcaagcttttaaagttggaatcacagatttatcaaatagccggtgaatggtttaacataaactcgccaaaacaactctcatatatattattcgaaaaactgaagcttccggttgttaaaaagaccaaaacaggatattcaacagatgccgaggtattagaagagctgtatgataaacatgacataataccgcttattctggattatagaatgtatacgaaaatactgacaacttactgtcagggactggttcaggcaataaatcctgcaactggaagaattcataccaactttattcagacaggtacggcaactggaagacttgcaagtgcagagcccaatctgcaaaatattcctgtaaaatatgatgagggaaagctaataagaaaggcatttgttccagatgaaggttatgtgttgatagatgctgattattctcagattgagcttagaatacttgcacatatctctgaggatgaacgactgataaatgcttttaaaaataaccttgatattcattcacagacggcggcagagatctttggtgtggatataagtcaggttacaccaattatgcgaagccaggcaaaagcagttaactttggaattgtatatggtatatctgattatggactttcacgggatataaagatttcaagaaaagaagcagccgagtttattaatcgttattttgaaaagtatcccagagtaaaagaatatttggacaatgtcgtcaagtttgcccgtgaaaacggatttgttttgacaatatttaacaggaaaaggcaaatcaaggatataaagtctactaataaaaacctgagaaactatgcagagagaatagcaatgaattcacctatccagggaagtgctgcagatattatgaaaatagcaatgataagagtttataaaaagctaaaagaaaacaatttaaaatcaagaattattctgcaggtccatgacgaacttttgattgaatcaccctatgaagagaaagagatagtaaaggaaatagtaaaatcggagatggaaaatgcggttttattgaaagttcctttggtagttgaagtgaaagaaggttcaaattggtatgaaacaaagtaaaggatcc

SEQ ID NO: 1489 - DNA, 2623 bp, Artificial Sequence
  Description of Artificial Sequence: Synthetic DNA sequence of Caldicellulosiruptor TOK13B DNA Polymerase Y767G
atgaaatacctgctgccgaccgctgctgctggtctgctgctcctcgctgcccagccggcgatggccatggaatttgttatttttgatgggaatagtattctgtatagagctttttttgccttgccacagcttactacctcaacaggcatacctacaaatgctatatatggttttttgaatgtgctgttaaaatacttagattctgaaaaaccggattatgtagcagtagcttttgacaaaaaaggcagagctgtccgaaaaagtgaatatgaagaatacaaggctaacagaaaaccgatgccagattctcttcaggttcagataccttacgtaagagaaatacttgctgctctgaacattcctgtactgaaatgtgaagggtatgaagctgatgacgttataggcacacttgtaaatagatttaaagcccaggatttagagattgtgataataaccggagacagagatacacttcagttacttgataaaaatgtaattgtcaaaatagtcacaacaaggtttgacaggacaactgaagatttgtatgctgtagaaaatgtaaaagaaaaatatggtgtttttgcgcatcaggttgttgactataaagcattagtaggtgatgcgtcagacaatataccaggtgttaagggaattggagataaaactgccataaagctgttagaagagtaccagactctggagaatatatatcagaatctaaataacattaaaggagcgctaaaagagaagttggaatcaggaaaagacatggcatttttatcaaaaagactggctactatcatatgcgatttaccaattgaggtgaatcttgaagaattaaaaaccaaagaatgggacaaagaaagactttatcagattttacttcaacttgagtttaaaagctttattaaaagactgggcttttcagaagagattaactatgcaaggcagaactttcagctacctgaatttagtattaaagaacttcgtgatgtttcagcaatagggggcaaagaaatctatctattgtactcagatgaagaaggacttttttatatttatgaccatcaaacctcaaccatttttacaacttctgataaggaagctattaaagatcttttaacactccaaagcattcaaaaggttgtatatgatttaaaaaatatactccataaggtggactttgatgaagctaatcagataaaaaattgtaatgatgttatgttggcttcatatgttttggacagtacacgcagttcgtacgatttggaaacattgtttatttcttatctcaacactgatatagctgcaatcaaagagaatagatgggctggtgctacagttttattaagaaatctttgggatgaactttcaaaactcattgatttaaactcggcccaatacgtttatgagagcatagagatgcctcttgttcccattttatatgaaatggagaaaatcggttttaaggttgacaaaaacactttgcaggagtatacaaaagagattgagagcaagcttttaaagttggaatcacagatttatcaaatagccggtgaatggtttaacataaactcgccaaaacaactctcatatatattattcgaaaaactgaagcttccggttgttaaaaagaccaaaacaggatattcaacagatgccgaggtattagaagagctgtatgataaacatgacataataccgcttattctggattatagaatgtatacgaaaatactgacaacttactgtcagggactggttcaggcaataaatcctgcaactggaagaattcataccaactttattcagacaggtacggcaactggaagacttgcaagtgcagagcccaatctgcaaaatattcctgtaaaatatgatgagggaaagctaataagaaaggcatttgttccagatgaaggttatgtgttgatagatgctgattattctcagattgagcttagaatacttgcacatatctctgaggatgaacgactgataaatgcttttaaaaataaccttgatattcattcacagacggcggcagagatctttggtgtggatataagtcaggttacaccaattatgcgaagccaggcaaaagcagttaactttggaattgtatatggtatatctgattatggactttcacgggatataaagatttcaagaaaagaagcagccgagtttattaatcgttattttgaaaagtatcccagagtaaaagaatatttggacaatgtcgtcaagtttgcccgtgaaaacggatttgttttgacaatatttaacaggaaaaggggtatcaaggatataaagtctactaataaaaacctgagaaactatgcagagagaatagcaatgaattcacctatccagggaagtgctgcagatattatgaaaatagcaatgataagagtttataaaaagctaaaagaaaacaatttaaaatcaagaattattctgcaggtccatgacgaacttttgattgaatcaccctatgaagagaaagagatagtaaaggaaatagtaaaatcggagatggaaaatgcggttttattgaaagttcctttggtagttgaagtgaaagaaggttcaaattggtatgaaacaaagtaaaggatcc

SEQ ID NO: 1490 - DNA, 2623 bp, Artificial Sequence
  Description of Artificial Sequence: Synthetic DNA sequence of Caldicellulosiruptor TOK13B DNA Polymerase Y767H
atgaaatacctgctgccgaccgctgctgctggtctgctgctcctcgctgcccagccggcgatggccatggaatttgttatttttgatgggaatagtattctgtatagagctttttttgccttgccacagcttactacctcaacaggcatacctacaaatgctatatatggttttttgaatgtgctgttaaaatacttagattctgaaaaaccggattatgtagcagtagcttttgacaaaaaaggcagagctgtccgaaaaagtgaatatgaagaatacaaggctaacagaaaaccgatgccagattctcttcaggttcagataccttacgtaagagaaatacttgctgctctgaacattcctgtactgaaatgtgaagggtatgaagctgatgacgttataggcacacttgtaaatagatttaaagcccaggatttagagattgtgataataaccggagacagagatacacttcagttacttgataaaaatgtaattgtcaaaatagtcacaacaaggtttgacaggacaactgaagatttgtatgctgtagaaaatgtaaaagaaaaatatggtgtttttgcgcatcaggttgttgactataaagcattagtaggtgatgcgtcagacaatataccaggtgttaagggaattggagataaaactgccataaagctgttagaagagtaccagactctggagaatatatatcagaatctaaataacattaaaggagcgctaaaagagaagttggaatcaggaaaagacatggcatttttatcaaaaagactggctactatcatatgcgatttaccaattgaggtgaatcttgaagaattaaaaaccaaagaatgggacaaagaaagactttatcagattttacttcaacttgagtttaaaagctttattaaaagactgggcttttcagaagagattaactatgcaaggcagaactttcagctacctgaatttagtattaaagaacttcgtgatgtttcagcaatagggggcaaagaaatctatctattgtactcagatgaagaaggacttttttatatttatgaccatcaaacctcaaccatttttacaacttctgataaggaagctattaaagatcttttaacactccaaagcattcaaaaggttgtatatgatttaaaaaatatactccataaggtggactttgatgaagctaatcagataaaaaattgtaatgatgttatgttggcttcatatgttttggacagtacacgcagttcgtacgatttggaaacattgtttatttcttatctcaacactgatatagctgcaatcaaagagaatagatgggctggtgctacagttttattaagaaatctttgggatgaactttcaaaactcattgatttaaactcggcccaatacgtttatgagagcatagagatgcctcttgttcccattttatatgaaatggagaaaatcggttttaaggttgacaaaaacactttgcaggagtatacaaaagagattgagagcaagcttttaaagttggaatcacagatttatcaaatagccggtgaatggtttaacataaactcgccaaaacaactctcatatatattattcgaaaaactgaagcttccggttgttaaaaagaccaaaacaggatattcaacagatgccgaggtattagaagagctgtatgataaacatgacataataccgcttattctggattatagaatgtatacgaaaatactgacaacttactgtcagggactggttcaggcaataaatcctgcaactggaagaattcataccaactttattcagacaggtacggcaactggaagacttgcaagtgcagagcccaatctgcaaaatattcctgtaaaatatgatgagggaaagctaataagaaaggcatttgttccagatgaaggttatgtgttgatagatgctgattattctcagattgagcttagaatacttgcacatatctctgaggatgaacgactgataaatgcttttaaaaataaccttgatattcattcacagacggcggcagagatctttggtgtggatataagtcaggttacaccaattatgcgaagccaggcaaaagcagttaactttggaattgtatatggtatatctgattatggactttcacgggatataaagatttcaagaaaagaagcagccgagtttattaatcgttattttgaaaagtatcccagagtaaaagaatatttggacaatgtcgtcaagtttgcccgtgaaaacggatttgttttgacaatatttaacaggaaaaggcatatcaaggatataaagtctactaataaaaacctgagaaactatgcagagagaatagcaatgaattcacctatccagggaagtgctgcagatattatgaaaatagcaatgataagagtttataaaaagctaaaagaaaacaatttaaaatcaagaattattctgcaggtccatgacgaacttttgattgaatcaccctatgaagagaaagagatagtaaaggaaatagtaaaatcggagatggaaaatgcggttttattgaaagttcctttggtagttgaagtgaaagaaggttcaaattggtatgaaacaaagtaaaggatcc

SEQ ID NO: 1491 - DNA, 2623 bp, Artificial Sequence
  Description of Artificial Sequence: Synthetic DNA sequence of Caldicellulosiruptor TOK13B DNA Polymerase Y767I
atgaaatacctgctgccgaccgctgctgctggtctgctgctcctcgctgcccagccggcgatggccatggaatttgttatttttgatgggaatagtattctgtatagagctttttttgccttgccacagcttactacctcaacaggcatacctacaaatgctatatatggttttttgaatgtgctgttaaaatacttagattctgaaaaaccggattatgtagcagtagcttttgacaaaaaaggcagagctgtccgaaaaagtgaatatgaagaatacaaggctaacagaaaaccgatgccagattctcttcaggttcagataccttacgtaagagaaatacttgctgctctgaacattcctgtactgaaatgtgaagggtatgaagctgatgacgttataggcacacttgtaaatagatttaaagcccaggatttagagattgtgataataaccggagacagagatacacttcagttacttgataaaaatgtaattgtcaaaatagtcacaacaaggtttgacaggacaactgaagatttgtatgctgtagaaaatgtaaaagaaaaatatggtgtttttgcgcatcaggttgttgactataaagcattagtaggtgatgcgtcagacaatataccaggtgttaagggaattggagataaaactgccataaagctgttagaagagtaccagactctggagaatatatatcagaatctaaataacattaaaggagcgctaaaagagaagttggaatcaggaaaagacatggcatttttatcaaaaagactggctactatcatatgcgatttaccaattgaggtgaatcttgaagaattaaaaaccaaagaatgggacaaagaaagactttatcagattttacttcaacttgagtttaaaagctttattaaaagactgggcttttcagaagagattaactatgcaaggcagaactttcagctacctgaatttagtattaaagaacttcgtgatgtttcagcaatagggggcaaagaaatctatctattgtactcagatgaagaaggacttttttatatttatgaccatcaaacctcaaccatttttacaacttctgataaggaagctattaaagatcttttaacactccaaagcattcaaaaggttgtatatgatttaaaaaatatactccataaggtggactttgatgaagctaatcagataaaaaattgtaatgatgttatgttggcttcatatgttttggacagtacacgcagttcgtacgatttggaaacattgtttatttcttatctcaacactgatatagctgcaatcaaagagaatagatgggctggtgctacagttttattaagaaatctttgggatgaactttcaaaactcattgatttaaactcggcccaatacgtttatgagagcatagagatgcctcttgttcccattttatatgaaatggagaaaatcggttttaaggttgacaaaaacactttgcaggagtatacaaaagagattgagagcaagcttttaaagttggaatcacagatttatcaaatagccggtgaatggtttaacataaactcgccaaaacaactctcatatatattattcgaaaaactgaagcttccggttgttaaaaagaccaaaacaggatattcaacagatgccgaggtattagaagagctgtatgataaacatgacataataccgcttattctggattatagaatgtatacgaaaatactgacaacttactgtcagggactggttcaggcaataaatcctgcaactggaagaattcataccaactttattcagacaggtacggcaactggaagacttgcaagtgcagagcccaatctgcaaaatattcctgtaaaatatgatgagggaaagctaataagaaaggcatttgttccagatgaaggttatgtgttgatagatgctgattattctcagattgagcttagaatacttgcacatatctctgaggatgaacgactgataaatgcttttaaaaataaccttgatattcattcacagacggcggcagagatctttggtgtggatataagtcaggttacaccaattatgcgaagccaggcaaaagcagttaactttggaattgtatatggtatatctgattatggactttcacgggatataaagatttcaagaaaagaagcagccgagtttattaatcgttattttgaaaagtatcccagagtaaaagaatatttggacaatgtcgtcaagtttgcccgtgaaaacggatttgttttgacaatatttaacaggaaaaggattatcaaggatataaagtctactaataaaaacctgagaaactatgcagagagaatagcaatgaattcacctatccagggaagtgctgcagatattatgaaaatagcaatgataagagtttataaaaagctaaaagaaaacaatttaaaatcaagaattattctgcaggtccatgacgaacttttgattgaatcaccctatgaagagaaagagatagtaaaggaaatagtaaaatcggagatggaaaatgcggttttattgaaagttcctttggtagttgaagtgaaagaaggttcaaattggtatgaaacaaagtaaaggatcc

SEQ ID NO: 1492 - DNA, 2623 bp, Artificial Sequence
  Description of Artificial Sequence: Synthetic DNA sequence of Caldicellulosiruptor TOK13B DNA Polymerase Y767L
atgaaatacctgctgccgaccgctgctgctggtctgctgctcctcgctgcccagccggcgatggccatggaatttgttatttttgatgggaatagtattctgtatagagctttttttgccttgccacagcttactacctcaacaggcatacctacaaatgctatatatggttttttgaatgtgctgttaaaatacttagattctgaaaaaccggattatgtagcagtagcttttgacaaaaaaggcagagctgtccgaaaaagtgaatatgaagaatacaaggctaacagaaaaccgatgccagattctcttcaggttcagataccttacgtaagagaaatacttgctgctctgaacattcctgtactgaaatgtgaagggtatgaagctgatgacgttataggcacacttgtaaatagatttaaagcccaggatttagagattgtgataataaccggagacagagatacacttcagttacttgataaaaatgtaattgtcaaaatagtcacaacaaggtttgacaggacaactgaagatttgtatgctgtagaaaatgtaaaagaaaaatatggtgtttttgcgcatcaggttgttgactataaagcattagtaggtgatgcgtcagacaatataccaggtgttaagggaattggagataaaactgccataaagctgttagaagagtaccagactctggagaatatatatcagaatctaaataacattaaaggagcgctaaaagagaagttggaatcaggaaaagacatggcatttttatcaaaaagactggctactatcatatgcgatttaccaattgaggtgaatcttgaagaattaaaaaccaaagaatgggacaaagaaagactttatcagattttacttcaacttgagtttaaaagctttattaaaagactgggcttttcagaagagattaactatgcaaggcagaactttcagctacctgaatttagtattaaagaacttcgtgatgtttcagcaatagggggcaaagaaatctatctattgtactcagatgaagaaggacttttttatatttatgaccatcaaacctcaaccatttttacaacttctgataaggaagctattaaagatcttttaacactccaaagcattcaaaaggttgtatatgatttaaaaaatatactccataaggtggactttgatgaagctaatcagataaaaaattgtaatgatgttatgttggcttcatatgttttggacagtacacgcagttcgtacgatttggaaacattgtttatttcttatctcaacactgatatagctgcaatcaaagagaatagatgggctggtgctacagttttattaagaaatctttgggatgaactttcaaaactcattgatttaaactcggcccaatacgtttatgagagcatagagatgcctcttgttcccattttatatgaaatggagaaaatcggttttaaggttgacaaaaacactttgcaggagtatacaaaagagattgagagcaagcttttaaagttggaatcacagatttatcaaatagccggtgaatggtttaacataaactcgccaaaacaactctcatatatattattcgaaaaactgaagcttccggttgttaaaaagaccaaaacaggatattcaacagatgccgaggtattagaagagctgtatgataaacatgacataataccgcttattctggattatagaatgtatacgaaaatactgacaacttactgtcagggactggttcaggcaataaatcctgcaactggaagaattcataccaactttattcagacaggtacggcaactggaagacttgcaagtgcagagcccaatctgcaaaatattcctgtaaaatatgatgagggaaagctaataagaaaggcatttgttccagatgaaggttatgtgttgatagatgctgattattctcagattgagcttagaatacttgcacatatctctgaggatgaacgactgataaatgcttttaaaaataaccttgatattcattcacagacggcggcagagatctttggtgtggatataagtcaggttacaccaattatgcgaagccaggcaaaagcagttaactttggaattgtatatggtatatctgattatggactttcacgggatataaagatttcaagaaaagaagcagccgagtttattaatcgttattttgaaaagtatcccagagtaaaagaatatttggacaatgtcgtcaagtttgcccgtgaaaacggatttgttttgacaatatttaacaggaaaaggcttatcaaggatataaagtctactaataaaaacctgagaaactatgcagagagaatagcaatgaattcacctatccagggaagtgctgcagatattatgaaaatagcaatgataagagtttataaaaagctaaaagaaaacaatttaaaatcaagaattattctgcaggtccatgacgaacttttgattgaatcaccctatgaagagaaagagatagtaaaggaaatagtaaaatcggagatggaaaatgcggttttattgaaagttcctttggtagttgaagtgaaagaaggttcaaattggtatgaaacaaagtaaaggatcc

SEQ ID NO: 1493 - DNA, 2623 bp, Artificial Sequence
  Description of Artificial Sequence: Synthetic DNA sequence of Caldicellulosiruptor TOK13B DNA Polymerase Y767K
atgaaatacctgctgccgaccgctgctgctggtctgctgctcctcgctgcccagccggcgatggccatggaatttgttatttttgatgggaatagtattctgtatagagctttttttgccttgccacagcttactacctcaacaggcatacctacaaatgctatatatggttttttgaatgtgctgttaaaatacttagattctgaaaaaccggattatgtagcagtagcttttgacaaaaaaggcagagctgtccgaaaaagtgaatatgaagaatacaaggctaacagaaaaccgatgccagattctcttcaggttcagataccttacgtaagagaaatacttgctgctctgaacattcctgtactgaaatgtgaagggtatgaagctgatgacgttataggcacacttgtaaatagatttaaagcccaggatttagagattgtgataataaccggagacagagatacacttcagttacttgataaaaatgtaattgtcaaaatagtcacaacaaggtttgacaggacaactgaagatttgtatgctgtagaaaatgtaaaagaaaaatatggtgtttttgcgcatcaggttgttgactataaagcattagtaggtgatgcgtcagacaatataccaggtgttaagggaattggagataaaactgccataaagctgttagaagagtaccagactctggagaatatatatcagaatctaaataacattaaaggagcgctaaaagagaagttggaatcaggaaaagacatggcatttttatcaaaaagactggctactatcatatgcgatttaccaattgaggtgaatcttgaagaattaaaaaccaaagaatgggacaaagaaagactttatcagattttacttcaacttgagtttaaaagctttattaaaagactgggcttttcagaagagattaactatgcaaggcagaactttcagctacctgaatttagtattaaagaacttcgtgatgtttcagcaatagggggcaaagaaatctatctattgtactcagatgaagaaggacttttttatatttatgaccatcaaacctcaaccatttttacaacttctgataaggaagctattaaagatcttttaacactccaaagcattcaaaaggttgtatatgatttaaaaaatatactccataaggtggactttgatgaagctaatcagataaaaaattgtaatgatgttatgttggcttcatatgttttggacagtacacgcagttcgtacgatttggaaacattgtttatttcttatctcaacactgatatagctgcaatcaaagagaatagatgggctggtgctacagttttattaagaaatctttgggatgaactttcaaaactcattgatttaaactcggcccaatacgtttatgagagcatagagatgcctcttgttcccattttatatgaaatggagaaaatcggttttaaggttgacaaaaacactttgcaggagtatacaaaagagattgagagcaagcttttaaagttggaatcacagatttatcaaatagccggtgaatggtttaacataaactcgccaaaacaactctcatatatattattcgaaaaactgaagcttccggttgttaaaaagaccaaaacaggatattcaacagatgccgaggtattagaagagctgtatgataaacatgacataataccgcttattctggattatagaatgtatacgaaaatactgacaacttactgtcagggactggttcaggcaataaatcctgcaactggaagaattcataccaactttattcagacaggtacggcaactggaagacttgcaagtgcagagcccaatctgcaaaatattcctgtaaaatatgatgagggaaagctaataagaaaggcatttgttccagatgaaggttatgtgttgatagatgctgattattctcagattgagcttagaatacttgcacatatctctgaggatgaacgactgataaatgcttttaaaaataaccttgatattcattcacagacggcggcagagatctttggtgtggatataagtcaggttacaccaattatgcgaagccaggcaaaagcagttaactttggaattgtatatggtatatctgattatggactttcacgggatataaagatttcaagaaaagaagcagccgagtttattaatcgttattttgaaaagtatcccagagtaaaagaatatttggacaatgtcgtcaagtttgcccgtgaaaacggatttgttttgacaatatttaacaggaaaaggaaaatcaaggatataaagtctactaataaaaacctgagaaactatgcagagagaatagcaatgaattcacctatccagggaagtgctgcagatattatgaaaatagcaatgataagagtttataaaaagctaaaagaaaacaatttaaaatcaagaattattctgcaggtccatgacgaacttttgattgaatcaccctatgaagagaaagagatagtaaaggaaatagtaaaatcggagatggaaaatgcggttttattgaaagttcctttggtagttgaagtgaaagaaggttcaaattggtatgaaacaaagtaaaggatcc

SEQ ID NO: 1494 - DNA, 2623 bp, Artificial Sequence
  Description of Artificial Sequence: Synthetic DNA sequence of Caldicellulosiruptor TOK13B DNA Polymerase Y767M
atgaaatacctgctgccgaccgctgctgctggtctgctgctcctcgctgcccagccggcgatggccatggaatttgttatttttgatgggaatagtattctgtatagagctttttttgccttgccacagcttactacctcaacaggcatacctacaaatgctatatatggttttttgaatgtgctgttaaaatacttagattctgaaaaaccggattatgtagcagtagcttttgacaaaaaaggcagagctgtccgaaaaagtgaatatgaagaatacaaggctaacagaaaaccgatgccagattctcttcaggttcagataccttacgtaagagaaatacttgctgctctgaacattcctgtactgaaatgtgaagggtatgaagctgatgacgttataggcacacttgtaaatagatttaaagcccaggatttagagattgtgataataaccggagacagagatacacttcagttacttgataaaaatgtaattgtcaaaatagtcacaacaaggtttgacaggacaactgaagatttgtatgctgtagaaaatgtaaaagaaaaatatggtgtttttgcgcatcaggttgttgactataaagcattagtaggtgatgcgtcagacaatataccaggtgttaagggaattggagataaaactgccataaagctgttagaagagtaccagactctggagaatatatatcagaatctaaataacattaaaggagcgctaaaagagaagttggaatcaggaaaagacatggcatttttatcaaaaagactggctactatcatatgcgatttaccaattgaggtgaatcttgaagaattaaaaaccaaagaatgggacaaagaaagactttatcagattttacttcaacttgagtttaaaagctttattaaaagactgggcttttcagaagagattaactatgcaaggcagaactttcagctacctgaatttagtattaaagaacttcgtgatgtttcagcaatagggggcaaagaaatctatctattgtactcagatgaagaaggacttttttatatttatgaccatcaaacctcaaccatttttacaacttctgataaggaagctattaaagatcttttaacactccaaagcattcaaaaggttgtatatgatttaaaaaatatactccataaggtggactttgatgaagctaatcagataaaaaattgtaatgatgttatgttggcttcatatgttttggacagtacacgcagttcgtacgatttggaaacattgtttatttcttatctcaacactgatatagctgcaatcaaagagaatagatgggctggtgctacagttttattaagaaatctttgggatgaactttcaaaactcattgatttaaactcggcccaatacgtttatgagagcatagagatgcctcttgttcccattttatatgaaatggagaaaatcggttttaaggttgacaaaaacactttgcaggagtatacaaaagagattgagagcaagcttttaaagttggaatcacagatttatcaaatagccggtgaatggtttaacataaactcgccaaaacaactctcatatatattattcgaaaaactgaagcttccggttgttaaaaagaccaaaacaggatattcaacagatgccgaggtattagaagagctgtatgataaacatgacataataccgcttattctggattatagaatgtatacgaaaatactgacaacttactgtcagggactggttcaggcaataaatcctgcaactggaagaattcataccaactttattcagacaggtacggcaactggaagacttgcaagtgcagagcccaatctgcaaaatattcctgtaaaatatgatgagggaaagctaataagaaaggcatttgttccagatgaaggttatgtgttgatagatgctgattattctcagattgagcttagaatacttgcacatatctctgaggatgaacgactgataaatgcttttaaaaataaccttgatattcattcacagacggcggcagagatctttggtgtggatataagtcaggttacaccaattatgcgaagccaggcaaaagcagttaactttggaattgtatatggtatatctgattatggactttcacgggatataaagatttcaagaaaagaagcagccgagtttattaatcgttattttgaaaagtatcccagagtaaaagaatatttggacaatgtcgtcaagtttgcccgtgaaaacggatttgttttgacaatatttaacaggaaaaggatgatcaaggatataaagtctactaataaaaacctgagaaactatgcagagagaatagcaatgaattcacctatccagggaagtgctgcagatattatgaaaatagcaatgataagagtttataaaaagctaaaagaaaacaatttaaaatcaagaattattctgcaggtccatgacgaacttttgattgaatcaccctatgaagagaaagagatagtaaaggaaatagtaaaatcggagatggaaaatgcggttttattgaaagttcctttggtagttgaagtgaaagaaggttcaaattggtatgaaacaaagtaaaggatcc

SEQ ID NO: 1495 - DNA, 2623 bp, Artificial Sequence
  Description of Artificial Sequence: Synthetic DNA sequence of Caldicellulosiruptor TOK13B DNA Polymerase Y767F
atgaaatacctgctgccgaccgctgctgctggtctgctgctcctcgctgcccagccggcgatggccatggaatttgttatttttgatgggaatagtattctgtatagagctttttttgccttgccacagcttactacctcaacaggcatacctacaaatgctatatatggttttttgaatgtgctgttaaaatacttagattctgaaaaaccggattatgtagcagtagcttttgacaaaaaaggcagagctgtccgaaaaagtgaatatgaagaatacaaggctaacagaaaaccgatgccagattctcttcaggttcagataccttacgtaagagaaatacttgctgctctgaacattcctgtactgaaatgtgaagggtatgaagctgatgacgttataggcacacttgtaaatagatttaaagcccaggatttagagattgtgataataaccggagacagagatacacttcagttacttgataaaaatgtaattgtcaaaatagtcacaacaaggtttgacaggacaactgaagatttgtatgctgtagaaaatgtaaaagaaaaatatggtgtttttgcgcatcaggttgttgactataaagcattagtaggtgatgcgtcagacaatataccaggtgttaagggaattggagataaaactgccataaagctgttagaagagtaccagactctggagaatatatatcagaatctaaataacattaaaggagcgctaaaagagaagttggaatcaggaaaagacatggcatttttatcaaaaagactggctactatcatatgcgatttaccaattgaggtgaatcttgaagaattaaaaaccaaagaatgggacaaagaaagactttatcagattttacttcaacttgagtttaaaagctttattaaaagactgggcttttcagaagagattaactatgcaaggcagaactttcagctacctgaatttagtattaaagaacttcgtgatgtttcagcaatagggggcaaagaaatctatctattgtactcagatgaagaaggacttttttatatttatgaccatcaaacctcaaccatttttacaacttctgataaggaagctattaaagatcttttaacactccaaagcattcaaaaggttgtatatgatttaaaaaatatactccataaggtggactttgatgaagctaatcagataaaaaattgtaatgatgttatgttggcttcatatgttttggacagtacacgcagttcgtacgatttggaaacattgtttatttcttatctcaacactgatatagctgcaatcaaagagaatagatgggctggtgctacagttttattaagaaatctttgggatgaactttcaaaactcattgatttaaactcggcccaatacgtttatgagagcatagagatgcctcttgttcccattttatatgaaatggagaaaatcggttttaaggttgacaaaaacactttgcaggagtatacaaaagagattgagagcaagcttttaaagttggaatcacagatttatcaaatagccggtgaatggtttaacataaactcgccaaaacaactctcatatatattattcgaaaaactgaagcttccggttgttaaaaagaccaaaacaggatattcaacagatgccgaggtattagaagagctgtatgataaacatgacataataccgcttattctggattatagaatgtatacgaaaatactgacaacttactgtcagggactggttcaggcaataaatcctgcaactggaagaattcataccaactttattcagacaggtacggcaactggaagacttgcaagtgcagagcccaatctgcaaaatattcctgtaaaatatgatgagggaaagctaataagaaaggcatttgttccagatgaaggttatgtgttgatagatgctgattattctcagattgagcttagaatacttgcacatatctctgaggatgaacgactgataaatgcttttaaaaataaccttgatattcattcacagacggcggcagagatctttggtgtggatataagtcaggttacaccaattatgcgaagccaggcaaaagcagttaactttggaattgtatatggtatatctgattatggactttcacgggatataaagatttcaagaaaagaagcagccgagtttattaatcgttattttgaaaagtatcccagagtaaaagaatatttggacaatgtcgtcaagtttgcccgtgaaaacggatttgttttgacaatatttaacaggaaaaggtttatcaaggatataaagtctactaataaaaacctgagaaactatgcagagagaatagcaatgaattcacctatccagggaagtgctgcagatattatgaaaatagcaatgataagagtttataaaaagctaaaagaaaacaatttaaaatcaagaattattctgcaggtccatgacgaacttttgattgaatcaccctatgaagagaaagagatagtaaaggaaatagtaaaatcggagatggaaaatgcggttttattgaaagttcctttggtagttgaagtgaaagaaggttcaaattggtatgaaacaaagtaaaggatcc

SEQ ID NO: 1496 - DNA, 2623 bp, Artificial Sequence
  Description of Artificial Sequence: Synthetic DNA sequence of Caldicellulosiruptor TOK13B DNA Polymerase Y767P
atgaaatacctgctgccgaccgctgctgctggtctgctgctcctcgctgcccagccggcgatggccatggaatttgttatttttgatgggaatagtattctgtatagagctttttttgccttgccacagcttactacctcaacaggcatacctacaaatgctatatatggttttttgaatgtgctgttaaaatacttagattctgaaaaaccggattatgtagcagtagcttttgacaaaaaaggcagagctgtccgaaaaagtgaatatgaagaatacaaggctaacagaaaaccgatgccagattctcttcaggttcagataccttacgtaagagaaatacttgctgctctgaacattcctgtactgaaatgtgaagggtatgaagctgatgacgttataggcacacttgtaaatagatttaaagcccaggatttagagattgtgataataaccggagacagagatacacttcagttacttgataaaaatgtaattgtcaaaatagtcacaacaaggtttgacaggacaactgaagatttgtatgctgtagaaaatgtaaaagaaaaatatggtgtttttgcgcatcaggttgttgactataaagcattagtaggtgatgcgtcagacaatataccaggtgttaagggaattggagataaaactgccataaagctgttagaagagtaccagactctggagaatatatatcagaatctaaataacattaaaggagcgctaaaagagaagttggaatcaggaaaagacatggcatttttatcaaaaagactggctactatcatatgcgatttaccaattgaggtgaatcttgaagaattaaaaaccaaagaatgggacaaagaaagactttatcagattttacttcaacttgagtttaaaagctttattaaaagactgggcttttcagaagagattaactatgcaaggcagaactttcagctacctgaatttagtattaaagaacttcgtgatgtttcagcaatagggggcaaagaaatctatctattgtactcagatgaagaaggacttttttatatttatgaccatcaaacctcaaccatttttacaacttctgataaggaagctattaaagatcttttaacactccaaagcattcaaaaggttgtatatgatttaaaaaatatactccataaggtggactttgatgaagctaatcagataaaaaattgtaatgatgttatgttggcttcatatgttttggacagtacacgcagttcgtacgatttggaaacattgtttatttcttatctcaacactgatatagctgcaatcaaagagaatagatgggctggtgctacagttttattaagaaatctttgggatgaactttcaaaactcattgatttaaactcggcccaatacgtttatgagagcatagagatgcctcttgttcccattttatatgaaatggagaaaatcggttttaaggttgacaaaaacactttgcaggagtatacaaaagagattgagagcaagcttttaaagttggaatcacagatttatcaaatagccggtgaatggtttaacataaactcgccaaaacaactctcatatatattattcgaaaaactgaagcttccggttgttaaaaagaccaaaacaggatattcaacagatgccgaggtattagaagagctgtatgataaacatgacataataccgcttattctggattatagaatgtatacgaaaatactgacaacttactgtcagggactggttcaggcaataaatcctgcaactggaagaattcataccaactttattcagacaggtacggcaactggaagacttgcaagtgcagagcccaatctgcaaaatattcctgtaaaatatgatgagggaaagctaataagaaaggcatttgttccagatgaaggttatgtgttgatagatgctgattattctcagattgagcttagaatacttgcacatatctctgaggatgaacgactgataaatgcttttaaaaataaccttgatattcattcacagacggcggcagagatctttggtgtggatataagtcaggttacaccaattatgcgaagccaggcaaaagcagttaactttggaattgtatatggtatatctgattatggactttcacgggatataaagatttcaagaaaagaagcagccgagtttattaatcgttattttgaaaagtatcccagagtaaaagaatatttggacaatgtcgtcaagtttgcccgtgaaaacggatttgttttgacaatatttaacaggaaaaggcctatcaaggatataaagtctactaataaaaacctgagaaactatgcagagagaatagcaatgaattcacctatccagggaagtgctgcagatattatgaaaatagcaatgataagagtttataaaaagctaaaagaaaacaatttaaaatcaagaattattctgcaggtccatgacgaacttttgattgaatcaccctatgaagagaaagagatagtaaaggaaatagtaaaatcggagatggaaaatgcggttttattgaaagttcctttggtagttgaagtgaaagaaggttcaaattggtatgaaacaaagtaaaggatcc

SEQ ID NO: 1497 - DNA, 2623 bp, Artificial Sequence
  Description of Artificial Sequence: Synthetic DNA sequence of Caldicellulosiruptor TOK13B DNA Polymerase Y767S
atgaaatacctgctgccgaccgctgctgctggtctgctgctcctcgctgcccagccggcgatggccatggaatttgttatttttgatgggaatagtattctgtatagagctttttttgccttgccacagcttactacctcaacaggcatacctacaaatgctatatatggttttttgaatgtgctgttaaaatacttagattctgaaaaaccggattatgtagcagtagcttttgacaaaaaaggcagagctgtccgaaaaagtgaatatgaagaatacaaggctaacagaaaaccgatgccagattctcttcaggttcagataccttacgtaagagaaatacttgctgctctgaacattcctgtactgaaatgtgaagggtatgaagctgatgacgttataggcacacttgtaaatagatttaaagcccaggatttagagattgtgataataaccggagacagagatacacttcagttacttgataaaaatgtaattgtcaaaatagtcacaacaaggtttgacaggacaactgaagatttgtatgctgtagaaaatgtaaaagaaaaatatggtgtttttgcgcatcaggttgttgactataaagcattagtaggtgatgcgtcagacaatataccaggtgttaagggaattggagataaaactgccataaagctgttagaagagtaccagactctggagaatatatatcagaatctaaataacattaaaggagcgctaaaagagaagttggaatcaggaaaagacatggcatttttatcaaaaagactggctactatcatatgcgatttaccaattgaggtgaatcttgaagaattaaaaaccaaagaatgggacaaagaaagactttatcagattttacttcaacttgagtttaaaagctttattaaaagactgggcttttcagaagagattaactatgcaaggcagaactttcagctacctgaatttagtattaaagaacttcgtgatgtttcagcaatagggggcaaagaaatctatctattgtactcagatgaagaaggacttttttatatttatgaccatcaaacctcaaccatttttacaacttctgataaggaagctattaaagatcttttaacactccaaagcattcaaaaggttgtatatgatttaaaaaatatactccataaggtggactttgatgaagctaatcagataaaaaattgtaatgatgttatgttggcttcatatgttttggacagtacacgcagttcgtacgatttggaaacattgtttatttcttatctcaacactgatatagctgcaatcaaagagaatagatgggctggtgctacagttttattaagaaatctttgggatgaactttcaaaactcattgatttaaactcggcccaatacgtttatgagagcatagagatgcctcttgttcccattttatatgaaatggagaaaatcggttttaaggttgacaaaaacactttgcaggagtatacaaaagagattgagagcaagcttttaaagttggaatcacagatttatcaaatagccggtgaatggtttaacataaactcgccaaaacaactctcatatatattattcgaaaaactgaagcttccggttgttaaaaagaccaaaacaggatattcaacagatgccgaggtattagaagagctgtatgataaacatgacataataccgcttattctggattatagaatgtatacgaaaatactgacaacttactgtcagggactggttcaggcaataaatcctgcaactggaagaattcataccaactttattcagacaggtacggcaactggaagacttgcaagtgcagagcccaatctgcaaaatattcctgtaaaatatgatgagggaaagctaataagaaaggcatttgttccagatgaaggttatgtgttgatagatgctgattattctcagattgagcttagaatacttgcacatatctctgaggatgaacgactgataaatgcttttaaaaataaccttgatattcattcacagacggcggcagagatctttggtgtggatataagtcaggttacaccaattatgcgaagccaggcaaaagcagttaactttggaattgtatatggtatatctgattatggactttcacgggatataaagatttcaagaaaagaagcagccgagtttattaatcgttattttgaaaagtatcccagagtaaaagaatatttggacaatgtcgtcaagtttgcccgtgaaaacggatttgttttgacaatatttaacaggaaaaggtctatcaaggatataaagtctactaataaaaacctgagaaactatgcagagagaatagcaatgaattcacctatccagggaagtgctgcagatattatgaaaatagcaatgataagagtttataaaaagctaaaagaaaacaatttaaaatcaagaattattctgcaggtccatgacgaacttttgattgaatcaccctatgaagagaaagagatagtaaaggaaatagtaaaatcggagatggaaaatgcggttttattgaaagttcctttggtagttgaagtgaaagaaggttcaaattggtatgaaacaaagtaaaggatcc

SEQ ID NO: 1498 - DNA, 2623 bp, Artificial Sequence
  Description of Artificial Sequence: Synthetic DNA sequence of Caldicellulosiruptor TOK13B DNA Polymerase Y767T
atgaaatacctgctgccgaccgctgctgctggtctgctgctcctcgctgcccagccggcgatggccatggaatttgttatttttgatgggaatagtattctgtatagagctttttttgccttgccacagcttactacctcaacaggcatacctacaaatgctatatatggttttttgaatgtgctgttaaaatacttagattctgaaaaaccggattatgtagcagtagcttttgacaaaaaaggcagagctgtccgaaaaagtgaatatgaagaatacaaggctaacagaaaaccgatgccagattctcttcaggttcagataccttacgtaagagaaatacttgctgctctgaacattcctgtactgaaatgtgaagggtatgaagctgatgacgttataggcacacttgtaaatagatttaaagcccaggatttagagattgtgataataaccggagacagagatacacttcagttacttgataaaaatgtaattgtcaaaatagtcacaacaaggtttgacaggacaactgaagatttgtatgctgtagaaaatgtaaaagaaaaatatggtgtttttgcgcatcaggttgttgactataaagcattagtaggtgatgcgtcagacaatataccaggtgttaagggaattggagataaaactgccataaagctgttagaagagtaccagactctggagaatatatatcagaatctaaataacattaaaggagcgctaaaagagaagttggaatcaggaaaagacatggcatttttatcaaaaagactggctactatcatatgcgatttaccaattgaggtgaatcttgaagaattaaaaaccaaagaatgggacaaagaaagactttatcagattttacttcaacttgagtttaaaagctttattaaaagactgggcttttcagaagagattaactatgcaaggcagaactttcagctacctgaatttagtattaaagaacttcgtgatgtttcagcaatagggggcaaagaaatctatctattgtactcagatgaagaaggacttttttatatttatgaccatcaaacctcaaccatttttacaacttctgataaggaagctattaaagatcttttaacactccaaagcattcaaaaggttgtatatgatttaaaaaatatactccataaggtggactttgatgaagctaatcagataaaaaattgtaatgatgttatgttggcttcatatgttttggacagtacacgcagttcgtacgatttggaaacattgtttatttcttatctcaacactgatatagctgcaatcaaagagaatagatgggctggtgctacagttttattaagaaatctttgggatgaactttcaaaactcattgatttaaactcggcccaatacgtttatgagagcatagagatgcctcttgttcccattttatatgaaatggagaaaatcggttttaaggttgacaaaaacactttgcaggagtatacaaaagagattgagagcaagcttttaaagttggaatcacagatttatcaaatagccggtgaatggtttaacataaactcgccaaaacaactctcatatatattattcgaaaaactgaagcttccggttgttaaaaagaccaaaacaggatattcaacagatgccgaggtattagaagagctgtatgataaacatgacataataccgcttattctggattatagaatgtatacgaaaatactgacaacttactgtcagggactggttcaggcaataaatcctgcaactggaagaattcataccaactttattcagacaggtacggcaactggaagacttgcaagtgcagagcccaatctgcaaaatattcctgtaaaatatgatgagggaaagctaataagaaaggcatttgttccagatgaaggttatgtgttgatagatgctgattattctcagattgagcttagaatacttgcacatatctctgaggatgaacgactgataaatgcttttaaaaataaccttgatattcattcacagacggcggcagagatctttggtgtggatataagtcaggttacaccaattatgcgaagccaggcaaaagcagttaactttggaattgtatatggtatatctgattatggactttcacgggatataaagatttcaagaaaagaagcagccgagtttattaatcgttattttgaaaagtatcccagagtaaaagaatatttggacaatgtcgtcaagtttgcccgtgaaaacggatttgttttgacaatatttaacaggaaaaggactatcaaggatataaagtctactaataaaaacctgagaaactatgcagagagaatagcaatgaattcacctatccagggaagtgctgcagatattatgaaaatagcaatgataagagtttataaaaagctaaaagaaaacaatttaaaatcaagaattattctgcaggtccatgacgaacttttgattgaatcaccctatgaagagaaagagatagtaaaggaaatagtaaaatcggagatggaaaatgcggttttattgaaagttcctttggtagttgaagtgaaagaaggttcaaattggtatgaaacaaagtaaaggatcc

SEQ ID NO: 1499 - DNA, 2623 bp, Artificial Sequence
  Description of Artificial Sequence: Synthetic DNA sequence of Caldicellulosiruptor TOK13B DNA Polymerase Y767W
atgaaatacctgctgccgaccgctgctgctggtctgctgctcctcgctgcccagccggcgatggccatggaatttgttatttttgatgggaatagtattctgtatagagctttttttgccttgccacagcttactacctcaacaggcatacctacaaatgctatatatggttttttgaatgtgctgttaaaatacttagattctgaaaaaccggattatgtagcagtagcttttgacaaaaaaggcagagctgtccgaaaaagtgaatatgaagaatacaaggctaacagaaaaccgatgccagattctcttcaggttcagataccttacgtaagagaaatacttgctgctctgaacattcctgtactgaaatgtgaagggtatgaagctgatgacgttataggcacacttgtaaatagatttaaagcccaggatttagagattgtgataataaccggagacagagatacacttcagttacttgataaaaatgtaattgtcaaaatagtcacaacaaggtttgacaggacaactgaagatttgtatgctgtagaaaatgtaaaagaaaaatatggtgtttttgcgcatcaggttgttgactataaagcattagtaggtgatgcgtcagacaatataccaggtgttaagggaattggagataaaactgccataaagctgttagaagagtaccagactctggagaatatatatcagaatctaaataacattaaaggagcgctaaaagagaagttggaatcaggaaaagacatggcatttttatcaaaaagactggctactatcatatgcgatttaccaattgaggtgaatcttgaagaattaaaaaccaaagaatgggacaaagaaagactttatcagattttacttcaacttgagtttaaaagctttattaaaagactgggcttttcagaagagattaactatgcaaggcagaactttcagctacctgaatttagtattaaagaacttcgtgatgtttcagcaatagggggcaaagaaatctatctattgtactcagatgaagaaggacttttttatatttatgaccatcaaacctcaaccatttttacaacttctgataaggaagctattaaagatcttttaacactccaaagcattcaaaaggttgtatatgatttaaaaaatatactccataaggtggactttgatgaagctaatcagataaaaaattgtaatgatgttatgttggcttcatatgttttggacagtacacgcagttcgtacgatttggaaacattgtttatttcttatctcaacactgatatagctgcaatcaaagagaatagatgggctggtgctacagttttattaagaaatctttgggatgaactttcaaaactcattgatttaaactcggcccaatacgtttatgagagcatagagatgcctcttgttcccattttatatgaaatggagaaaatcggttttaaggttgacaaaaacactttgcaggagtatacaaaagagattgagagcaagcttttaaagttggaatcacagatttatcaaatagccggtgaatggtttaacataaactcgccaaaacaactctcatatatattattcgaaaaactgaagcttccggttgttaaaaagaccaaaacaggatattcaacagatgccgaggtattagaagagctgtatgataaacatgacataataccgcttattctggattatagaatgtatacgaaaatactgacaacttactgtcagggactggttcaggcaataaatcctgcaactggaagaattcataccaactttattcagacaggtacggcaactggaagacttgcaagtgcagagcccaatctgcaaaatattcctgtaaaatatgatgagggaaagctaataagaaaggcatttgttccagatgaaggttatgtgttgatagatgctgattattctcagattgagcttagaatacttgcacatatctctgaggatgaacgactgataaatgcttttaaaaataaccttgatattcattcacagacggcggcagagatctttggtgtggatataagtcaggttacaccaattatgcgaagccaggcaaaagcagttaactttggaattgtatatggtatatctgattatggactttcacgggatataaagatttcaagaaaagaagcagccgagtttattaatcgttattttgaaaagtatcccagagtaaaagaatatttggacaatgtcgtcaagtttgcccgtgaaaacggatttgttttgacaatatttaacaggaaaaggtggatcaaggatataaagtctactaataaaaacctgagaaactatgcagagagaatagcaatgaattcacctatccagggaagtgctgcagatattatgaaaatagcaatgataagagtttataaaaagctaaaagaaaacaatttaaaatcaagaattattctgcaggtccatgacgaacttttgattgaatcaccctatgaagagaaagagatagtaaaggaaatagtaaaatcggagatggaaaatgcggttttattgaaagttcctttggtagttgaagtgaaagaaggttcaaattggtatgaaacaaagtaaaggatcc

SEQ ID NO: 1500 - DNA, 2623 bp, Artificial Sequence
  Description of Artificial Sequence: Synthetic DNA sequence of Caldicellulosiruptor TOK13B DNA Polymerase Y767V
atgaaatacctgctgccgaccgctgctgctggtctgctgctcctcgctgcccagccggcgatggccatggaatttgttatttttgatgggaatagtattctgtatagagctttttttgccttgccacagcttactacctcaacaggcatacctacaaatgctatatatggttttttgaatgtgctgttaaaatacttagattctgaaaaaccggattatgtagcagtagcttttgacaaaaaaggcagagctgtccgaaaaagtgaatatgaagaatacaaggctaacagaaaaccgatgccagattctcttcaggttcagataccttacgtaagagaaatacttgctgctctgaacattcctgtactgaaatgtgaagggtatgaagctgatgacgttataggcacacttgtaaatagatttaaagcccaggatttagagattgtgataataaccggagacagagatacacttcagttacttgataaaaatgtaattgtcaaaatagtcacaacaaggtttgacaggacaactgaagatttgtatgctgtagaaaatgtaaaagaaaaatatggtgtttttgcgcatcaggttgttgactataaagcattagtaggtgatgcgtcagacaatataccaggtgttaagggaattggagataaaactgccataaagctgttagaagagtaccagactctggagaatatatatcagaatctaaataacattaaaggagcgctaaaagagaagttggaatcaggaaaagacatggcatttttatcaaaaagactggctactatcatatgcgatttaccaattgaggtgaatcttgaagaattaaaaaccaaagaatgggacaaagaaagactttatcagattttacttcaacttgagtttaaaagctttattaaaagactgggcttttcagaagagattaactatgcaaggcagaactttcagctacctgaatttagtattaaagaacttcgtgatgtttcagcaatagggggcaaagaaatctatctattgtactcagatgaagaaggacttttttatatttatgaccatcaaacctcaaccatttttacaacttctgataaggaagctattaaagatcttttaacactccaaagcattcaaaaggttgtatatgatttaaaaaatatactccataaggtggactttgatgaagctaatcagataaaaaattgtaatgatgttatgttggcttcatatgttttggacagtacacgcagttcgtacgatttggaaacattgtttatttcttatctcaacactgatatagctgcaatcaaagagaatagatgggctggtgctacagttttattaagaaatctttgggatgaactttcaaaactcattgatttaaactcggcccaatacgtttatgagagcatagagatgcctcttgttcccattttatatgaaatggagaaaatcggttttaaggttgacaaaaacactttgcaggagtatacaaaagagattgagagcaagcttttaaagttggaatcacagatttatcaaatagccggtgaatggtttaacataaactcgccaaaacaactctcatatatattattcgaaaaactgaagcttccggttgttaaaaagaccaaaacaggatattcaacagatgccgaggtattagaagagctgtatgataaacatgacataataccgcttattctggattatagaatgtatacgaaaatactgacaacttactgtcagggactggttcaggcaataaatcctgcaactggaagaattcataccaactttattcagacaggtacggcaactggaagacttgcaagtgcagagcccaatctgcaaaatattcctgtaaaatatgatgagggaaagctaataagaaaggcatttgttccagatgaaggttatgtgttgatagatgctgattattctcagattgagcttagaatacttgcacatatctctgaggatgaacgactgataaatgcttttaaaaataaccttgatattcattcacagacggcggcagagatctttggtgtggatataagtcaggttacaccaattatgcgaagccaggcaaaagcagttaactttggaattgtatatggtatatctgattatggactttcacgggatataaagatttcaagaaaagaagcagccgagtttattaatcgttattttgaaaagtatcccagagtaaaagaatatttggacaatgtcgtcaagtttgcccgtgaaaacggatttgttttgacaatatttaacaggaaaagggttatcaaggatataaagtctactaataaaaacctgagaaactatgcagagagaatagcaatgaattcacctatccagggaagtgctgcagatattatgaaaatagcaatgataagagtttataaaaagctaaaagaaaacaatttaaaatcaagaattattctgcaggtccatgacgaacttttgattgaatcaccctatgaagagaaagagatagtaaaggaaatagtaaaatcggagatggaaaatgcggttttattgaaagttcctttggtagttgaagtgaaagaaggttcaaattggtatgaaacaaagtaaaggatcc

SEQ ID NO: 1501 - DNA, 2623 bp, Artificial Sequence
  Description of Artificial Sequence: Synthetic DNA sequence of Caldicellulosiruptor TOK13B DNA Polymerase I768A
atgaaatacctgctgccgaccgctgctgctggtctgctgctcctcgctgcccagccggcgatggccatggaatttgttatttttgatgggaatagtattctgtatagagctttttttgccttgccacagcttactacctcaacaggcatacctacaaatgctatatatggttttttgaatgtgctgttaaaatacttagattctgaaaaaccggattatgtagcagtagcttttgacaaaaaaggcagagctgtccgaaaaagtgaatatgaagaatacaaggctaacagaaaaccgatgccagattctcttcaggttcagataccttacgtaagagaaatacttgctgctctgaacattcctgtactgaaatgtgaagggtatgaagctgatgacgttataggcacacttgtaaatagatttaaagcccaggatttagagattgtgataataaccggagacagagatacacttcagttacttgataaaaatgtaattgtcaaaatagtcacaacaaggtttgacaggacaactgaagatttgtatgctgtagaaaatgtaaaagaaaaatatggtgtttttgcgcatcaggttgttgactataaagcattagtaggtgatgcgtcagacaatataccaggtgttaagggaattggagataaaactgccataaagctgttagaagagtaccagactctggagaatatatatcagaatctaaataacattaaaggagcgctaaaagagaagttggaatcaggaaaagacatggcatttttatcaaaaagactggctactatcatatgcgatttaccaattgaggtgaatcttgaagaattaaaaaccaaagaatgggacaaagaaagactttatcagattttacttcaacttgagtttaaaagctttattaaaagactgggcttttcagaagagattaactatgcaaggcagaactttcagctacctgaatttagtattaaagaacttcgtgatgtttcagcaatagggggcaaagaaatctatctattgtactcagatgaagaaggacttttttatatttatgaccatcaaacctcaaccatttttacaacttctgataaggaagctattaaagatcttttaacactccaaagcattcaaaaggttgtatatgatttaaaaaatatactccataaggtggactttgatgaagctaatcagataaaaaattgtaatgatgttatgttggcttcatatgttttggacagtacacgcagttcgtacgatttggaaacattgtttatttcttatctcaacactgatatagctgcaatcaaagagaatagatgggctggtgctacagttttattaagaaatctttgggatgaactttcaaaactcattgatttaaactcggcccaatacgtttatgagagcatagagatgcctcttgttcccattttatatgaaatggagaaaatcggttttaaggttgacaaaaacactttgcaggagtatacaaaagagattgagagcaagcttttaaagttggaatcacagatttatcaaatagccggtgaatggtttaacataaactcgccaaaacaactctcatatatattattcgaaaaactgaagcttccggttgttaaaaagaccaaaacaggatattcaacagatgccgaggtattagaagagctgtatgataaacatgacataataccgcttattctggattatagaatgtatacgaaaatactgacaacttactgtcagggactggttcaggcaataaatcctgcaactggaagaattcataccaactttattcagacaggtacggcaactggaagacttgcaagtgcagagcccaatctgcaaaatattcctgtaaaatatgatgagggaaagctaataagaaaggcatttgttccagatgaaggttatgtgttgatagatgctgattattctcagattgagcttagaatacttgcacatatctctgaggatgaacgactgataaatgcttttaaaaataaccttgatattcattcacagacggcggcagagatctttggtgtggatataagtcaggttacaccaattatgcgaagccaggcaaaagcagttaactttggaattgtatatggtatatctgattatggactttcacgggatataaagatttcaagaaaagaagcagccgagtttattaatcgttattttgaaaagtatcccagagtaaaagaatatttggacaatgtcgtcaagtttgcccgtgaaaacggatttgttttgacaatatttaacaggaaaaggtatgctaaggatataaagtctactaataaaaacctgagaaactatgcagagagaatagcaatgaattcacctatccagggaagtgctgcagatattatgaaaatagcaatgataagagtttataaaaagctaaaagaaaacaatttaaaatcaagaattattctgcaggtccatgacgaacttttgattgaatcaccctatgaagagaaagagatagtaaaggaaatagtaaaatcggagatggaaaatgcggttttattgaaagttcctttggtagttgaagtgaaagaaggttcaaattggtatgaaacaaagtaaaggatcc

SEQ ID NO: 1502 - DNA, 2623 bp, Artificial Sequence
  Description of Artificial Sequence: Synthetic DNA sequence of Caldicellulosiruptor TOK13B DNA Polymerase I768R
atgaaatacctgctgccgaccgctgctgctggtctgctgctcctcgctgcccagccggcgatggccatggaatttgttatttttgatgggaatagtattctgtatagagctttttttgccttgccacagcttactacctcaacaggcatacctacaaatgctatatatggttttttgaatgtgctgttaaaatacttagattctgaaaaaccggattatgtagcagtagcttttgacaaaaaaggcagagctgtccgaaaaagtgaatatgaagaatacaaggctaacagaaaaccgatgccagattctcttcaggttcagataccttacgtaagagaaatacttgctgctctgaacattcctgtactgaaatgtgaagggtatgaagctgatgacgttataggcacacttgtaaatagatttaaagcccaggatttagagattgtgataataaccggagacagagatacacttcagttacttgataaaaatgtaattgtcaaaatagtcacaacaaggtttgacaggacaactgaagatttgtatgctgtagaaaatgtaaaagaaaaatatggtgtttttgcgcatcaggttgttgactataaagcattagtaggtgatgcgtcagacaatataccaggtgttaagggaattggagataaaactgccataaagctgttagaagagtaccagactctggagaatatatatcagaatctaaataacattaaaggagcgctaaaagagaagttggaatcaggaaaagacatggcatttttatcaaaaagactggctactatcatatgcgatttaccaattgaggtgaatcttgaagaattaaaaaccaaagaatgggacaaagaaagactttatcagattttacttcaacttgagtttaaaagctttattaaaagactgggcttttcagaagagattaactatgcaaggcagaactttcagctacctgaatttagtattaaagaacttcgtgatgtttcagcaatagggggcaaagaaatctatctattgtactcagatgaagaaggacttttttatatttatgaccatcaaacctcaaccatttttacaacttctgataaggaagctattaaagatcttttaacactccaaagcattcaaaaggttgtatatgatttaaaaaatatactccataaggtggactttgatgaagctaatcagataaaaaattgtaatgatgttatgttggcttcatatgttttggacagtacacgcagttcgtacgatttggaaacattgtttatttcttatctcaacactgatatagctgcaatcaaagagaatagatgggctggtgctacagttttattaagaaatctttgggatgaactttcaaaactcattgatttaaactcggcccaatacgtttatgagagcatagagatgcctcttgttcccattttatatgaaatggagaaaatcggttttaaggttgacaaaaacactttgcaggagtatacaaaagagattgagagcaagcttttaaagttggaatcacagatttatcaaatagccggtgaatggtttaacataaactcgccaaaacaactctcatatatattattcgaaaaactgaagcttccggttgttaaaaagaccaaaacaggatattcaacagatgccgaggtattagaagagctgtatgataaacatgacataataccgcttattctggattatagaatgtatacgaaaatactgacaacttactgtcagggactggttcaggcaataaatcctgcaactggaagaattcataccaactttattcagacaggtacggcaactggaagacttgcaagtgcagagcccaatctgcaaaatattcctgtaaaatatgatgagggaaagctaataagaaaggcatttgttccagatgaaggttatgtgttgatagatgctgattattctcagattgagcttagaatacttgcacatatctctgaggatgaacgactgataaatgcttttaaaaataaccttgatattcattcacagacggcggcagagatctttggtgtggatataagtcaggttacaccaattatgcgaagccaggcaaaagcagttaactttggaattgtatatggtatatctgattatggactttcacgggatataaagatttcaagaaaagaagcagccgagtttattaatcgttattttgaaaagtatcccagagtaaaagaatatttggacaatgtcgtcaagtttgcccgtgaaaacggatttgttttgacaatatttaacaggaaaaggtatcgtaaggatataaagtctactaataaaaacctgagaaactatgcagagagaatagcaatgaattcacctatccagggaagtgctgcagatattatgaaaatagcaatgataagagtttataaaaagctaaaagaaaacaatttaaaatcaagaattattctgcaggtccatgacgaacttttgattgaatcaccctatgaagagaaagagatagtaaaggaaatagtaaaatcggagatggaaaatgcggttttattgaaagttcctttggtagttgaagtgaaagaaggttcaaattggtatgaaacaaagtaaaggatcc

SEQ ID NO: 1503 - DNA, 2623 bp, Artificial Sequence
  Description of Artificial Sequence: Synthetic DNA sequence of Caldicellulosiruptor TOK13B DNA Polymerase I768N
atgaaatacctgctgccgaccgctgctgctggtctgctgctcctcgctgcccagccggcgatggccatggaatttgttatttttgatgggaatagtattctgtatagagctttttttgccttgccacagcttactacctcaacaggcatacctacaaatgctatatatggttttttgaatgtgctgttaaaatacttagattctgaaaaaccggattatgtagcagtagcttttgacaaaaaaggcagagctgtccgaaaaagtgaatatgaagaatacaaggctaacagaaaaccgatgccagattctcttcaggttcagataccttacgtaagagaaatacttgctgctctgaacattcctgtactgaaatgtgaagggtatgaagctgatgacgttataggcacacttgtaaatagatttaaagcccaggatttagagattgtgataataaccggagacagagatacacttcagttacttgataaaaatgtaattgtcaaaatagtcacaacaaggtttgacaggacaactgaagatttgtatgctgtagaaaatgtaaaagaaaaatatggtgtttttgcgcatcaggttgttgactataaagcattagtaggtgatgcgtcagacaatataccaggtgttaagggaattggagataaaactgccataaagctgttagaagagtaccagactctggagaatatatatcagaatctaaataacattaaaggagcgctaaaagagaagttggaatcaggaaaagacatggcatttttatcaaaaagactggctactatcatatgcgatttaccaattgaggtgaatcttgaagaattaaaaaccaaagaatgggacaaagaaagactttatcagattttacttcaacttgagtttaaaagctttattaaaagactgggcttttcagaagagattaactatgcaaggcagaactttcagctacctgaatttagtattaaagaacttcgtgatgtttcagcaatagggggcaaagaaatctatctattgtactcagatgaagaaggacttttttatatttatgaccatcaaacctcaaccatttttacaacttctgataaggaagctattaaagatcttttaacactccaaagcattcaaaaggttgtatatgatttaaaaaatatactccataaggtggactttgatgaagctaatcagataaaaaattgtaatgatgttatgttggcttcatatgttttggacagtacacgcagttcgtacgatttggaaacattgtttatttcttatctcaacactgatatagctgcaatcaaagagaatagatgggctggtgctacagttttattaagaaatctttgggatgaactttcaaaactcattgatttaaactcggcccaatacgtttatgagagcatagagatgcctcttgttcccattttatatgaaatggagaaaatcggttttaaggttgacaaaaacactttgcaggagtatacaaaagagattgagagcaagcttttaaagttggaatcacagatttatcaaatagccggtgaatggtttaacataaactcgccaaaacaactctcatatatattattcgaaaaactgaagcttccggttgttaaaaagaccaaaacaggatattcaacagatgccgaggtattagaagagctgtatgataaacatgacataataccgcttattctggattatagaatgtatacgaaaatactgacaacttactgtcagggactggttcaggcaataaatcctgcaactggaagaattcataccaactttattcagacaggtacggcaactggaagacttgcaagtgcagagcccaatctgcaaaatattcctgtaaaatatgatgagggaaagctaataagaaaggcatttgttccagatgaaggttatgtgttgatagatgctgattattctcagattgagcttagaatacttgcacatatctctgaggatgaacgactgataaatgcttttaaaaataaccttgatattcattcacagacggcggcagagatctttggtgtggatataagtcaggttacaccaattatgcgaagccaggcaaaagcagttaactttggaattgtatatggtatatctgattatggactttcacgggatataaagatttcaagaaaagaagcagccgagtttattaatcgttattttgaaaagtatcccagagtaaaagaatatttggacaatgtcgtcaagtttgcccgtgaaaacggatttgttttgacaatatttaacaggaaaaggtataataaggatataaagtctactaataaaaacctgagaaactatgcagagagaatagcaatgaattcacctatccagggaagtgctgcagatattatgaaaatagcaatgataagagtttataaaaagctaaaagaaaacaatttaaaatcaagaattattctgcaggtccatgacgaacttttgattgaatcaccctatgaagagaaagagatagtaaaggaaatagtaaaatcggagatggaaaatgcggttttattgaaagttcctttggtagttgaagtgaaagaaggttcaaattggtatgaaacaaagtaaaggatcc

SEQ ID NO: 1504 - DNA, 2623 bp, Artificial Sequence
  Description of Artificial Sequence: Synthetic DNA sequence of Caldicellulosiruptor TOK13B DNA Polymerase I768D
atgaaatacctgctgccgaccgctgctgctggtctgctgctcctcgctgcccagccggcgatggccatggaatttgttatttttgatgggaatagtattctgtatagagctttttttgccttgccacagcttactacctcaacaggcatacctacaaatgctatatatggttttttgaatgtgctgttaaaatacttagattctgaaaaaccggattatgtagcagtagcttttgacaaaaaaggcagagctgtccgaaaaagtgaatatgaagaatacaaggctaacagaaaaccgatgccagattctcttcaggttcagataccttacgtaagagaaatacttgctgctctgaacattcctgtactgaaatgtgaagggtatgaagctgatgacgttataggcacacttgtaaatagatttaaagcccaggatttagagattgtgataataaccggagacagagatacacttcagttacttgataaaaatgtaattgtcaaaatagtcacaacaaggtttgacaggacaactgaagatttgtatgctgtagaaaatgtaaaagaaaaatatggtgtttttgcgcatcaggttgttgactataaagcattagtaggtgatgcgtcagacaatataccaggtgttaagggaattggagataaaactgccataaagctgttagaagagtaccagactctggagaatatatatcagaatctaaataacattaaaggagcgctaaaagagaagttggaatcaggaaaagacatggcatttttatcaaaaagactggctactatcatatgcgatttaccaattgaggtgaatcttgaagaattaaaaaccaaagaatgggacaaagaaagactttatcagattttacttcaacttgagtttaaaagctttattaaaagactgggcttttcagaagagattaactatgcaaggcagaactttcagctacctgaatttagtattaaagaacttcgtgatgtttcagcaatagggggcaaagaaatctatctattgtactcagatgaagaaggacttttttatatttatgaccatcaaacctcaaccatttttacaacttctgataaggaagctattaaagatcttttaacactccaaagcattcaaaaggttgtatatgatttaaaaaatatactccataaggtggactttgatgaagctaatcagataaaaaattgtaatgatgttatgttggcttcatatgttttggacagtacacgcagttcgtacgatttggaaacattgtttatttcttatctcaacactgatatagctgcaatcaaagagaatagatgggctggtgctacagttttattaagaaatctttgggatgaactttcaaaactcattgatttaaactcggcccaatacgtttatgagagcatagagatgcctcttgttcccattttatatgaaatggagaaaatcggttttaaggttgacaaaaacactttgcaggagtatacaaaagagattgagagcaagcttttaaagttggaatcacagatttatcaaatagccggtgaatggtttaacataaactcgccaaaacaactctcatatatattattcgaaaaactgaagcttccggttgttaaaaagaccaaaacaggatattcaacagatgccgaggtattagaagagctgtatgataaacatgacataataccgcttattctggattatagaatgtatacgaaaatactgacaacttactgtcagggactggttcaggcaataaatcctgcaactggaagaattcataccaactttattcagacaggtacggcaactggaagacttgcaagtgcagagcccaatctgcaaaatattcctgtaaaatatgatgagggaaagctaataagaaaggcatttgttccagatgaaggttatgtgttgatagatgctgattattctcagattgagcttagaatacttgcacatatctctgaggatgaacgactgataaatgcttttaaaaataaccttgatattcattcacagacggcggcagagatctttggtgtggatataagtcaggttacaccaattatgcgaagccaggcaaaagcagttaactttggaattgtatatggtatatctgattatggactttcacgggatataaagatttcaagaaaagaagcagccgagtttattaatcgttattttgaaaagtatcccagagtaaaagaatatttggacaatgtcgtcaagtttgcccgtgaaaacggatttgttttgacaatatttaacaggaaaaggtatgataaggatataaagtctactaataaaaacctgagaaactatgcagagagaatagcaatgaattcacctatccagggaagtgctgcagatattatgaaaatagcaatgataagagtttataaaaagctaaaagaaaacaatttaaaatcaagaattattctgcaggtccatgacgaacttttgattgaatcaccctatgaagagaaagagatagtaaaggaaatagtaaaatcggagatggaaaatgcggttttattgaaagttcctttggtagttgaagtgaaagaaggttcaaattggtatgaaacaaagtaaaggatcc

SEQ ID NO: 1505 - DNA, 2623 bp, Artificial Sequence
  Description of Artificial Sequence: Synthetic DNA sequence of Caldicellulosiruptor TOK13B DNA Polymerase I768C
atgaaatacctgctgccgaccgctgctgctggtctgctgctcctcgctgcccagccggcgatggccatggaatttgttatttttgatgggaatagtattctgtatagagctttttttgccttgccacagcttactacctcaacaggcatacctacaaatgctatatatggttttttgaatgtgctgttaaaatacttagattctgaaaaaccggattatgtagcagtagcttttgacaaaaaaggcagagctgtccgaaaaagtgaatatgaagaatacaaggctaacagaaaaccgatgccagattctcttcaggttcagataccttacgtaagagaaatacttgctgctctgaacattcctgtactgaaatgtgaagggtatgaagctgatgacgttataggcacacttgtaaatagatttaaagcccaggatttagagattgtgataataaccggagacagagatacacttcagttacttgataaaaatgtaattgtcaaaatagtcacaacaaggtttgacaggacaactgaagatttgtatgctgtagaaaatgtaaaagaaaaatatggtgtttttgcgcatcaggttgttgactataaagcattagtaggtgatgcgtcagacaatataccaggtgttaagggaattggagataaaactgccataaagctgttagaagagtaccagactctggagaatatatatcagaatctaaataacattaaaggagcgctaaaagagaagttggaatcaggaaaagacatggcatttttatcaaaaagactggctactatcatatgcgatttaccaattgaggtgaatcttgaagaattaaaaaccaaagaatgggacaaagaaagactttatcagattttacttcaacttgagtttaaaagctttattaaaagactgggcttttcagaagagattaactatgcaaggcagaactttcagctacctgaatttagtattaaagaacttcgtgatgtttcagcaatagggggcaaagaaatctatctattgtactcagatgaagaaggacttttttatatttatgaccatcaaacctcaaccatttttacaacttctgataaggaagctattaaagatcttttaacactccaaagcattcaaaaggttgtatatgatttaaaaaatatactccataaggtggactttgatgaagctaatcagataaaaaattgtaatgatgttatgttggcttcatatgttttggacagtacacgcagttcgtacgatttggaaacattgtttatttcttatctcaacactgatatagctgcaatcaaagagaatagatgggctggtgctacagttttattaagaaatctttgggatgaactttcaaaactcattgatttaaactcggcccaatacgtttatgagagcatagagatgcctcttgttcccattttatatgaaatggagaaaatcggttttaaggttgacaaaaacactttgcaggagtatacaaaagagattgagagcaagcttttaaagttggaatcacagatttatcaaatagccggtgaatggtttaacataaactcgccaaaacaactctcatatatattattcgaaaaactgaagcttccggttgttaaaaagaccaaaacaggatattcaacagatgccgaggtattagaagagctgtatgataaacatgacataataccgcttattctggattatagaatgtatacgaaaatactgacaacttactgtcagggactggttcaggcaataaatcctgcaactggaagaattcataccaactttattcagacaggtacggcaactggaagacttgcaagtgcagagcccaatctgcaaaatattcctgtaaaatatgatgagggaaagctaataagaaaggcatttgttccagatgaaggttatgtgttgatagatgctgattattctcagattgagcttagaatacttgcacatatctctgaggatgaacgactgataaatgcttttaaaaataaccttgatattcattcacagacggcggcagagatctttggtgtggatataagtcaggttacaccaattatgcgaagccaggcaaaagcagttaactttggaattgtatatggtatatctgattatggactttcacgggatataaagatttcaagaaaagaagcagccgagtttattaatcgttattttgaaaagtatcccagagtaaaagaatatttggacaatgtcgtcaagtttgcccgtgaaaacggatttgttttgacaatatttaacaggaaaaggtattgtaaggatataaagtctactaataaaaacctgagaaactatgcagagagaatagcaatgaattcacctatccagggaagtgctgcagatattatgaaaatagcaatgataagagtttataaaaagctaaaagaaaacaatttaaaatcaagaattattctgcaggtccatgacgaacttttgattgaatcaccctatgaagagaaagagatagtaaaggaaatagtaaaatcggagatggaaaatgcggttttattgaaagttcctttggtagttgaagtgaaagaaggttcaaattggtatgaaacaaagtaaaggatcc

SEQ ID NO: 1506 - DNA, 2623 bp, Artificial Sequence
  Description of Artificial Sequence: Synthetic DNA sequence of Caldicellulosiruptor TOK13B DNA Polymerase I768E
atgaaatacctgctgccgaccgctgctgctggtctgctgctcctcgctgcccagccggcgatggccatggaatttgttatttttgatgggaatagtattctgtatagagctttttttgccttgccacagcttactacctcaacaggcatacctacaaatgctatatatggttttttgaatgtgctgttaaaatacttagattctgaaaaaccggattatgtagcagtagcttttgacaaaaaaggcagagctgtccgaaaaagtgaatatgaagaatacaaggctaacagaaaaccgatgccagattctcttcaggttcagataccttacgtaagagaaatacttgctgctctgaacattcctgtactgaaatgtgaagggtatgaagctgatgacgttataggcacacttgtaaatagatttaaagcccaggatttagagattgtgataataaccggagacagagatacacttcagttacttgataaaaatgtaattgtcaaaatagtcacaacaaggtttgacaggacaactgaagatttgtatgctgtagaaaatgtaaaagaaaaatatggtgtttttgcgcatcaggttgttgactataaagcattagtaggtgatgcgtcagacaatataccaggtgttaagggaattggagataaaactgccataaagctgttagaagagtaccagactctggagaatatatatcagaatctaaataacattaaaggagcgctaaaagagaagttggaatcaggaaaagacatggcatttttatcaaaaagactggctactatcatatgcgatttaccaattgaggtgaatcttgaagaattaaaaaccaaagaatgggacaaagaaagactttatcagattttacttcaacttgagtttaaaagctttattaaaagactgggcttttcagaagagattaactatgcaaggcagaactttcagctacctgaatttagtattaaagaacttcgtgatgtttcagcaatagggggcaaagaaatctatctattgtactcagatgaagaaggacttttttatatttatgaccatcaaacctcaaccatttttacaacttctgataaggaagctattaaagatcttttaacactccaaagcattcaaaaggttgtatatgatttaaaaaatatactccataaggtggactttgatgaagctaatcagataaaaaattgtaatgatgttatgttggcttcatatgttttggacagtacacgcagttcgtacgatttggaaacattgtttatttcttatctcaacactgatatagctgcaatcaaagagaatagatgggctggtgctacagttttattaagaaatctttgggatgaactttcaaaactcattgatttaaactcggcccaatacgtttatgagagcatagagatgcctcttgttcccattttatatgaaatggagaaaatcggttttaaggttgacaaaaacactttgcaggagtatacaaaagagattgagagcaagcttttaaagttggaatcacagatttatcaaatagccggtgaatggtttaacataaactcgccaaaacaactctcatatatattattcgaaaaactgaagcttccggttgttaaaaagaccaaaacaggatattcaacagatgccgaggtattagaagagctgtatgataaacatgacataataccgcttattctggattatagaatgtatacgaaaatactgacaacttactgtcagggactggttcaggcaataaatcctgcaactggaagaattcataccaactttattcagacaggtacggcaactggaagacttgcaagtgcagagcccaatctgcaaaatattcctgtaaaatatgatgagggaaagctaataagaaaggcatttgttccagatgaaggttatgtgttgatagatgctgattattctcagattgagcttagaatacttgcacatatctctgaggatgaacgactgataaatgcttttaaaaataaccttgatattcattcacagacggcggcagagatctttggtgtggatataagtcaggttacaccaattatgcgaagccaggcaaaagcagttaactttggaattgtatatggtatatctgattatggactttcacgggatataaagatttcaagaaaagaagcagccgagtttattaatcgttattttgaaaagtatcccagagtaaaagaatatttggacaatgtcgtcaagtttgcccgtgaaaacggatttgttttgacaatatttaacaggaaaaggtatgaaaaggatataaagtctactaataaaaacctgagaaactatgcagagagaatagcaatgaattcacctatccagggaagtgctgcagatattatgaaaatagcaatgataagagtttataaaaagctaaaagaaaacaatttaaaatcaagaattattctgcaggtccatgacgaacttttgattgaatcaccctatgaagagaaagagatagtaaaggaaatagtaaaatcggagatggaaaatgcggttttattgaaagttcctttggtagttgaagtgaaagaaggttcaaattggtatgaaacaaagtaaaggatcc

SEQ ID NO: 1507 - DNA, 2623 bp, Artificial Sequence
  Description of Artificial Sequence: Synthetic DNA sequence of Caldicellulosiruptor TOK13B DNA Polymerase I768Q
atgaaatacctgctgccgaccgctgctgctggtctgctgctcctcgctgcccagccggcgatggccatggaatttgttatttttgatgggaatagtattctgtatagagctttttttgccttgccacagcttactacctcaacaggcatacctacaaatgctatatatggttttttgaatgtgctgttaaaatacttagattctgaaaaaccggattatgtagcagtagcttttgacaaaaaaggcagagctgtccgaaaaagtgaatatgaagaatacaaggctaacagaaaaccgatgccagattctcttcaggttcagataccttacgtaagagaaatacttgctgctctgaacattcctgtactgaaatgtgaagggtatgaagctgatgacgttataggcacacttgtaaatagatttaaagcccaggatttagagattgtgataataaccggagacagagatacacttcagttacttgataaaaatgtaattgtcaaaatagtcacaacaaggtttgacaggacaactgaagatttgtatgctgtagaaaatgtaaaagaaaaatatggtgtttttgcgcatcaggttgttgactataaagcattagtaggtgatgcgtcagacaatataccaggtgttaagggaattggagataaaactgccataaagctgttagaagagtaccagactctggagaatatatatcagaatctaaataacattaaaggagcgctaaaagagaagttggaatcaggaaaagacatggcatttttatcaaaaagactggctactatcatatgcgatttaccaattgaggtgaatcttgaagaattaaaaaccaaagaatgggacaaagaaagactttatcagattttacttcaacttgagtttaaaagctttattaaaagactgggcttttcagaagagattaactatgcaaggcagaactttcagctacctgaatttagtattaaagaacttcgtgatgtttcagcaatagggggcaaagaaatctatctattgtactcagatgaagaaggacttttttatatttatgaccatcaaacctcaaccatttttacaacttctgataaggaagctattaaagatcttttaacactccaaagcattcaaaaggttgtatatgatttaaaaaatatactccataaggtggactttgatgaagctaatcagataaaaaattgtaatgatgttatgttggcttcatatgttttggacagtacacgcagttcgtacgatttggaaacattgtttatttcttatctcaacactgatatagctgcaatcaaagagaatagatgggctggtgctacagttttattaagaaatctttgggatgaactttcaaaactcattgatttaaactcggcccaatacgtttatgagagcatagagatgcctcttgttcccattttatatgaaatggagaaaatcggttttaaggttgacaaaaacactttgcaggagtatacaaaagagattgagagcaagcttttaaagttggaatcacagatttatcaaatagccggtgaatggtttaacataaactcgccaaaacaactctcatatatattattcgaaaaactgaagcttccggttgttaaaaagaccaaaacaggatattcaacagatgccgaggtattagaagagctgtatgataaacatgacataataccgcttattctggattatagaatgtatacgaaaatactgacaacttactgtcagggactggttcaggcaataaatcctgcaactggaagaattcataccaactttattcagacaggtacggcaactggaagacttgcaagtgcagagcccaatctgcaaaatattcctgtaaaatatgatgagggaaagctaataagaaaggcatttgttccagatgaaggttatgtgttgatagatgctgattattctcagattgagcttagaatacttgcacatatctctgaggatgaacgactgataaatgcttttaaaaataaccttgatattcattcacagacggcggcagagatctttggtgtggatataagtcaggttacaccaattatgcgaagccaggcaaaagcagttaactttggaattgtatatggtatatctgattatggactttcacgggatataaagatttcaagaaaagaagcagccgagtttattaatcgttattttgaaaagtatcccagagtaaaagaatatttggacaatgtcgtcaagtttgcccgtgaaaacggatttgttttgacaatatttaacaggaaaaggtatcaaaaggatataaagtctactaataaaaacctgagaaactatgcagagagaatagcaatgaattcacctatccagggaagtgctgcagatattatgaaaatagcaatgataagagtttataaaaagctaaaagaaaacaatttaaaatcaagaattattctgcaggtccatgacgaacttttgattgaatcaccctatgaagagaaagagatagtaaaggaaatagtaaaatcggagatggaaaatgcggttttattgaaagttcctttggtagttgaagtgaaagaaggttcaaattggtatgaaacaaagtaaaggatcc

SEQ ID NO: 1508 - DNA, 2623 bp, Artificial Sequence
  Description of Artificial Sequence: Synthetic DNA sequence of Caldicellulosiruptor TOK13B DNA Polymerase I768G
atgaaatacctgctgccgaccgctgctgctggtctgctgctcctcgctgcccagccggcgatggccatggaatttgttatttttgatgggaatagtattctgtatagagctttttttgccttgccacagcttactacctcaacaggcatacctacaaatgctatatatggttttttgaatgtgctgttaaaatacttagattctgaaaaaccggattatgtagcagtagcttttgacaaaaaaggcagagctgtccgaaaaagtgaatatgaagaatacaaggctaacagaaaaccgatgccagattctcttcaggttcagataccttacgtaagagaaatacttgctgctctgaacattcctgtactgaaatgtgaagggtatgaagctgatgacgttataggcacacttgtaaatagatttaaagcccaggatttagagattgtgataataaccggagacagagatacacttcagttacttgataaaaatgtaattgtcaaaatagtcacaacaaggtttgacaggacaactgaagatttgtatgctgtagaaaatgtaaaagaaaaatatggtgtttttgcgcatcaggttgttgactataaagcattagtaggtgatgcgtcagacaatataccaggtgttaagggaattggagataaaactgccataaagctgttagaagagtaccagactctggagaatatatatcagaatctaaataacattaaaggagcgctaaaagagaagttggaatcaggaaaagacatggcatttttatcaaaaagactggctactatcatatgcgatttaccaattgaggtgaatcttgaagaattaaaaaccaaagaatgggacaaagaaagactttatcagattttacttcaacttgagtttaaaagctttattaaaagactgggcttttcagaagagattaactatgcaaggcagaactttcagctacctgaatttagtattaaagaacttcgtgatgtttcagcaatagggggcaaagaaatctatctattgtactcagatgaagaaggacttttttatatttatgaccatcaaacctcaaccatttttacaacttctgataaggaagctattaaagatcttttaacactccaaagcattcaaaaggttgtatatgatttaaaaaatatactccataaggtggactttgatgaagctaatcagataaaaaattgtaatgatgttatgttggcttcatatgttttggacagtacacgcagttcgtacgatttggaaacattgtttatttcttatctcaacactgatatagctgcaatcaaagagaatagatgggctggtgctacagttttattaagaaatctttgggatgaactttcaaaactcattgatttaaactcggcccaatacgtttatgagagcatagagatgcctcttgttcccattttatatgaaatggagaaaatcggttttaaggttgacaaaaacactttgcaggagtatacaaaagagattgagagcaagcttttaaagttggaatcacagatttatcaaatagccggtgaatggtttaacataaactcgccaaaacaactctcatatatattattcgaaaaactgaagcttccggttgttaaaaagaccaaaacaggatattcaacagatgccgaggtattagaagagctgtatgataaacatgacataataccgcttattctggattatagaatgtatacgaaaatactgacaacttactgtcagggactggttcaggcaataaatcctgcaactggaagaattcataccaactttattcagacaggtacggcaactggaagacttgcaagtgcagagcccaatctgcaaaatattcctgtaaaatatgatgagggaaagctaataagaaaggcatttgttccagatgaaggttatgtgttgatagatgctgattattctcagattgagcttagaatacttgcacatatctctgaggatgaacgactgataaatgcttttaaaaataaccttgatattcattcacagacggcggcagagatctttggtgtggatataagtcaggttacaccaattatgcgaagccaggcaaaagcagttaactttggaattgtatatggtatatctgattatggactttcacgggatataaagatttcaagaaaagaagcagccgagtttattaatcgttattttgaaaagtatcccagagtaaaagaatatttggacaatgtcgtcaagtttgcccgtgaaaacggatttgttttgacaatatttaacaggaaaaggtatggtaaggatataaagtctactaataaaaacctgagaaactatgcagagagaatagcaatgaattcacctatccagggaagtgctgcagatattatgaaaatagcaatgataagagtttataaaaagctaaaagaaaacaatttaaaatcaagaattattctgcaggtccatgacgaacttttgattgaatcaccctatgaagagaaagagatagtaaaggaaatagtaaaatcggagatggaaaatgcggttttattgaaagttcctttggtagttgaagtgaaagaaggttcaaattggtatgaaacaaagtaaaggatcc

SEQ ID NO: 1509 - DNA, 2623 bp, Artificial Sequence
  Description of Artificial Sequence: Synthetic DNA sequence of Caldicellulosiruptor TOK13B DNA Polymerase I768H
atgaaatacctgctgccgaccgctgctgctggtctgctgctcctcgctgcccagccggcgatggccatggaatttgttatttttgatgggaatagtattctgtatagagctttttttgccttgccacagcttactacctcaacaggcatacctacaaatgctatatatggttttttgaatgtgctgttaaaatacttagattctgaaaaaccggattatgtagcagtagcttttgacaaaaaaggcagagctgtccgaaaaagtgaatatgaagaatacaaggctaacagaaaaccgatgccagattctcttcaggttcagataccttacgtaagagaaatacttgctgctctgaacattcctgtactgaaatgtgaagggtatgaagctgatgacgttataggcacacttgtaaatagatttaaagcccaggatttagagattgtgataataaccggagacagagatacacttcagttacttgataaaaatgtaattgtcaaaatagtcacaacaaggtttgacaggacaactgaagatttgtatgctgtagaaaatgtaaaagaaaaatatggtgtttttgcgcatcaggttgttgactataaagcattagtaggtgatgcgtcagacaatataccaggtgttaagggaattggagataaaactgccataaagctgttagaagagtaccagactctggagaatatatatcagaatctaaataacattaaaggagcgctaaaagagaagttggaatcaggaaaagacatggcatttttatcaaaaagactggctactatcatatgcgatttaccaattgaggtgaatcttgaagaattaaaaaccaaagaatgggacaaagaaagactttatcagattttacttcaacttgagtttaaaagctttattaaaagactgggcttttcagaagagattaactatgcaaggcagaactttcagctacctgaatttagtattaaagaacttcgtgatgtttcagcaatagggggcaaagaaatctatctattgtactcagatgaagaaggacttttttatatttatgaccatcaaacctcaaccatttttacaacttctgataaggaagctattaaagatcttttaacactccaaagcattcaaaaggttgtatatgatttaaaaaatatactccataaggtggactttgatgaagctaatcagataaaaaattgtaatgatgttatgttggcttcatatgttttggacagtacacgcagttcgtacgatttggaaacattgtttatttcttatctcaacactgatatagctgcaatcaaagagaatagatgggctggtgctacagttttattaagaaatctttgggatgaactttcaaaactcattgatttaaactcggcccaatacgtttatgagagcatagagatgcctcttgttcccattttatatgaaatggagaaaatcggttttaaggttgacaaaaacactttgcaggagtatacaaaagagattgagagcaagcttttaaagttggaatcacagatttatcaaatagccggtgaatggtttaacataaactcgccaaaacaactctcatatatattattcgaaaaactgaagcttccggttgttaaaaagaccaaaacaggatattcaacagatgccgaggtattagaagagctgtatgataaacatgacataataccgcttattctggattatagaatgtatacgaaaatactgacaacttactgtcagggactggttcaggcaataaatcctgcaactggaagaattcataccaactttattcagacaggtacggcaactggaagacttgcaagtgcagagcccaatctgcaaaatattcctgtaaaatatgatgagggaaagctaataagaaaggcatttgttccagatgaaggttatgtgttgatagatgctgattattctcagattgagcttagaatacttgcacatatctctgaggatgaacgactgataaatgcttttaaaaataaccttgatattcattcacagacggcggcagagatctttggtgtggatataagtcaggttacaccaattatgcgaagccaggcaaaagcagttaactttggaattgtatatggtatatctgattatggactttcacgggatataaagatttcaagaaaagaagcagccgagtttattaatcgttattttgaaaagtatcccagagtaaaagaatatttggacaatgtcgtcaagtttgcccgtgaaaacggatttgttttgacaatatttaacaggaaaaggtatcataaggatataaagtctactaataaaaacctgagaaactatgcagagagaatagcaatgaattcacctatccagggaagtgctgcagatattatgaaaatagcaatgataagagtttataaaaagctaaaagaaaacaatttaaaatcaagaattattctgcaggtccatgacgaacttttgattgaatcaccctatgaagagaaagagatagtaaaggaaatagtaaaatcggagatggaaaatgcggttttattgaaagttcctttggtagttgaagtgaaagaaggttcaaattggtatgaaacaaagtaaaggatcc

SEQ ID NO: 1510 - DNA, 2623 bp, Artificial Sequence
  Description of Artificial Sequence: Synthetic DNA sequence of Caldicellulosiruptor TOK13B DNA Polymerase I768L
atgaaatacctgctgccgaccgctgctgctggtctgctgctcctcgctgcccagccggcgatggccatggaatttgttatttttgatgggaatagtattctgtatagagctttttttgccttgccacagcttactacctcaacaggcatacctacaaatgctatatatggttttttgaatgtgctgttaaaatacttagattctgaaaaaccggattatgtagcagtagcttttgacaaaaaaggcagagctgtccgaaaaagtgaatatgaagaatacaaggctaacagaaaaccgatgccagattctcttcaggttcagataccttacgtaagagaaatacttgctgctctgaacattcctgtactgaaatgtgaagggtatgaagctgatgacgttataggcacacttgtaaatagatttaaagcccaggatttagagattgtgataataaccggagacagagatacacttcagttacttgataaaaatgtaattgtcaaaatagtcacaacaaggtttgacaggacaactgaagatttgtatgctgtagaaaatgtaaaagaaaaatatggtgtttttgcgcatcaggttgttgactataaagcattagtaggtgatgcgtcagacaatataccaggtgttaagggaattggagataaaactgccataaagctgttagaagagtaccagactctggagaatatatatcagaatctaaataacattaaaggagcgctaaaagagaagttggaatcaggaaaagacatggcatttttatcaaaaagactggctactatcatatgcgatttaccaattgaggtgaatcttgaagaattaaaaaccaaagaatgggacaaagaaagactttatcagattttacttcaacttgagtttaaaagctttattaaaagactgggcttttcagaagagattaactatgcaaggcagaactttcagctacctgaatttagtattaaagaacttcgtgatgtttcagcaatagggggcaaagaaatctatctattgtactcagatgaagaaggacttttttatatttatgaccatcaaacctcaaccatttttacaacttctgataaggaagctattaaagatcttttaacactccaaagcattcaaaaggttgtatatgatttaaaaaatatactccataaggtggactttgatgaagctaatcagataaaaaattgtaatgatgttatgttggcttcatatgttttggacagtacacgcagttcgtacgatttggaaacattgtttatttcttatctcaacactgatatagctgcaatcaaagagaatagatgggctggtgctacagttttattaagaaatctttgggatgaactttcaaaactcattgatttaaactcggcccaatacgtttatgagagcatagagatgcctcttgttcccattttatatgaaatggagaaaatcggttttaaggttgacaaaaacactttgcaggagtatacaaaagagattgagagcaagcttttaaagttggaatcacagatttatcaaatagccggtgaatggtttaacataaactcgccaaaacaactctcatatatattattcgaaaaactgaagcttccggttgttaaaaagaccaaaacaggatattcaacagatgccgaggtattagaagagctgtatgataaacatgacataataccgcttattctggattatagaatgtatacgaaaatactgacaacttactgtcagggactggttcaggcaataaatcctgcaactggaagaattcataccaactttattcagacaggtacggcaactggaagacttgcaagtgcagagcccaatctgcaaaatattcctgtaaaatatgatgagggaaagctaataagaaaggcatttgttccagatgaaggttatgtgttgatagatgctgattattctcagattgagcttagaatacttgcacatatctctgaggatgaacgactgataaatgcttttaaaaataaccttgatattcattcacagacggcggcagagatctttggtgtggatataagtcaggttacaccaattatgcgaagccaggcaaaagcagttaactttggaattgtatatggtatatctgattatggactttcacgggatataaagatttcaagaaaagaagcagccgagtttattaatcgttattttgaaaagtatcccagagtaaaagaatatttggacaatgtcgtcaagtttgcccgtgaaaacggatttgttttgacaatatttaacaggaaaaggtatcttaaggatataaagtctactaataaaaacctgagaaactatgcagagagaatagcaatgaattcacctatccagggaagtgctgcagatattatgaaaatagcaatgataagagtttataaaaagctaaaagaaaacaatttaaaatcaagaattattctgcaggtccatgacgaacttttgattgaatcaccctatgaagagaaagagatagtaaaggaaatagtaaaatcggagatggaaaatgcggttttattgaaagttcctttggtagttgaagtgaaagaaggttcaaattggtatgaaacaaagtaaaggatcc

SEQ ID NO: 1511 - DNA, 2623 bp, Artificial Sequence
  Description of Artificial Sequence: Synthetic DNA sequence of Caldicellulosiruptor TOK13B DNA Polymerase I768K
atgaaatacctgctgccgaccgctgctgctggtctgctgctcctcgctgcccagccggcgatggccatggaatttgttatttttgatgggaatagtattctgtatagagctttttttgccttgccacagcttactacctcaacaggcatacctacaaatgctatatatggttttttgaatgtgctgttaaaatacttagattctgaaaaaccggattatgtagcagtagcttttgacaaaaaaggcagagctgtccgaaaaagtgaatatgaagaatacaaggctaacagaaaaccgatgccagattctcttcaggttcagataccttacgtaagagaaatacttgctgctctgaacattcctgtactgaaatgtgaagggtatgaagctgatgacgttataggcacacttgtaaatagatttaaagcccaggatttagagattgtgataataaccggagacagagatacacttcagttacttgataaaaatgtaattgtcaaaatagtcacaacaaggtttgacaggacaactgaagatttgtatgctgtagaaaatgtaaaagaaaaatatggtgtttttgcgcatcaggttgttgactataaagcattagtaggtgatgcgtcagacaatataccaggtgttaagggaattggagataaaactgccataaagctgttagaagagtaccagactctggagaatatatatcagaatctaaataacattaaaggagcgctaaaagagaagttggaatcaggaaaagacatggcatttttatcaaaaagactggctactatcatatgcgatttaccaattgaggtgaatcttgaagaattaaaaaccaaagaatgggacaaagaaagactttatcagattttacttcaacttgagtttaaaagctttattaaaagactgggcttttcagaagagattaactatgcaaggcagaactttcagctacctgaatttagtattaaagaacttcgtgatgtttcagcaatagggggcaaagaaatctatctattgtactcagatgaagaaggacttttttatatttatgaccatcaaacctcaaccatttttacaacttctgataaggaagctattaaagatcttttaacactccaaagcattcaaaaggttgtatatgatttaaaaaatatactccataaggtggactttgatgaagctaatcagataaaaaattgtaatgatgttatgttggcttcatatgttttggacagtacacgcagttcgtacgatttggaaacattgtttatttcttatctcaacactgatatagctgcaatcaaagagaatagatgggctggtgctacagttttattaagaaatctttgggatgaactttcaaaactcattgatttaaactcggcccaatacgtttatgagagcatagagatgcctcttgttcccattttatatgaaatggagaaaatcggttttaaggttgacaaaaacactttgcaggagtatacaaaagagattgagagcaagcttttaaagttggaatcacagatttatcaaatagccggtgaatggtttaacataaactcgccaaaacaactctcatatatattattcgaaaaactgaagcttccggttgttaaaaagaccaaaacaggatattcaacagatgccgaggtattagaagagctgtatgataaacatgacataataccgcttattctggattatagaatgtatacgaaaatactgacaacttactgtcagggactggttcaggcaataaatcctgcaactggaagaattcataccaactttattcagacaggtacggcaactggaagacttgcaagtgcagagcccaatctgcaaaatattcctgtaaaatatgatgagggaaagctaataagaaaggcatttgttccagatgaaggttatgtgttgatagatgctgattattctcagattgagcttagaatacttgcacatatctctgaggatgaacgactgataaatgcttttaaaaataaccttgatattcattcacagacggcggcagagatctttggtgtggatataagtcaggttacaccaattatgcgaagccaggcaaaagcagttaactttggaattgtatatggtatatctgattatggactttcacgggatataaagatttcaagaaaagaagcagccgagtttattaatcgttattttgaaaagtatcccagagtaaaagaatatttggacaatgtcgtcaagtttgcccgtgaaaacggatttgttttgacaatatttaacaggaaaaggtataaaaaggatataaagtctactaataaaaacctgagaaactatgcagagagaatagcaatgaattcacctatccagggaagtgctgcagatattatgaaaatagcaatgataagagtttataaaaagctaaaagaaaacaatttaaaatcaagaattattctgcaggtccatgacgaacttttgattgaatcaccctatgaagagaaagagatagtaaaggaaatagtaaaatcggagatggaaaatgcggttttattgaaagttcctttggtagttgaagtgaaagaaggttcaaattggtatgaaacaaagtaaaggatcc

SEQ ID NO: 1512 - DNA, 2623 bp, Artificial Sequence
  Description of Artificial Sequence: Synthetic DNA sequence of Caldicellulosiruptor TOK13B DNA Polymerase I768M
atgaaatacctgctgccgaccgctgctgctggtctgctgctcctcgctgcccagccggcgatggccatggaatttgttatttttgatgggaatagtattctgtatagagctttttttgccttgccacagcttactacctcaacaggcatacctacaaatgctatatatggttttttgaatgtgctgttaaaatacttagattctgaaaaaccggattatgtagcagtagcttttgacaaaaaaggcagagctgtccgaaaaagtgaatatgaagaatacaaggctaacagaaaaccgatgccagattctcttcaggttcagataccttacgtaagagaaatacttgctgctctgaacattcctgtactgaaatgtgaagggtatgaagctgatgacgttataggcacacttgtaaatagatttaaagcccaggatttagagattgtgataataaccggagacagagatacacttcagttacttgataaaaatgtaattgtcaaaatagtcacaacaaggtttgacaggacaactgaagatttgtatgctgtagaaaatgtaaaagaaaaatatggtgtttttgcgcatcaggttgttgactataaagcattagtaggtgatgcgtcagacaatataccaggtgttaagggaattggagataaaactgccataaagctgttagaagagtaccagactctggagaatatatatcagaatctaaataacattaaaggagcgctaaaagagaagttggaatcaggaaaagacatggcatttttatcaaaaagactggctactatcatatgcgatttaccaattgaggtgaatcttgaagaattaaaaaccaaagaatgggacaaagaaagactttatcagattttacttcaacttgagtttaaaagctttattaaaagactgggcttttcagaagagattaactatgcaaggcagaactttcagctacctgaatttagtattaaagaacttcgtgatgtttcagcaatagggggcaaagaaatctatctattgtactcagatgaagaaggacttttttatatttatgaccatcaaacctcaaccatttttacaacttctgataaggaagctattaaagatcttttaacactccaaagcattcaaaaggttgtatatgatttaaaaaatatactccataaggtggactttgatgaagctaatcagataaaaaattgtaatgatgttatgttggcttcatatgttttggacagtacacgcagttcgtacgatttggaaacattgtttatttcttatctcaacactgatatagctgcaatcaaagagaatagatgggctggtgctacagttttattaagaaatctttgggatgaactttcaaaactcattgatttaaactcggcccaatacgtttatgagagcatagagatgcctcttgttcccattttatatgaaatggagaaaatcggttttaaggttgacaaaaacactttgcaggagtatacaaaagagattgagagcaagcttttaaagttggaatcacagatttatcaaatagccggtgaatggtttaacataaactcgccaaaacaactctcatatatattattcgaaaaactgaagcttccggttgttaaaaagaccaaaacaggatattcaacagatgccgaggtattagaagagctgtatgataaacatgacataataccgcttattctggattatagaatgtatacgaaaatactgacaacttactgtcagggactggttcaggcaataaatcctgcaactggaagaattcataccaactttattcagacaggtacggcaactggaagacttgcaagtgcagagcccaatctgcaaaatattcctgtaaaatatgatgagggaaagctaataagaaaggcatttgttccagatgaaggttatgtgttgatagatgctgattattctcagattgagcttagaatacttgcacatatctctgaggatgaacgactgataaatgcttttaaaaataaccttgatattcattcacagacggcggcagagatctttggtgtggatataagtcaggttacaccaattatgcgaagccaggcaaaagcagttaactttggaattgtatatggtatatctgattatggactttcacgggatataaagatttcaagaaaagaagcagccgagtttattaatcgttattttgaaaagtatcccagagtaaaagaatatttggacaatgtcgtcaagtttgcccgtgaaaacggatttgttttgacaatatttaacaggaaaaggtatatgaaggatataaagtctactaataaaaacctgagaaactatgcagagagaatagcaatgaattcacctatccagggaagtgctgcagatattatgaaaatagcaatgataagagtttataaaaagctaaaagaaaacaatttaaaatcaagaattattctgcaggtccatgacgaacttttgattgaatcaccctatgaagagaaagagatagtaaaggaaatagtaaaatcggagatggaaaatgcggttttattgaaagttcctttggtagttgaagtgaaagaaggttcaaattggtatgaaacaaagtaaaggatcc

SEQ ID NO: 1513 - DNA, 2623 bp, Artificial Sequence
  Description of Artificial Sequence: Synthetic DNA sequence of Caldicellulosiruptor TOK13B DNA Polymerase I768F
atgaaatacctgctgccgaccgctgctgctggtctgctgctcctcgctgcccagccggcgatggccatggaatttgttatttttgatgggaatagtattctgtatagagctttttttgccttgccacagcttactacctcaacaggcatacctacaaatgctatatatggttttttgaatgtgctgttaaaatacttagattctgaaaaaccggattatgtagcagtagcttttgacaaaaaaggcagagctgtccgaaaaagtgaatatgaagaatacaaggctaacagaaaaccgatgccagattctcttcaggttcagataccttacgtaagagaaatacttgctgctctgaacattcctgtactgaaatgtgaagggtatgaagctgatgacgttataggcacacttgtaaatagatttaaagcccaggatttagagattgtgataataaccggagacagagatacacttcagttacttgataaaaatgtaattgtcaaaatagtcacaacaaggtttgacaggacaactgaagatttgtatgctgtagaaaatgtaaaagaaaaatatggtgtttttgcgcatcaggttgttgactataaagcattagtaggtgatgcgtcagacaatataccaggtgttaagggaattggagataaaactgccataaagctgttagaagagtaccagactctggagaatatatatcagaatctaaataacattaaaggagcgctaaaagagaagttggaatcaggaaaagacatggcatttttatcaaaaagactggctactatcatatgcgatttaccaattgaggtgaatcttgaagaattaaaaaccaaagaatgggacaaagaaagactttatcagattttacttcaacttgagtttaaaagctttattaaaagactgggcttttcagaagagattaactatgcaaggcagaactttcagctacctgaatttagtattaaagaacttcgtgatgtttcagcaatagggggcaaagaaatctatctattgtactcagatgaagaaggacttttttatatttatgaccatcaaacctcaaccatttttacaacttctgataaggaagctattaaagatcttttaacactccaaagcattcaaaaggttgtatatgatttaaaaaatatactccataaggtggactttgatgaagctaatcagataaaaaattgtaatgatgttatgttggcttcatatgttttggacagtacacgcagttcgtacgatttggaaacattgtttatttcttatctcaacactgatatagctgcaatcaaagagaatagatgggctggtgctacagttttattaagaaatctttgggatgaactttcaaaactcattgatttaaactcggcccaatacgtttatgagagcatagagatgcctcttgttcccattttatatgaaatggagaaaatcggttttaaggttgacaaaaacactttgcaggagtatacaaaagagattgagagcaagcttttaaagttggaatcacagatttatcaaatagccggtgaatggtttaacataaactcgccaaaacaactctcatatatattattcgaaaaactgaagcttccggttgttaaaaagaccaaaacaggatattcaacagatgccgaggtattagaagagctgtatgataaacatgacataataccgcttattctggattatagaatgtatacgaaaatactgacaacttactgtcagggactggttcaggcaataaatcctgcaactggaagaattcataccaactttattcagacaggtacggcaactggaagacttgcaagtgcagagcccaatctgcaaaatattcctgtaaaatatgatgagggaaagctaataagaaaggcatttgttccagatgaaggttatgtgttgatagatgctgattattctcagattgagcttagaatacttgcacatatctctgaggatgaacgactgataaatgcttttaaaaataaccttgatattcattcacagacggcggcagagatctttggtgtggatataagtcaggttacaccaattatgcgaagccaggcaaaagcagttaactttggaattgtatatggtatatctgattatggactttcacgggatataaagatttcaagaaaagaagcagccgagtttattaatcgttattttgaaaagtatcccagagtaaaagaatatttggacaatgtcgtcaagtttgcccgtgaaaacggatttgttttgacaatatttaacaggaaaaggtattttaaggatataaagtctactaataaaaacctgagaaactatgcagagagaatagcaatgaattcacctatccagggaagtgctgcagatattatgaaaatagcaatgataagagtttataaaaagctaaaagaaaacaatttaaaatcaagaattattctgcaggtccatgacgaacttttgattgaatcaccctatgaagagaaagagatagtaaaggaaatagtaaaatcggagatggaaaatgcggttttattgaaagttcctttggtagttgaagtgaaagaaggttcaaattggtatgaaacaaagtaaaggatcc

SEQ ID NO: 1514 - DNA, 2623 bp, Artificial Sequence
  Description of Artificial Sequence: Synthetic DNA sequence of Caldicellulosiruptor TOK13B DNA Polymerase I768P
atgaaatacctgctgccgaccgctgctgctggtctgctgctcctcgctgcccagccggcgatggccatggaatttgttatttttgatgggaatagtattctgtatagagctttttttgccttgccacagcttactacctcaacaggcatacctacaaatgctatatatggttttttgaatgtgctgttaaaatacttagattctgaaaaaccggattatgtagcagtagcttttgacaaaaaaggcagagctgtccgaaaaagtgaatatgaagaatacaaggctaacagaaaaccgatgccagattctcttcaggttcagataccttacgtaagagaaatacttgctgctctgaacattcctgtactgaaatgtgaagggtatgaagctgatgacgttataggcacacttgtaaatagatttaaagcccaggatttagagattgtgataataaccggagacagagatacacttcagttacttgataaaaatgtaattgtcaaaatagtcacaacaaggtttgacaggacaactgaagatttgtatgctgtagaaaatgtaaaagaaaaatatggtgtttttgcgcatcaggttgttgactataaagcattagtaggtgatgcgtcagacaatataccaggtgttaagggaattggagataaaactgccataaagctgttagaagagtaccagactctggagaatatatatcagaatctaaataacattaaaggagcgctaaaagagaagttggaatcaggaaaagacatggcatttttatcaaaaagactggctactatcatatgcgatttaccaattgaggtgaatcttgaagaattaaaaaccaaagaatgggacaaagaaagactttatcagattttacttcaacttgagtttaaaagctttattaaaagactgggcttttcagaagagattaactatgcaaggcagaactttcagctacctgaatttagtattaaagaacttcgtgatgtttcagcaatagggggcaaagaaatctatctattgtactcagatgaagaaggacttttttatatttatgaccatcaaacctcaaccatttttacaacttctgataaggaagctattaaagatcttttaacactccaaagcattcaaaaggttgtatatgatttaaaaaatatactccataaggtggactttgatgaagctaatcagataaaaaattgtaatgatgttatgttggcttcatatgttttggacagtacacgcagttcgtacgatttggaaacattgtttatttcttatctcaacactgatatagctgcaatcaaagagaatagatgggctggtgctacagttttattaagaaatctttgggatgaactttcaaaactcattgatttaaactcggcccaatacgtttatgagagcatagagatgcctcttgttcccattttatatgaaatggagaaaatcggttttaaggttgacaaaaacactttgcaggagtatacaaaagagattgagagcaagcttttaaagttggaatcacagatttatcaaatagccggtgaatggtttaacataaactcgccaaaacaactctcatatatattattcgaaaaactgaagcttccggttgttaaaaagaccaaaacaggatattcaacagatgccgaggtattagaagagctgtatgataaacatgacataataccgcttattctggattatagaatgtatacgaaaatactgacaacttactgtcagggactggttcaggcaataaatcctgcaactggaagaattcataccaactttattcagacaggtacggcaactggaagacttgcaagtgcagagcccaatctgcaaaatattcctgtaaaatatgatgagggaaagctaataagaaaggcatttgttccagatgaaggttatgtgttgatagatgctgattattctcagattgagcttagaatacttgcacatatctctgaggatgaacgactgataaatgcttttaaaaataaccttgatattcattcacagacggcggcagagatctttggtgtggatataagtcaggttacaccaattatgcgaagccaggcaaaagcagttaactttggaattgtatatggtatatctgattatggactttcacgggatataaagatttcaagaaaagaagcagccgagtttattaatcgttattttgaaaagtatcccagagtaaaagaatatttggacaatgtcgtcaagtttgcccgtgaaaacggatttgttttgacaatatttaacaggaaaaggtatcctaaggatataaagtctactaataaaaacctgagaaactatgcagagagaatagcaatgaattcacctatccagggaagtgctgcagatattatgaaaatagcaatgataagagtttataaaaagctaaaagaaaacaatttaaaatcaagaattattctgcaggtccatgacgaacttttgattgaatcaccctatgaagagaaagagatagtaaaggaaatagtaaaatcggagatggaaaatgcggttttattgaaagttcctttggtagttgaagtgaaagaaggttcaaattggtatgaaacaaagtaaaggatcc

SEQ ID NO: 1515 - DNA, 2623 bp, Artificial Sequence
  Description of Artificial Sequence: Synthetic DNA sequence of Caldicellulosiruptor TOK13B DNA Polymerase I768S
atgaaatacctgctgccgaccgctgctgctggtctgctgctcctcgctgcccagccggcgatggccatggaatttgttatttttgatgggaatagtattctgtatagagctttttttgccttgccacagcttactacctcaacaggcatacctacaaatgctatatatggttttttgaatgtgctgttaaaatacttagattctgaaaaaccggattatgtagcagtagcttttgacaaaaaaggcagagctgtccgaaaaagtgaatatgaagaatacaaggctaacagaaaaccgatgccagattctcttcaggttcagataccttacgtaagagaaatacttgctgctctgaacattcctgtactgaaatgtgaagggtatgaagctgatgacgttataggcacacttgtaaatagatttaaagcccaggatttagagattgtgataataaccggagacagagatacacttcagttacttgataaaaatgtaattgtcaaaatagtcacaacaaggtttgacaggacaactgaagatttgtatgctgtagaaaatgtaaaagaaaaatatggtgtttttgcgcatcaggttgttgactataaagcattagtaggtgatgcgtcagacaatataccaggtgttaagggaattggagataaaactgccataaagctgttagaagagtaccagactctggagaatatatatcagaatctaaataacattaaaggagcgctaaaagagaagttggaatcaggaaaagacatggcatttttatcaaaaagactggctactatcatatgcgatttaccaattgaggtgaatcttgaagaattaaaaaccaaagaatgggacaaagaaagactttatcagattttacttcaacttgagtttaaaagctttattaaaagactgggcttttcagaagagattaactatgcaaggcagaactttcagctacctgaatttagtattaaagaacttcgtgatgtttcagcaatagggggcaaagaaatctatctattgtactcagatgaagaaggacttttttatatttatgaccatcaaacctcaaccatttttacaacttctgataaggaagctattaaagatcttttaacactccaaagcattcaaaaggttgtatatgatttaaaaaatatactccataaggtggactttgatgaagctaatcagataaaaaattgtaatgatgttatgttggcttcatatgttttggacagtacacgcagttcgtacgatttggaaacattgtttatttcttatctcaacactgatatagctgcaatcaaagagaatagatgggctggtgctacagttttattaagaaatctttgggatgaactttcaaaactcattgatttaaactcggcccaatacgtttatgagagcatagagatgcctcttgttcccattttatatgaaatggagaaaatcggttttaaggttgacaaaaacactttgcaggagtatacaaaagagattgagagcaagcttttaaagttggaatcacagatttatcaaatagccggtgaatggtttaacataaactcgccaaaacaactctcatatatattattcgaaaaactgaagcttccggttgttaaaaagaccaaaacaggatattcaacagatgccgaggtattagaagagctgtatgataaacatgacataataccgcttattctggattatagaatgtatacgaaaatactgacaacttactgtcagggactggttcaggcaataaatcctgcaactggaagaattcataccaactttattcagacaggtacggcaactggaagacttgcaagtgcagagcccaatctgcaaaatattcctgtaaaatatgatgagggaaagctaataagaaaggcatttgttccagatgaaggttatgtgttgatagatgctgattattctcagattgagcttagaatacttgcacatatctctgaggatgaacgactgataaatgcttttaaaaataaccttgatattcattcacagacggcggcagagatctttggtgtggatataagtcaggttacaccaattatgcgaagccaggcaaaagcagttaactttggaattgtatatggtatatctgattatggactttcacgggatataaagatttcaagaaaagaagcagccgagtttattaatcgttattttgaaaagtatcccagagtaaaagaatatttggacaatgtcgtcaagtttgcccgtgaaaacggatttgttttgacaatatttaacaggaaaaggtattctaaggatataaagtctactaataaaaacctgagaaactatgcagagagaatagcaatgaattcacctatccagggaagtgctgcagatattatgaaaatagcaatgataagagtttataaaaagctaaaagaaaacaatttaaaatcaagaattattctgcaggtccatgacgaacttttgattgaatcaccctatgaagagaaagagatagtaaaggaaatagtaaaatcggagatggaaaatgcggttttattgaaagttcctttggtagttgaagtgaaagaaggttcaaattggtatgaaacaaagtaaaggatcc

SEQ ID NO: 1516 - DNA, 2623 bp, Artificial Sequence
  Description of Artificial Sequence: Synthetic DNA sequence of Caldicellulosiruptor TOK13B DNA Polymerase I768T
atgaaatacctgctgccgaccgctgctgctggtctgctgctcctcgctgcccagccggcgatggccatggaatttgttatttttgatgggaatagtattctgtatagagctttttttgccttgccacagcttactacctcaacaggcatacctacaaatgctatatatggttttttgaatgtgctgttaaaatacttagattctgaaaaaccggattatgtagcagtagcttttgacaaaaaaggcagagctgtccgaaaaagtgaatatgaagaatacaaggctaacagaaaaccgatgccagattctcttcaggttcagataccttacgtaagagaaatacttgctgctctgaacattcctgtactgaaatgtgaagggtatgaagctgatgacgttataggcacacttgtaaatagatttaaagcccaggatttagagattgtgataataaccggagacagagatacacttcagttacttgataaaaatgtaattgtcaaaatagtcacaacaaggtttgacaggacaactgaagatttgtatgctgtagaaaatgtaaaagaaaaatatggtgtttttgcgcatcaggttgttgactataaagcattagtaggtgatgcgtcagacaatataccaggtgttaagggaattggagataaaactgccataaagctgttagaagagtaccagactctggagaatatatatcagaatctaaataacattaaaggagcgctaaaagagaagttggaatcaggaaaagacatggcatttttatcaaaaagactggctactatcatatgcgatttaccaattgaggtgaatcttgaagaattaaaaaccaaagaatgggacaaagaaagactttatcagattttacttcaacttgagtttaaaagctttattaaaagactgggcttttcagaagagattaactatgcaaggcagaactttcagctacctgaatttagtattaaagaacttcgtgatgtttcagcaatagggggcaaagaaatctatctattgtactcagatgaagaaggacttttttatatttatgaccatcaaacctcaaccatttttacaacttctgataaggaagctattaaagatcttttaacactccaaagcattcaaaaggttgtatatgatttaaaaaatatactccataaggtggactttgatgaagctaatcagataaaaaattgtaatgatgttatgttggcttcatatgttttggacagtacacgcagttcgtacgatttggaaacattgtttatttcttatctcaacactgatatagctgcaatcaaagagaatagatgggctggtgctacagttttattaagaaatctttgggatgaactttcaaaactcattgatttaaactcggcccaatacgtttatgagagcatagagatgcctcttgttcccattttatatgaaatggagaaaatcggttttaaggttgacaaaaacactttgcaggagtatacaaaagagattgagagcaagcttttaaagttggaatcacagatttatcaaatagccggtgaatggtttaacataaactcgccaaaacaactctcatatatattattcgaaaaactgaagcttccggttgttaaaaagaccaaaacaggatattcaacagatgccgaggtattagaagagctgtatgataaacatgacataataccgcttattctggattatagaatgtatacgaaaatactgacaacttactgtcagggactggttcaggcaataaatcctgcaactggaagaattcataccaactttattcagacaggtacggcaactggaagacttgcaagtgcagagcccaatctgcaaaatattcctgtaaaatatgatgagggaaagctaataagaaaggcatttgttccagatgaaggttatgtgttgatagatgctgattattctcagattgagcttagaatacttgcacatatctctgaggatgaacgactgataaatgcttttaaaaataaccttgatattcattcacagacggcggcagagatctttggtgtggatataagtcaggttacaccaattatgcgaagccaggcaaaagcagttaactttggaattgtatatggtatatctgattatggactttcacgggatataaagatttcaagaaaagaagcagccgagtttattaatcgttattttgaaaagtatcccagagtaaaagaatatttggacaatgtcgtcaagtttgcccgtgaaaacggatttgttttgacaatatttaacaggaaaaggtatactaaggatataaagtctactaataaaaacctgagaaactatgcagagagaatagcaatgaattcacctatccagggaagtgctgcagatattatgaaaatagcaatgataagagtttataaaaagctaaaagaaaacaatttaaaatcaagaattattctgcaggtccatgacgaacttttgattgaatcaccctatgaagagaaagagatagtaaaggaaatagtaaaatcggagatggaaaatgcggttttattgaaagttcctttggtagttgaagtgaaagaaggttcaaattggtatgaaacaaagtaaaggatcc

SEQ ID NO: 1517 - DNA, 2623 bp, Artificial Sequence
  Description of Artificial Sequence: Synthetic DNA sequence of Caldicellulosiruptor TOK13B DNA Polymerase I768W
atgaaatacctgctgccgaccgctgctgctggtctgctgctcctcgctgcccagccggcgatggccatggaatttgttatttttgatgggaatagtattctgtatagagctttttttgccttgccacagcttactacctcaacaggcatacctacaaatgctatatatggttttttgaatgtgctgttaaaatacttagattctgaaaaaccggattatgtagcagtagcttttgacaaaaaaggcagagctgtccgaaaaagtgaatatgaagaatacaaggctaacagaaaaccgatgccagattctcttcaggttcagataccttacgtaagagaaatacttgctgctctgaacattcctgtactgaaatgtgaagggtatgaagctgatgacgttataggcacacttgtaaatagatttaaagcccaggatttagagattgtgataataaccggagacagagatacacttcagttacttgataaaaatgtaattgtcaaaatagtcacaacaaggtttgacaggacaactgaagatttgtatgctgtagaaaatgtaaaagaaaaatatggtgtttttgcgcatcaggttgttgactataaagcattagtaggtgatgcgtcagacaatataccaggtgttaagggaattggagataaaactgccataaagctgttagaagagtaccagactctggagaatatatatcagaatctaaataacattaaaggagcgctaaaagagaagttggaatcaggaaaagacatggcatttttatcaaaaagactggctactatcatatgcgatttaccaattgaggtgaatcttgaagaattaaaaaccaaagaatgggacaaagaaagactttatcagattttacttcaacttgagtttaaaagctttattaaaagactgggcttttcagaagagattaactatgcaaggcagaactttcagctacctgaatttagtattaaagaacttcgtgatgtttcagcaatagggggcaaagaaatctatctattgtactcagatgaagaaggacttttttatatttatgaccatcaaacctcaaccatttttacaacttctgataaggaagctattaaagatcttttaacactccaaagcattcaaaaggttgtatatgatttaaaaaatatactccataaggtggactttgatgaagctaatcagataaaaaattgtaatgatgttatgttggcttcatatgttttggacagtacacgcagttcgtacgatttggaaacattgtttatttcttatctcaacactgatatagctgcaatcaaagagaatagatgggctggtgctacagttttattaagaaatctttgggatgaactttcaaaactcattgatttaaactcggcccaatacgtttatgagagcatagagatgcctcttgttcccattttatatgaaatggagaaaatcggttttaaggttgacaaaaacactttgcaggagtatacaaaagagattgagagcaagcttttaaagttggaatcacagatttatcaaatagccggtgaatggtttaacataaactcgccaaaacaactctcatatatattattcgaaaaactgaagcttccggttgttaaaaagaccaaaacaggatattcaacagatgccgaggtattagaagagctgtatgataaacatgacataataccgcttattctggattatagaatgtatacgaaaatactgacaacttactgtcagggactggttcaggcaataaatcctgcaactggaagaattcataccaactttattcagacaggtacggcaactggaagacttgcaagtgcagagcccaatctgcaaaatattcctgtaaaatatgatgagggaaagctaataagaaaggcatttgttccagatgaaggttatgtgttgatagatgctgattattctcagattgagcttagaatacttgcacatatctctgaggatgaacgactgataaatgcttttaaaaataaccttgatattcattcacagacggcggcagagatctttggtgtggatataagtcaggttacaccaattatgcgaagccaggcaaaagcagttaactttggaattgtatatggtatatctgattatggactttcacgggatataaagatttcaagaaaagaagcagccgagtttattaatcgttattttgaaaagtatcccagagtaaaagaatatttggacaatgtcgtcaagtttgcccgtgaaaacggatttgttttgacaatatttaacaggaaaaggtattggaaggatataaagtctactaataaaaacctgagaaactatgcagagagaatagcaatgaattcacctatccagggaagtgctgcagatattatgaaaatagcaatgataagagtttataaaaagctaaaagaaaacaatttaaaatcaagaattattctgcaggtccatgacgaacttttgattgaatcaccctatgaagagaaagagatagtaaaggaaatagtaaaatcggagatggaaaatgcggttttattgaaagttcctttggtagttgaagtgaaagaaggttcaaattggtatgaaacaaagtaaaggatcc

SEQ ID NO: 1518 - DNA, 2623 bp, Artificial Sequence
  Description of Artificial Sequence: Synthetic DNA sequence of Caldicellulosiruptor TOK13B DNA Polymerase I768Y
atgaaatacctgctgccgaccgctgctgctggtctgctgctcctcgctgcccagccggcgatggccatggaatttgttatttttgatgggaatagtattctgtatagagctttttttgccttgccacagcttactacctcaacaggcatacctacaaatgctatatatggttttttgaatgtgctgttaaaatacttagattctgaaaaaccggattatgtagcagtagcttttgacaaaaaaggcagagctgtccgaaaaagtgaatatgaagaatacaaggctaacagaaaaccgatgccagattctcttcaggttcagataccttacgtaagagaaatacttgctgctctgaacattcctgtactgaaatgtgaagggtatgaagctgatgacgttataggcacacttgtaaatagatttaaagcccaggatttagagattgtgataataaccggagacagagatacacttcagttacttgataaaaatgtaattgtcaaaatagtcacaacaaggtttgacaggacaactgaagatttgtatgctgtagaaaatgtaaaagaaaaatatggtgtttttgcgcatcaggttgttgactataaagcattagtaggtgatgcgtcagacaatataccaggtgttaagggaattggagataaaactgccataaagctgttagaagagtaccagactctggagaatatatatcagaatctaaataacattaaaggagcgctaaaagagaagttggaatcaggaaaagacatggcatttttatcaaaaagactggctactatcatatgcgatttaccaattgaggtgaatcttgaagaattaaaaaccaaagaatgggacaaagaaagactttatcagattttacttcaacttgagtttaaaagctttattaaaagactgggcttttcagaagagattaactatgcaaggcagaactttcagctacctgaatttagtattaaagaacttcgtgatgtttcagcaatagggggcaaagaaatctatctattgtactcagatgaagaaggacttttttatatttatgaccatcaaacctcaaccatttttacaacttctgataaggaagctattaaagatcttttaacactccaaagcattcaaaaggttgtatatgatttaaaaaatatactccataaggtggactttgatgaagctaatcagataaaaaattgtaatgatgttatgttggcttcatatgttttggacagtacacgcagttcgtacgatttggaaacattgtttatttcttatctcaacactgatatagctgcaatcaaagagaatagatgggctggtgctacagttttattaagaaatctttgggatgaactttcaaaactcattgatttaaactcggcccaatacgtttatgagagcatagagatgcctcttgttcccattttatatgaaatggagaaaatcggttttaaggttgacaaaaacactttgcaggagtatacaaaagagattgagagcaagcttttaaagttggaatcacagatttatcaaatagccggtgaatggtttaacataaactcgccaaaacaactctcatatatattattcgaaaaactgaagcttccggttgttaaaaagaccaaaacaggatattcaacagatgccgaggtattagaagagctgtatgataaacatgacataataccgcttattctggattatagaatgtatacgaaaatactgacaacttactgtcagggactggttcaggcaataaatcctgcaactggaagaattcataccaactttattcagacaggtacggcaactggaagacttgcaagtgcagagcccaatctgcaaaatattcctgtaaaatatgatgagggaaagctaataagaaaggcatttgttccagatgaaggttatgtgttgatagatgctgattattctcagattgagcttagaatacttgcacatatctctgaggatgaacgactgataaatgcttttaaaaataaccttgatattcattcacagacggcggcagagatctttggtgtggatataagtcaggttacaccaattatgcgaagccaggcaaaagcagttaactttggaattgtatatggtatatctgattatggactttcacgggatataaagatttcaagaaaagaagcagccgagtttattaatcgttattttgaaaagtatcccagagtaaaagaatatttggacaatgtcgtcaagtttgcccgtgaaaacggatttgttttgacaatatttaacaggaaaaggtattataaggatataaagtctactaataaaaacctgagaaactatgcagagagaatagcaatgaattcacctatccagggaagtgctgcagatattatgaaaatagcaatgataagagtttataaaaagctaaaagaaaacaatttaaaatcaagaattattctgcaggtccatgacgaacttttgattgaatcaccctatgaagagaaagagatagtaaaggaaatagtaaaatcggagatggaaaatgcggttttattgaaagttcctttggtagttgaagtgaaagaaggttcaaattggtatgaaacaaagtaaaggatcc

SEQ ID NO: 1519 - DNA, 2623 bp, Artificial Sequence
  Description of Artificial Sequence: Synthetic DNA sequence of Caldicellulosiruptor TOK13B DNA Polymerase I768V
atgaaatacctgctgccgaccgctgctgctggtctgctgctcctcgctgcccagccggcgatggccatggaatttgttatttttgatgggaatagtattctgtatagagctttttttgccttgccacagcttactacctcaacaggcatacctacaaatgctatatatggttttttgaatgtgctgttaaaatacttagattctgaaaaaccggattatgtagcagtagcttttgacaaaaaaggcagagctgtccgaaaaagtgaatatgaagaatacaaggctaacagaaaaccgatgccagattctcttcaggttcagataccttacgtaagagaaatacttgctgctctgaacattcctgtactgaaatgtgaagggtatgaagctgatgacgttataggcacacttgtaaatagatttaaagcccaggatttagagattgtgataataaccggagacagagatacacttcagttacttgataaaaatgtaattgtcaaaatagtcacaacaaggtttgacaggacaactgaagatttgtatgctgtagaaaatgtaaaagaaaaatatggtgtttttgcgcatcaggttgttgactataaagcattagtaggtgatgcgtcagacaatataccaggtgttaagggaattggagataaaactgccataaagctgttagaagagtaccagactctggagaatatatatcagaatctaaataacattaaaggagcgctaaaagagaagttggaatcaggaaaagacatggcatttttatcaaaaagactggctactatcatatgcgatttaccaattgaggtgaatcttgaagaattaaaaaccaaagaatgggacaaagaaagactttatcagattttacttcaacttgagtttaaaagctttattaaaagactgggcttttcagaagagattaactatgcaaggcagaactttcagctacctgaatttagtattaaagaacttcgtgatgtttcagcaatagggggcaaagaaatctatctattgtactcagatgaagaaggacttttttatatttatgaccatcaaacctcaaccatttttacaacttctgataaggaagctattaaagatcttttaacactccaaagcattcaaaaggttgtatatgatttaaaaaatatactccataaggtggactttgatgaagctaatcagataaaaaattgtaatgatgttatgttggcttcatatgttttggacagtacacgcagttcgtacgatttggaaacattgtttatttcttatctcaacactgatatagctgcaatcaaagagaatagatgggctggtgctacagttttattaagaaatctttgggatgaactttcaaaactcattgatttaaactcggcccaatacgtttatgagagcatagagatgcctcttgttcccattttatatgaaatggagaaaatcggttttaaggttgacaaaaacactttgcaggagtatacaaaagagattgagagcaagcttttaaagttggaatcacagatttatcaaatagccggtgaatggtttaacataaactcgccaaaacaactctcatatatattattcgaaaaactgaagcttccggttgttaaaaagaccaaaacaggatattcaacagatgccgaggtattagaagagctgtatgataaacatgacataataccgcttattctggattatagaatgtatacgaaaatactgacaacttactgtcagggactggttcaggcaataaatcctgcaactggaagaattcataccaactttattcagacaggtacggcaactggaagacttgcaagtgcagagcccaatctgcaaaatattcctgtaaaatatgatgagggaaagctaataagaaaggcatttgttccagatgaaggttatgtgttgatagatgctgattattctcagattgagcttagaatacttgcacatatctctgaggatgaacgactgataaatgcttttaaaaataaccttgatattcattcacagacggcggcagagatctttggtgtggatataagtcaggttacaccaattatgcgaagccaggcaaaagcagttaactttggaattgtatatggtatatctgattatggactttcacgggatataaagatttcaagaaaagaagcagccgagtttattaatcgttattttgaaaagtatcccagagtaaaagaatatttggacaatgtcgtcaagtttgcccgtgaaaacggatttgttttgacaatatttaacaggaaaaggtatgttaaggatataaagtctactaataaaaacctgagaaactatgcagagagaatagcaatgaattcacctatccagggaagtgctgcagatattatgaaaatagcaatgataagagtttataaaaagctaaaagaaaacaatttaaaatcaagaattattctgcaggtccatgacgaacttttgattgaatcaccctatgaagagaaagagatagtaaaggaaatagtaaaatcggagatggaaaatgcggttttattgaaagttcctttggtagttgaagtgaaagaaggttcaaattggtatgaaacaaagtaaaggatcc

SEQ ID NO: 1520 - DNA, 2623 bp, Artificial Sequence
  Description of Artificial Sequence: Synthetic DNA sequence of Caldicellulosiruptor TOK13B DNA Polymerase K769A
atgaaatacctgctgccgaccgctgctgctggtctgctgctcctcgctgcccagccggcgatggccatggaatttgttatttttgatgggaatagtattctgtatagagctttttttgccttgccacagcttactacctcaacaggcatacctacaaatgctatatatggttttttgaatgtgctgttaaaatacttagattctgaaaaaccggattatgtagcagtagcttttgacaaaaaaggcagagctgtccgaaaaagtgaatatgaagaatacaaggctaacagaaaaccgatgccagattctcttcaggttcagataccttacgtaagagaaatacttgctgctctgaacattcctgtactgaaatgtgaagggtatgaagctgatgacgttataggcacacttgtaaatagatttaaagcccaggatttagagattgtgataataaccggagacagagatacacttcagttacttgataaaaatgtaattgtcaaaatagtcacaacaaggtttgacaggacaactgaagatttgtatgctgtagaaaatgtaaaagaaaaatatggtgtttttgcgcatcaggttgttgactataaagcattagtaggtgatgcgtcagacaatataccaggtgttaagggaattggagataaaactgccataaagctgttagaagagtaccagactctggagaatatatatcagaatctaaataacattaaaggagcgctaaaagagaagttggaatcaggaaaagacatggcatttttatcaaaaagactggctactatcatatgcgatttaccaattgaggtgaatcttgaagaattaaaaaccaaagaatgggacaaagaaagactttatcagattttacttcaacttgagtttaaaagctttattaaaagactgggcttttcagaagagattaactatgcaaggcagaactttcagctacctgaatttagtattaaagaacttcgtgatgtttcagcaatagggggcaaagaaatctatctattgtactcagatgaagaaggacttttttatatttatgaccatcaaacctcaaccatttttacaacttctgataaggaagctattaaagatcttttaacactccaaagcattcaaaaggttgtatatgatttaaaaaatatactccataaggtggactttgatgaagctaatcagataaaaaattgtaatgatgttatgttggcttcatatgttttggacagtacacgcagttcgtacgatttggaaacattgtttatttcttatctcaacactgatatagctgcaatcaaagagaatagatgggctggtgctacagttttattaagaaatctttgggatgaactttcaaaactcattgatttaaactcggcccaatacgtttatgagagcatagagatgcctcttgttcccattttatatgaaatggagaaaatcggttttaaggttgacaaaaacactttgcaggagtatacaaaagagattgagagcaagcttttaaagttggaatcacagatttatcaaatagccggtgaatggtttaacataaactcgccaaaacaactctcatatatattattcgaaaaactgaagcttccggttgttaaaaagaccaaaacaggatattcaacagatgccgaggtattagaagagctgtatgataaacatgacataataccgcttattctggattatagaatgtatacgaaaatactgacaacttactgtcagggactggttcaggcaataaatcctgcaactggaagaattcataccaactttattcagacaggtacggcaactggaagacttgcaagtgcagagcccaatctgcaaaatattcctgtaaaatatgatgagggaaagctaataagaaaggcatttgttccagatgaaggttatgtgttgatagatgctgattattctcagattgagcttagaatacttgcacatatctctgaggatgaacgactgataaatgcttttaaaaataaccttgatattcattcacagacggcggcagagatctttggtgtggatataagtcaggttacaccaattatgcgaagccaggcaaaagcagttaactttggaattgtatatggtatatctgattatggactttcacgggatataaagatttcaagaaaagaagcagccgagtttattaatcgttattttgaaaagtatcccagagtaaaagaatatttggacaatgtcgtcaagtttgcccgtgaaaacggatttgttttgacaatatttaacaggaaaaggtatatcgctgatataaagtctactaataaaaacctgagaaactatgcagagagaatagcaatgaattcacctatccagggaagtgctgcagatattatgaaaatagcaatgataagagtttataaaaagctaaaagaaaacaatttaaaatcaagaattattctgcaggtccatgacgaacttttgattgaatcaccctatgaagagaaagagatagtaaaggaaatagtaaaatcggagatggaaaatgcggttttattgaaagttcctttggtagttgaagtgaaagaaggttcaaattggtatgaaacaaagtaaaggatcc

SEQ ID NO: 1521 - DNA, 2623 bp, Artificial Sequence
  Description of Artificial Sequence: Synthetic DNA sequence of Caldicellulosiruptor TOK13B DNA Polymerase K769R
atgaaatacctgctgccgaccgctgctgctggtctgctgctcctcgctgcccagccggcgatggccatggaatttgttatttttgatgggaatagtattctgtatagagctttttttgccttgccacagcttactacctcaacaggcatacctacaaatgctatatatggttttttgaatgtgctgttaaaatacttagattctgaaaaaccggattatgtagcagtagcttttgacaaaaaaggcagagctgtccgaaaaagtgaatatgaagaatacaaggctaacagaaaaccgatgccagattctcttcaggttcagataccttacgtaagagaaatacttgctgctctgaacattcctgtactgaaatgtgaagggtatgaagctgatgacgttataggcacacttgtaaatagatttaaagcccaggatttagagattgtgataataaccggagacagagatacacttcagttacttgataaaaatgtaattgtcaaaatagtcacaacaaggtttgacaggacaactgaagatttgtatgctgtagaaaatgtaaaagaaaaatatggtgtttttgcgcatcaggttgttgactataaagcattagtaggtgatgcgtcagacaatataccaggtgttaagggaattggagataaaactgccataaagctgttagaagagtaccagactctggagaatatatatcagaatctaaataacattaaaggagcgctaaaagagaagttggaatcaggaaaagacatggcatttttatcaaaaagactggctactatcatatgcgatttaccaattgaggtgaatcttgaagaattaaaaaccaaagaatgggacaaagaaagactttatcagattttacttcaacttgagtttaaaagctttattaaaagactgggcttttcagaagagattaactatgcaaggcagaactttcagctacctgaatttagtattaaagaacttcgtgatgtttcagcaatagggggcaaagaaatctatctattgtactcagatgaagaaggacttttttatatttatgaccatcaaacctcaaccatttttacaacttctgataaggaagctattaaagatcttttaacactccaaagcattcaaaaggttgtatatgatttaaaaaatatactccataaggtggactttgatgaagctaatcagataaaaaattgtaatgatgttatgttggcttcatatgttttggacagtacacgcagttcgtacgatttggaaacattgtttatttcttatctcaacactgatatagctgcaatcaaagagaatagatgggctggtgctacagttttattaagaaatctttgggatgaactttcaaaactcattgatttaaactcggcccaatacgtttatgagagcatagagatgcctcttgttcccattttatatgaaatggagaaaatcggttttaaggttgacaaaaacactttgcaggagtatacaaaagagattgagagcaagcttttaaagttggaatcacagatttatcaaatagccggtgaatggtttaacataaactcgccaaaacaactctcatatatattattcgaaaaactgaagcttccggttgttaaaaagaccaaaacaggatattcaacagatgccgaggtattagaagagctgtatgataaacatgacataataccgcttattctggattatagaatgtatacgaaaatactgacaacttactgtcagggactggttcaggcaataaatcctgcaactggaagaattcataccaactttattcagacaggtacggcaactggaagacttgcaagtgcagagcccaatctgcaaaatattcctgtaaaatatgatgagggaaagctaataagaaaggcatttgttccagatgaaggttatgtgttgatagatgctgattattctcagattgagcttagaatacttgcacatatctctgaggatgaacgactgataaatgcttttaaaaataaccttgatattcattcacagacggcggcagagatctttggtgtggatataagtcaggttacaccaattatgcgaagccaggcaaaagcagttaactttggaattgtatatggtatatctgattatggactttcacgggatataaagatttcaagaaaagaagcagccgagtttattaatcgttattttgaaaagtatcccagagtaaaagaatatttggacaatgtcgtcaagtttgcccgtgaaaacggatttgttttgacaatatttaacaggaaaaggtatatccgtgatataaagtctactaataaaaacctgagaaactatgcagagagaatagcaatgaattcacctatccagggaagtgctgcagatattatgaaaatagcaatgataagagtttataaaaagctaaaagaaaacaatttaaaatcaagaattattctgcaggtccatgacgaacttttgattgaatcaccctatgaagagaaagagatagtaaaggaaatagtaaaatcggagatggaaaatgcggttttattgaaagttcctttggtagttgaagtgaaagaaggttcaaattggtatgaaacaaagtaaaggatcc

SEQ ID NO: 1522 - DNA, 2623 bp, Artificial Sequence
  Description of Artificial Sequence: Synthetic DNA sequence of Caldicellulosiruptor TOK13B DNA Polymerase K769N
atgaaatacctgctgccgaccgctgctgctggtctgctgctcctcgctgcccagccggcgatggccatggaatttgttatttttgatgggaatagtattctgtatagagctttttttgccttgccacagcttactacctcaacaggcatacctacaaatgctatatatggttttttgaatgtgctgttaaaatacttagattctgaaaaaccggattatgtagcagtagcttttgacaaaaaaggcagagctgtccgaaaaagtgaatatgaagaatacaaggctaacagaaaaccgatgccagattctcttcaggttcagataccttacgtaagagaaatacttgctgctctgaacattcctgtactgaaatgtgaagggtatgaagctgatgacgttataggcacacttgtaaatagatttaaagcccaggatttagagattgtgataataaccggagacagagatacacttcagttacttgataaaaatgtaattgtcaaaatagtcacaacaaggtttgacaggacaactgaagatttgtatgctgtagaaaatgtaaaagaaaaatatggtgtttttgcgcatcaggttgttgactataaagcattagtaggtgatgcgtcagacaatataccaggtgttaagggaattggagataaaactgccataaagctgttagaagagtaccagactctggagaatatatatcagaatctaaataacattaaaggagcgctaaaagagaagttggaatcaggaaaagacatggcatttttatcaaaaagactggctactatcatatgcgatttaccaattgaggtgaatcttgaagaattaaaaaccaaagaatgggacaaagaaagactttatcagattttacttcaacttgagtttaaaagctttattaaaagactgggcttttcagaagagattaactatgcaaggcagaactttcagctacctgaatttagtattaaagaacttcgtgatgtttcagcaatagggggcaaagaaatctatctattgtactcagatgaagaaggacttttttatatttatgaccatcaaacctcaaccatttttacaacttctgataaggaagctattaaagatcttttaacactccaaagcattcaaaaggttgtatatgatttaaaaaatatactccataaggtggactttgatgaagctaatcagataaaaaattgtaatgatgttatgttggcttcatatgttttggacagtacacgcagttcgtacgatttggaaacattgtttatttcttatctcaacactgatatagctgcaatcaaagagaatagatgggctggtgctacagttttattaagaaatctttgggatgaactttcaaaactcattgatttaaactcggcccaatacgtttatgagagcatagagatgcctcttgttcccattttatatgaaatggagaaaatcggttttaaggttgacaaaaacactttgcaggagtatacaaaagagattgagagcaagcttttaaagttggaatcacagatttatcaaatagccggtgaatggtttaacataaactcgccaaaacaactctcatatatattattcgaaaaactgaagcttccggttgttaaaaagaccaaaacaggatattcaacagatgccgaggtattagaagagctgtatgataaacatgacataataccgcttattctggattatagaatgtatacgaaaatactgacaacttactgtcagggactggttcaggcaataaatcctgcaactggaagaattcataccaactttattcagacaggtacggcaactggaagacttgcaagtgcagagcccaatctgcaaaatattcctgtaaaatatgatgagggaaagctaataagaaaggcatttgttccagatgaaggttatgtgttgatagatgctgattattctcagattgagcttagaatacttgcacatatctctgaggatgaacgactgataaatgcttttaaaaataaccttgatattcattcacagacggcggcagagatctttggtgtggatataagtcaggttacaccaattatgcgaagccaggcaaaagcagttaactttggaattgtatatggtatatctgattatggactttcacgggatataaagatttcaagaaaagaagcagccgagtttattaatcgttattttgaaaagtatcccagagtaaaagaatatttggacaatgtcgtcaagtttgcccgtgaaaacggatttgttttgacaatatttaacaggaaaaggtatatcaatgatataaagtctactaataaaaacctgagaaactatgcagagagaatagcaatgaattcacctatccagggaagtgctgcagatattatgaaaatagcaatgataagagtttataaaaagctaaaagaaaacaatttaaaatcaagaattattctgcaggtccatgacgaacttttgattgaatcaccctatgaagagaaagagatagtaaaggaaatagtaaaatcggagatggaaaatgcggttttattgaaagttcctttggtagttgaagtgaaagaaggttcaaattggtatgaaacaaagtaaaggatcc

SEQ ID NO: 1523 - DNA, 2623 bp, Artificial Sequence
  Description of Artificial Sequence: Synthetic DNA sequence of Caldicellulosiruptor TOK13B DNA Polymerase K769D
atgaaatacctgctgccgaccgctgctgctggtctgctgctcctcgctgcccagccggcgatggccatggaatttgttatttttgatgggaatagtattctgtatagagctttttttgccttgccacagcttactacctcaacaggcatacctacaaatgctatatatggttttttgaatgtgctgttaaaatacttagattctgaaaaaccggattatgtagcagtagcttttgacaaaaaaggcagagctgtccgaaaaagtgaatatgaagaatacaaggctaacagaaaaccgatgccagattctcttcaggttcagataccttacgtaagagaaatacttgctgctctgaacattcctgtactgaaatgtgaagggtatgaagctgatgacgttataggcacacttgtaaatagatttaaagcccaggatttagagattgtgataataaccggagacagagatacacttcagttacttgataaaaatgtaattgtcaaaatagtcacaacaaggtttgacaggacaactgaagatttgtatgctgtagaaaatgtaaaagaaaaatatggtgtttttgcgcatcaggttgttgactataaagcattagtaggtgatgcgtcagacaatataccaggtgttaagggaattggagataaaactgccataaagctgttagaagagtaccagactctggagaatatatatcagaatctaaataacattaaaggagcgctaaaagagaagttggaatcaggaaaagacatggcatttttatcaaaaagactggctactatcatatgcgatttaccaattgaggtgaatcttgaagaattaaaaaccaaagaatgggacaaagaaagactttatcagattttacttcaacttgagtttaaaagctttattaaaagactgggcttttcagaagagattaactatgcaaggcagaactttcagctacctgaatttagtattaaagaacttcgtgatgtttcagcaatagggggcaaagaaatctatctattgtactcagatgaagaaggacttttttatatttatgaccatcaaacctcaaccatttttacaacttctgataaggaagctattaaagatcttttaacactccaaagcattcaaaaggttgtatatgatttaaaaaatatactccataaggtggactttgatgaagctaatcagataaaaaattgtaatgatgttatgttggcttcatatgttttggacagtacacgcagttcgtacgatttggaaacattgtttatttcttatctcaacactgatatagctgcaatcaaagagaatagatgggctggtgctacagttttattaagaaatctttgggatgaactttcaaaactcattgatttaaactcggcccaatacgtttatgagagcatagagatgcctcttgttcccattttatatgaaatggagaaaatcggttttaaggttgacaaaaacactttgcaggagtatacaaaagagattgagagcaagcttttaaagttggaatcacagatttatcaaatagccggtgaatggtttaacataaactcgccaaaacaactctcatatatattattcgaaaaactgaagcttccggttgttaaaaagaccaaaacaggatattcaacagatgccgaggtattagaagagctgtatgataaacatgacataataccgcttattctggattatagaatgtatacgaaaatactgacaacttactgtcagggactggttcaggcaataaatcctgcaactggaagaattcataccaactttattcagacaggtacggcaactggaagacttgcaagtgcagagcccaatctgcaaaatattcctgtaaaatatgatgagggaaagctaataagaaaggcatttgttccagatgaaggttatgtgttgatagatgctgattattctcagattgagcttagaatacttgcacatatctctgaggatgaacgactgataaatgcttttaaaaataaccttgatattcattcacagacggcggcagagatctttggtgtggatataagtcaggttacaccaattatgcgaagccaggcaaaagcagttaactttggaattgtatatggtatatctgattatggactttcacgggatataaagatttcaagaaaagaagcagccgagtttattaatcgttattttgaaaagtatcccagagtaaaagaatatttggacaatgtcgtcaagtttgcccgtgaaaacggatttgttttgacaatatttaacaggaaaaggtatatcgatgatataaagtctactaataaaaacctgagaaactatgcagagagaatagcaatgaattcacctatccagggaagtgctgcagatattatgaaaatagcaatgataagagtttataaaaagctaaaagaaaacaatttaaaatcaagaattattctgcaggtccatgacgaacttttgattgaatcaccctatgaagagaaagagatagtaaaggaaatagtaaaatcggagatggaaaatgcggttttattgaaagttcctttggtagttgaagtgaaagaaggttcaaattggtatgaaacaaagtaaaggatcc

SEQ ID NO: 1524 - DNA, 2623 bp, Artificial Sequence
  Description of Artificial Sequence: Synthetic DNA sequence of Caldicellulosiruptor TOK13B DNA Polymerase K769C
atgaaatacctgctgccgaccgctgctgctggtctgctgctcctcgctgcccagccggcgatggccatggaatttgttatttttgatgggaatagtattctgtatagagctttttttgccttgccacagcttactacctcaacaggcatacctacaaatgctatatatggttttttgaatgtgctgttaaaatacttagattctgaaaaaccggattatgtagcagtagcttttgacaaaaaaggcagagctgtccgaaaaagtgaatatgaagaatacaaggctaacagaaaaccgatgccagattctcttcaggttcagataccttacgtaagagaaatacttgctgctctgaacattcctgtactgaaatgtgaagggtatgaagctgatgacgttataggcacacttgtaaatagatttaaagcccaggatttagagattgtgataataaccggagacagagatacacttcagttacttgataaaaatgtaattgtcaaaatagtcacaacaaggtttgacaggacaactgaagatttgtatgctgtagaaaatgtaaaagaaaaatatggtgtttttgcgcatcaggttgttgactataaagcattagtaggtgatgcgtcagacaatataccaggtgttaagggaattggagataaaactgccataaagctgttagaagagtaccagactctggagaatatatatcagaatctaaataacattaaaggagcgctaaaagagaagttggaatcaggaaaagacatggcatttttatcaaaaagactggctactatcatatgcgatttaccaattgaggtgaatcttgaagaattaaaaaccaaagaatgggacaaagaaagactttatcagattttacttcaacttgagtttaaaagctttattaaaagactgggcttttcagaagagattaactatgcaaggcagaactttcagctacctgaatttagtattaaagaacttcgtgatgtttcagcaatagggggcaaagaaatctatctattgtactcagatgaagaaggacttttttatatttatgaccatcaaacctcaaccatttttacaacttctgataaggaagctattaaagatcttttaacactccaaagcattcaaaaggttgtatatgatttaaaaaatatactccataaggtggactttgatgaagctaatcagataaaaaattgtaatgatgttatgttggcttcatatgttttggacagtacacgcagttcgtacgatttggaaacattgtttatttcttatctcaacactgatatagctgcaatcaaagagaatagatgggctggtgctacagttttattaagaaatctttgggatgaactttcaaaactcattgatttaaactcggcccaatacgtttatgagagcatagagatgcctcttgttcccattttatatgaaatggagaaaatcggttttaaggttgacaaaaacactttgcaggagtatacaaaagagattgagagcaagcttttaaagttggaatcacagatttatcaaatagccggtgaatggtttaacataaactcgccaaaacaactctcatatatattattcgaaaaactgaagcttccggttgttaaaaagaccaaaacaggatattcaacagatgccgaggtattagaagagctgtatgataaacatgacataataccgcttattctggattatagaatgtatacgaaaatactgacaacttactgtcagggactggttcaggcaataaatcctgcaactggaagaattcataccaactttattcagacaggtacggcaactggaagacttgcaagtgcagagcccaatctgcaaaatattcctgtaaaatatgatgagggaaagctaataagaaaggcatttgttccagatgaaggttatgtgttgatagatgctgattattctcagattgagcttagaatacttgcacatatctctgaggatgaacgactgataaatgcttttaaaaataaccttgatattcattcacagacggcggcagagatctttggtgtggatataagtcaggttacaccaattatgcgaagccaggcaaaagcagttaactttggaattgtatatggtatatctgattatggactttcacgggatataaagatttcaagaaaagaagcagccgagtttattaatcgttattttgaaaagtatcccagagtaaaagaatatttggacaatgtcgtcaagtttgcccgtgaaaacggatttgttttgacaatatttaacaggaaaaggtatatctgtgatataaagtctactaataaaaacctgagaaactatgcagagagaatagcaatgaattcacctatccagggaagtgctgcagatattatgaaaatagcaatgataagagtttataaaaagctaaaagaaaacaatttaaaatcaagaattattctgcaggtccatgacgaacttttgattgaatcaccctatgaagagaaagagatagtaaaggaaatagtaaaatcggagatggaaaatgcggttttattgaaagttcctttggtagttgaagtgaaagaaggttcaaattggtatgaaacaaagtaaaggatcc

SEQ ID NO: 1525 - DNA, 2623 bp, Artificial Sequence
  Description of Artificial Sequence: Synthetic DNA sequence of Caldicellulosiruptor TOK13B DNA Polymerase K769E
atgaaatacctgctgccgaccgctgctgctggtctgctgctcctcgctgcccagccggcgatggccatggaatttgttatttttgatgggaatagtattctgtatagagctttttttgccttgccacagcttactacctcaacaggcatacctacaaatgctatatatggttttttgaatgtgctgttaaaatacttagattctgaaaaaccggattatgtagcagtagcttttgacaaaaaaggcagagctgtccgaaaaagtgaatatgaagaatacaaggctaacagaaaaccgatgccagattctcttcaggttcagataccttacgtaagagaaatacttgctgctctgaacattcctgtactgaaatgtgaagggtatgaagctgatgacgttataggcacacttgtaaatagatttaaagcccaggatttagagattgtgataataaccggagacagagatacacttcagttacttgataaaaatgtaattgtcaaaatagtcacaacaaggtttgacaggacaactgaagatttgtatgctgtagaaaatgtaaaagaaaaatatggtgtttttgcgcatcaggttgttgactataaagcattagtaggtgatgcgtcagacaatataccaggtgttaagggaattggagataaaactgccataaagctgttagaagagtaccagactctggagaatatatatcagaatctaaataacattaaaggagcgctaaaagagaagttggaatcaggaaaagacatggcatttttatcaaaaagactggctactatcatatgcgatttaccaattgaggtgaatcttgaagaattaaaaaccaaagaatgggacaaagaaagactttatcagattttacttcaacttgagtttaaaagctttattaaaagactgggcttttcagaagagattaactatgcaaggcagaactttcagctacctgaatttagtattaaagaacttcgtgatgtttcagcaatagggggcaaagaaatctatctattgtactcagatgaagaaggacttttttatatttatgaccatcaaacctcaaccatttttacaacttctgataaggaagctattaaagatcttttaacactccaaagcattcaaaaggttgtatatgatttaaaaaatatactccataaggtggactttgatgaagctaatcagataaaaaattgtaatgatgttatgttggcttcatatgttttggacagtacacgcagttcgtacgatttggaaacattgtttatttcttatctcaacactgatatagctgcaatcaaagagaatagatgggctggtgctacagttttattaagaaatctttgggatgaactttcaaaactcattgatttaaactcggcccaatacgtttatgagagcatagagatgcctcttgttcccattttatatgaaatggagaaaatcggttttaaggttgacaaaaacactttgcaggagtatacaaaagagattgagagcaagcttttaaagttggaatcacagatttatcaaatagccggtgaatggtttaacataaactcgccaaaacaactctcatatatattattcgaaaaactgaagcttccggttgttaaaaagaccaaaacaggatattcaacagatgccgaggtattagaagagctgtatgataaacatgacataataccgcttattctggattatagaatgtatacgaaaatactgacaacttactgtcagggactggttcaggcaataaatcctgcaactggaagaattcataccaactttattcagacaggtacggcaactggaagacttgcaagtgcagagcccaatctgcaaaatattcctgtaaaatatgatgagggaaagctaataagaaaggcatttgttccagatgaaggttatgtgttgatagatgctgattattctcagattgagcttagaatacttgcacatatctctgaggatgaacgactgataaatgcttttaaaaataaccttgatattcattcacagacggcggcagagatctttggtgtggatataagtcaggttacaccaattatgcgaagccaggcaaaagcagttaactttggaattgtatatggtatatctgattatggactttcacgggatataaagatttcaagaaaagaagcagccgagtttattaatcgttattttgaaaagtatcccagagtaaaagaatatttggacaatgtcgtcaagtttgcccgtgaaaacggatttgttttgacaatatttaacaggaaaaggtatatcgaagatataaagtctactaataaaaacctgagaaactatgcagagagaatagcaatgaattcacctatccagggaagtgctgcagatattatgaaaatagcaatgataagagtttataaaaagctaaaagaaaacaatttaaaatcaagaattattctgcaggtccatgacgaacttttgattgaatcaccctatgaagagaaagagatagtaaaggaaatagtaaaatcggagatggaaaatgcggttttattgaaagttcctttggtagttgaagtgaaagaaggttcaaattggtatgaaacaaagtaaaggatcc

SEQ ID NO: 1526 - DNA, 2623 bp, Artificial Sequence
  Description of Artificial Sequence: Synthetic DNA sequence of Caldicellulosiruptor TOK13B DNA Polymerase K769Q
atgaaatacctgctgccgaccgctgctgctggtctgctgctcctcgctgcccagccggcgatggccatggaatttgttatttttgatgggaatagtattctgtatagagctttttttgccttgccacagcttactacctcaacaggcatacctacaaatgctatatatggttttttgaatgtgctgttaaaatacttagattctgaaaaaccggattatgtagcagtagcttttgacaaaaaaggcagagctgtccgaaaaagtgaatatgaagaatacaaggctaacagaaaaccgatgccagattctcttcaggttcagataccttacgtaagagaaatacttgctgctctgaacattcctgtactgaaatgtgaagggtatgaagctgatgacgttataggcacacttgtaaatagatttaaagcccaggatttagagattgtgataataaccggagacagagatacacttcagttacttgataaaaatgtaattgtcaaaatagtcacaacaaggtttgacaggacaactgaagatttgtatgctgtagaaaatgtaaaagaaaaatatggtgtttttgcgcatcaggttgttgactataaagcattagtaggtgatgcgtcagacaatataccaggtgttaagggaattggagataaaactgccataaagctgttagaagagtaccagactctggagaatatatatcagaatctaaataacattaaaggagcgctaaaagagaagttggaatcaggaaaagacatggcatttttatcaaaaagactggctactatcatatgcgatttaccaattgaggtgaatcttgaagaattaaaaaccaaagaatgggacaaagaaagactttatcagattttacttcaacttgagtttaaaagctttattaaaagactgggcttttcagaagagattaactatgcaaggcagaactttcagctacctgaatttagtattaaagaacttcgtgatgtttcagcaatagggggcaaagaaatctatctattgtactcagatgaagaaggacttttttatatttatgaccatcaaacctcaaccatttttacaacttctgataaggaagctattaaagatcttttaacactccaaagcattcaaaaggttgtatatgatttaaaaaatatactccataaggtggactttgatgaagctaatcagataaaaaattgtaatgatgttatgttggcttcatatgttttggacagtacacgcagttcgtacgatttggaaacattgtttatttcttatctcaacactgatatagctgcaatcaaagagaatagatgggctggtgctacagttttattaagaaatctttgggatgaactttcaaaactcattgatttaaactcggcccaatacgtttatgagagcatagagatgcctcttgttcccattttatatgaaatggagaaaatcggttttaaggttgacaaaaacactttgcaggagtatacaaaagagattgagagcaagcttttaaagttggaatcacagatttatcaaatagccggtgaatggtttaacataaactcgccaaaacaactctcatatatattattcgaaaaactgaagcttccggttgttaaaaagaccaaaacaggatattcaacagatgccgaggtattagaagagctgtatgataaacatgacataataccgcttattctggattatagaatgtatacgaaaatactgacaacttactgtcagggactggttcaggcaataaatcctgcaactggaagaattcataccaactttattcagacaggtacggcaactggaagacttgcaagtgcagagcccaatctgcaaaatattcctgtaaaatatgatgagggaaagctaataagaaaggcatttgttccagatgaaggttatgtgttgatagatgctgattattctcagattgagcttagaatacttgcacatatctctgaggatgaacgactgataaatgcttttaaaaataaccttgatattcattcacagacggcggcagagatctttggtgtggatataagtcaggttacaccaattatgcgaagccaggcaaaagcagttaactttggaattgtatatggtatatctgattatggactttcacgggatataaagatttcaagaaaagaagcagccgagtttattaatcgttattttgaaaagtatcccagagtaaaagaatatttggacaatgtcgtcaagtttgcccgtgaaaacggatttgttttgacaatatttaacaggaaaaggtatatccaagatataaagtctactaataaaaacctgagaaactatgcagagagaatagcaatgaattcacctatccagggaagtgctgcagatattatgaaaatagcaatgataagagtttataaaaagctaaaagaaaacaatttaaaatcaagaattattctgcaggtccatgacgaacttttgattgaatcaccctatgaagagaaagagatagtaaaggaaatagtaaaatcggagatggaaaatgcggttttattgaaagttcctttggtagttgaagtgaaagaaggttcaaattggtatgaaacaaagtaaaggatcc

SEQ ID NO: 1527 - DNA, 2623 bp, Artificial Sequence
  Description of Artificial Sequence: Synthetic DNA sequence of Caldicellulosiruptor TOK13B DNA Polymerase K769G
atgaaatacctgctgccgaccgctgctgctggtctgctgctcctcgctgcccagccggcgatggccatggaatttgttatttttgatgggaatagtattctgtatagagctttttttgccttgccacagcttactacctcaacaggcatacctacaaatgctatatatggttttttgaatgtgctgttaaaatacttagattctgaaaaaccggattatgtagcagtagcttttgacaaaaaaggcagagctgtccgaaaaagtgaatatgaagaatacaaggctaacagaaaaccgatgccagattctcttcaggttcagataccttacgtaagagaaatacttgctgctctgaacattcctgtactgaaatgtgaagggtatgaagctgatgacgttataggcacacttgtaaatagatttaaagcccaggatttagagattgtgataataaccggagacagagatacacttcagttacttgataaaaatgtaattgtcaaaatagtcacaacaaggtttgacaggacaactgaagatttgtatgctgtagaaaatgtaaaagaaaaatatggtgtttttgcgcatcaggttgttgactataaagcattagtaggtgatgcgtcagacaatataccaggtgttaagggaattggagataaaactgccataaagctgttagaagagtaccagactctggagaatatatatcagaatctaaataacattaaaggagcgctaaaagagaagttggaatcaggaaaagacatggcatttttatcaaaaagactggctactatcatatgcgatttaccaattgaggtgaatcttgaagaattaaaaaccaaagaatgggacaaagaaagactttatcagattttacttcaacttgagtttaaaagctttattaaaagactgggcttttcagaagagattaactatgcaaggcagaactttcagctacctgaatttagtattaaagaacttcgtgatgtttcagcaatagggggcaaagaaatctatctattgtactcagatgaagaaggacttttttatatttatgaccatcaaacctcaaccatttttacaacttctgataaggaagctattaaagatcttttaacactccaaagcattcaaaaggttgtatatgatttaaaaaatatactccataaggtggactttgatgaagctaatcagataaaaaattgtaatgatgttatgttggcttcatatgttttggacagtacacgcagttcgtacgatttggaaacattgtttatttcttatctcaacactgatatagctgcaatcaaagagaatagatgggctggtgctacagttttattaagaaatctttgggatgaactttcaaaactcattgatttaaactcggcccaatacgtttatgagagcatagagatgcctcttgttcccattttatatgaaatggagaaaatcggttttaaggttgacaaaaacactttgcaggagtatacaaaagagattgagagcaagcttttaaagttggaatcacagatttatcaaatagccggtgaatggtttaacataaactcgccaaaacaactctcatatatattattcgaaaaactgaagcttccggttgttaaaaagaccaaaacaggatattcaacagatgccgaggtattagaagagctgtatgataaacatgacataataccgcttattctggattatagaatgtatacgaaaatactgacaacttactgtcagggactggttcaggcaataaatcctgcaactggaagaattcataccaactttattcagacaggtacggcaactggaagacttgcaagtgcagagcccaatctgcaaaatattcctgtaaaatatgatgagggaaagctaataagaaaggcatttgttccagatgaaggttatgtgttgatagatgctgattattctcagattgagcttagaatacttgcacatatctctgaggatgaacgactgataaatgcttttaaaaataaccttgatattcattcacagacggcggcagagatctttggtgtggatataagtcaggttacaccaattatgcgaagccaggcaaaagcagttaactttggaattgtatatggtatatctgattatggactttcacgggatataaagatttcaagaaaagaagcagccgagtttattaatcgttattttgaaaagtatcccagagtaaaagaatatttggacaatgtcgtcaagtttgcccgtgaaaacggatttgttttgacaatatttaacaggaaaaggtatatcggtgatataaagtctactaataaaaacctgagaaactatgcagagagaatagcaatgaattcacctatccagggaagtgctgcagatattatgaaaatagcaatgataagagtttataaaaagctaaaagaaaacaatttaaaatcaagaattattctgcaggtccatgacgaacttttgattgaatcaccctatgaagagaaagagatagtaaaggaaatagtaaaatcggagatggaaaatgcggttttattgaaagttcctttggtagttgaagtgaaagaaggttcaaattggtatgaaacaaagtaaaggatcc

SEQ ID NO: 1528 - DNA, 2623 bp, Artificial Sequence
  Description of Artificial Sequence: Synthetic DNA sequence of Caldicellulosiruptor TOK13B DNA Polymerase K769H
atgaaatacctgctgccgaccgctgctgctggtctgctgctcctcgctgcccagccggcgatggccatggaatttgttatttttgatgggaatagtattctgtatagagctttttttgccttgccacagcttactacctcaacaggcatacctacaaatgctatatatggttttttgaatgtgctgttaaaatacttagattctgaaaaaccggattatgtagcagtagcttttgacaaaaaaggcagagctgtccgaaaaagtgaatatgaagaatacaaggctaacagaaaaccgatgccagattctcttcaggttcagataccttacgtaagagaaatacttgctgctctgaacattcctgtactgaaatgtgaagggtatgaagctgatgacgttataggcacacttgtaaatagatttaaagcccaggatttagagattgtgataataaccggagacagagatacacttcagttacttgataaaaatgtaattgtcaaaatagtcacaacaaggtttgacaggacaactgaagatttgtatgctgtagaaaatgtaaaagaaaaatatggtgtttttgcgcatcaggttgttgactataaagcattagtaggtgatgcgtcagacaatataccaggtgttaagggaattggagataaaactgccataaagctgttagaagagtaccagactctggagaatatatatcagaatctaaataacattaaaggagcgctaaaagagaagttggaatcaggaaaagacatggcatttttatcaaaaagactggctactatcatatgcgatttaccaattgaggtgaatcttgaagaattaaaaaccaaagaatgggacaaagaaagactttatcagattttacttcaacttgagtttaaaagctttattaaaagactgggcttttcagaagagattaactatgcaaggcagaactttcagctacctgaatttagtattaaagaacttcgtgatgtttcagcaatagggggcaaagaaatctatctattgtactcagatgaagaaggacttttttatatttatgaccatcaaacctcaaccatttttacaacttctgataaggaagctattaaagatcttttaacactccaaagcattcaaaaggttgtatatgatttaaaaaatatactccataaggtggactttgatgaagctaatcagataaaaaattgtaatgatgttatgttggcttcatatgttttggacagtacacgcagttcgtacgatttggaaacattgtttatttcttatctcaacactgatatagctgcaatcaaagagaatagatgggctggtgctacagttttattaagaaatctttgggatgaactttcaaaactcattgatttaaactcggcccaatacgtttatgagagcatagagatgcctcttgttcccattttatatgaaatggagaaaatcggttttaaggttgacaaaaacactttgcaggagtatacaaaagagattgagagcaagcttttaaagttggaatcacagatttatcaaatagccggtgaatggtttaacataaactcgccaaaacaactctcatatatattattcgaaaaactgaagcttccggttgttaaaaagaccaaaacaggatattcaacagatgccgaggtattagaagagctgtatgataaacatgacataataccgcttattctggattatagaatgtatacgaaaatactgacaacttactgtcagggactggttcaggcaataaatcctgcaactggaagaattcataccaactttattcagacaggtacggcaactggaagacttgcaagtgcagagcccaatctgcaaaatattcctgtaaaatatgatgagggaaagctaataagaaaggcatttgttccagatgaaggttatgtgttgatagatgctgattattctcagattgagcttagaatacttgcacatatctctgaggatgaacgactgataaatgcttttaaaaataaccttgatattcattcacagacggcggcagagatctttggtgtggatataagtcaggttacaccaattatgcgaagccaggcaaaagcagttaactttggaattgtatatggtatatctgattatggactttcacgggatataaagatttcaagaaaagaagcagccgagtttattaatcgttattttgaaaagtatcccagagtaaaagaatatttggacaatgtcgtcaagtttgcccgtgaaaacggatttgttttgacaatatttaacaggaaaaggtatatccatgatataaagtctactaataaaaacctgagaaactatgcagagagaatagcaatgaattcacctatccagggaagtgctgcagatattatgaaaatagcaatgataagagtttataaaaagctaaaagaaaacaatttaaaatcaagaattattctgcaggtccatgacgaacttttgattgaatcaccctatgaagagaaagagatagtaaaggaaatagtaaaatcggagatggaaaatgcggttttattgaaagttcctttggtagttgaagtgaaagaaggttcaaattggtatgaaacaaagtaaaggatcc

SEQ ID NO: 1529 - DNA, 2623 bp, Artificial Sequence
  Description of Artificial Sequence: Synthetic DNA sequence of Caldicellulosiruptor TOK13B DNA Polymerase K769I
atgaaatacctgctgccgaccgctgctgctggtctgctgctcctcgctgcccagccggcgatggccatggaatttgttatttttgatgggaatagtattctgtatagagctttttttgccttgccacagcttactacctcaacaggcatacctacaaatgctatatatggttttttgaatgtgctgttaaaatacttagattctgaaaaaccggattatgtagcagtagcttttgacaaaaaaggcagagctgtccgaaaaagtgaatatgaagaatacaaggctaacagaaaaccgatgccagattctcttcaggttcagataccttacgtaagagaaatacttgctgctctgaacattcctgtactgaaatgtgaagggtatgaagctgatgacgttataggcacacttgtaaatagatttaaagcccaggatttagagattgtgataataaccggagacagagatacacttcagttacttgataaaaatgtaattgtcaaaatagtcacaacaaggtttgacaggacaactgaagatttgtatgctgtagaaaatgtaaaagaaaaatatggtgtttttgcgcatcaggttgttgactataaagcattagtaggtgatgcgtcagacaatataccaggtgttaagggaattggagataaaactgccataaagctgttagaagagtaccagactctggagaatatatatcagaatctaaataacattaaaggagcgctaaaagagaagttggaatcaggaaaagacatggcatttttatcaaaaagactggctactatcatatgcgatttaccaattgaggtgaatcttgaagaattaaaaaccaaagaatgggacaaagaaagactttatcagattttacttcaacttgagtttaaaagctttattaaaagactgggcttttcagaagagattaactatgcaaggcagaactttcagctacctgaatttagtattaaagaacttcgtgatgtttcagcaatagggggcaaagaaatctatctattgtactcagatgaagaaggacttttttatatttatgaccatcaaacctcaaccatttttacaacttctgataaggaagctattaaagatcttttaacactccaaagcattcaaaaggttgtatatgatttaaaaaatatactccataaggtggactttgatgaagctaatcagataaaaaattgtaatgatgttatgttggcttcatatgttttggacagtacacgcagttcgtacgatttggaaacattgtttatttcttatctcaacactgatatagctgcaatcaaagagaatagatgggctggtgctacagttttattaagaaatctttgggatgaactttcaaaactcattgatttaaactcggcccaatacgtttatgagagcatagagatgcctcttgttcccattttatatgaaatggagaaaatcggttttaaggttgacaaaaacactttgcaggagtatacaaaagagattgagagcaagcttttaaagttggaatcacagatttatcaaatagccggtgaatggtttaacataaactcgccaaaacaactctcatatatattattcgaaaaactgaagcttccggttgttaaaaagaccaaaacaggatattcaacagatgccgaggtattagaagagctgtatgataaacatgacataataccgcttattctggattatagaatgtatacgaaaatactgacaacttactgtcagggactggttcaggcaataaatcctgcaactggaagaattcataccaactttattcagacaggtacggcaactggaagacttgcaagtgcagagcccaatctgcaaaatattcctgtaaaatatgatgagggaaagctaataagaaaggcatttgttccagatgaaggttatgtgttgatagatgctgattattctcagattgagcttagaatacttgcacatatctctgaggatgaacgactgataaatgcttttaaaaataaccttgatattcattcacagacggcggcagagatctttggtgtggatataagtcaggttacaccaattatgcgaagccaggcaaaagcagttaactttggaattgtatatggtatatctgattatggactttcacgggatataaagatttcaagaaaagaagcagccgagtttattaatcgttattttgaaaagtatcccagagtaaaagaatatttggacaatgtcgtcaagtttgcccgtgaaaacggatttgttttgacaatatttaacaggaaaaggtatatcattgatataaagtctactaataaaaacctgagaaactatgcagagagaatagcaatgaattcacctatccagggaagtgctgcagatattatgaaaatagcaatgataagagtttataaaaagctaaaagaaaacaatttaaaatcaagaattattctgcaggtccatgacgaacttttgattgaatcaccctatgaagagaaagagatagtaaaggaaatagtaaaatcggagatggaaaatgcggttttattgaaagttcctttggtagttgaagtgaaagaaggttcaaattggtatgaaacaaagtaaaggatcc

SEQ ID NO: 1530 - DNA, 2623 bp, Artificial Sequence
  Description of Artificial Sequence: Synthetic DNA sequence of Caldicellulosiruptor TOK13B DNA Polymerase K769L
atgaaatacctgctgccgaccgctgctgctggtctgctgctcctcgctgcccagccggcgatggccatggaatttgttatttttgatgggaatagtattctgtatagagctttttttgccttgccacagcttactacctcaacaggcatacctacaaatgctatatatggttttttgaatgtgctgttaaaatacttagattctgaaaaaccggattatgtagcagtagcttttgacaaaaaaggcagagctgtccgaaaaagtgaatatgaagaatacaaggctaacagaaaaccgatgccagattctcttcaggttcagataccttacgtaagagaaatacttgctgctctgaacattcctgtactgaaatgtgaagggtatgaagctgatgacgttataggcacacttgtaaatagatttaaagcccaggatttagagattgtgataataaccggagacagagatacacttcagttacttgataaaaatgtaattgtcaaaatagtcacaacaaggtttgacaggacaactgaagatttgtatgctgtagaaaatgtaaaagaaaaatatggtgtttttgcgcatcaggttgttgactataaagcattagtaggtgatgcgtcagacaatataccaggtgttaagggaattggagataaaactgccataaagctgttagaagagtaccagactctggagaatatatatcagaatctaaataacattaaaggagcgctaaaagagaagttggaatcaggaaaagacatggcatttttatcaaaaagactggctactatcatatgcgatttaccaattgaggtgaatcttgaagaattaaaaaccaaagaatgggacaaagaaagactttatcagattttacttcaacttgagtttaaaagctttattaaaagactgggcttttcagaagagattaactatgcaaggcagaactttcagctacctgaatttagtattaaagaacttcgtgatgtttcagcaatagggggcaaagaaatctatctattgtactcagatgaagaaggacttttttatatttatgaccatcaaacctcaaccatttttacaacttctgataaggaagctattaaagatcttttaacactccaaagcattcaaaaggttgtatatgatttaaaaaatatactccataaggtggactttgatgaagctaatcagataaaaaattgtaatgatgttatgttggcttcatatgttttggacagtacacgcagttcgtacgatttggaaacattgtttatttcttatctcaacactgatatagctgcaatcaaagagaatagatgggctggtgctacagttttattaagaaatctttgggatgaactttcaaaactcattgatttaaactcggcccaatacgtttatgagagcatagagatgcctcttgttcccattttatatgaaatggagaaaatcggttttaaggttgacaaaaacactttgcaggagtatacaaaagagattgagagcaagcttttaaagttggaatcacagatttatcaaatagccggtgaatggtttaacataaactcgccaaaacaactctcatatatattattcgaaaaactgaagcttccggttgttaaaaagaccaaaacaggatattcaacagatgccgaggtattagaagagctgtatgataaacatgacataataccgcttattctggattatagaatgtatacgaaaatactgacaacttactgtcagggactggttcaggcaataaatcctgcaactggaagaattcataccaactttattcagacaggtacggcaactggaagacttgcaagtgcagagcccaatctgcaaaatattcctgtaaaatatgatgagggaaagctaataagaaaggcatttgttccagatgaaggttatgtgttgatagatgctgattattctcagattgagcttagaatacttgcacatatctctgaggatgaacgactgataaatgcttttaaaaataaccttgatattcattcacagacggcggcagagatctttggtgtggatataagtcaggttacaccaattatgcgaagccaggcaaaagcagttaactttggaattgtatatggtatatctgattatggactttcacgggatataaagatttcaagaaaagaagcagccgagtttattaatcgttattttgaaaagtatcccagagtaaaagaatatttggacaatgtcgtcaagtttgcccgtgaaaacggatttgttttgacaatatttaacaggaaaaggtatatccttgatataaagtctactaataaaaacctgagaaactatgcagagagaatagcaatgaattcacctatccagggaagtgctgcagatattatgaaaatagcaatgataagagtttataaaaagctaaaagaaaacaatttaaaatcaagaattattctgcaggtccatgacgaacttttgattgaatcaccctatgaagagaaagagatagtaaaggaaatagtaaaatcggagatggaaaatgcggttttattgaaagttcctttggtagttgaagtgaaagaaggttcaaattggtatgaaacaaagtaaaggatcc

SEQ ID NO: 1531 - DNA, 2623 bp, Artificial Sequence
  Description of Artificial Sequence: Synthetic DNA sequence of Caldicellulosiruptor TOK13B DNA Polymerase K769M
atgaaatacctgctgccgaccgctgctgctggtctgctgctcctcgctgcccagccggcgatggccatggaatttgttatttttgatgggaatagtattctgtatagagctttttttgccttgccacagcttactacctcaacaggcatacctacaaatgctatatatggttttttgaatgtgctgttaaaatacttagattctgaaaaaccggattatgtagcagtagcttttgacaaaaaaggcagagctgtccgaaaaagtgaatatgaagaatacaaggctaacagaaaaccgatgccagattctcttcaggttcagataccttacgtaagagaaatacttgctgctctgaacattcctgtactgaaatgtgaagggtatgaagctgatgacgttataggcacacttgtaaatagatttaaagcccaggatttagagattgtgataataaccggagacagagatacacttcagttacttgataaaaatgtaattgtcaaaatagtcacaacaaggtttgacaggacaactgaagatttgtatgctgtagaaaatgtaaaagaaaaatatggtgtttttgcgcatcaggttgttgactataaagcattagtaggtgatgcgtcagacaatataccaggtgttaagggaattggagataaaactgccataaagctgttagaagagtaccagactctggagaatatatatcagaatctaaataacattaaaggagcgctaaaagagaagttggaatcaggaaaagacatggcatttttatcaaaaagactggctactatcatatgcgatttaccaattgaggtgaatcttgaagaattaaaaaccaaagaatgggacaaagaaagactttatcagattttacttcaacttgagtttaaaagctttattaaaagactgggcttttcagaagagattaactatgcaaggcagaactttcagctacctgaatttagtattaaagaacttcgtgatgtttcagcaatagggggcaaagaaatctatctattgtactcagatgaagaaggacttttttatatttatgaccatcaaacctcaaccatttttacaacttctgataaggaagctattaaagatcttttaacactccaaagcattcaaaaggttgtatatgatttaaaaaatatactccataaggtggactttgatgaagctaatcagataaaaaattgtaatgatgttatgttggcttcatatgttttggacagtacacgcagttcgtacgatttggaaacattgtttatttcttatctcaacactgatatagctgcaatcaaagagaatagatgggctggtgctacagttttattaagaaatctttgggatgaactttcaaaactcattgatttaaactcggcccaatacgtttatgagagcatagagatgcctcttgttcccattttatatgaaatggagaaaatcggttttaaggttgacaaaaacactttgcaggagtatacaaaagagattgagagcaagcttttaaagttggaatcacagatttatcaaatagccggtgaatggtttaacataaactcgccaaaacaactctcatatatattattcgaaaaactgaagcttccggttgttaaaaagaccaaaacaggatattcaacagatgccgaggtattagaagagctgtatgataaacatgacataataccgcttattctggattatagaatgtatacgaaaatactgacaacttactgtcagggactggttcaggcaataaatcctgcaactggaagaattcataccaactttattcagacaggtacggcaactggaagacttgcaagtgcagagcccaatctgcaaaatattcctgtaaaatatgatgagggaaagctaataagaaaggcatttgttccagatgaaggttatgtgttgatagatgctgattattctcagattgagcttagaatacttgcacatatctctgaggatgaacgactgataaatgcttttaaaaataaccttgatattcattcacagacggcggcagagatctttggtgtggatataagtcaggttacaccaattatgcgaagccaggcaaaagcagttaactttggaattgtatatggtatatctgattatggactttcacgggatataaagatttcaagaaaagaagcagccgagtttattaatcgttattttgaaaagtatcccagagtaaaagaatatttggacaatgtcgtcaagtttgcccgtgaaaacggatttgttttgacaatatttaacaggaaaaggtatatcatggatataaagtctactaataaaaacctgagaaactatgcagagagaatagcaatgaattcacctatccagggaagtgctgcagatattatgaaaatagcaatgataagagtttataaaaagctaaaagaaaacaatttaaaatcaagaattattctgcaggtccatgacgaacttttgattgaatcaccctatgaagagaaagagatagtaaaggaaatagtaaaatcggagatggaaaatgcggttttattgaaagttcctttggtagttgaagtgaaagaaggttcaaattggtatgaaacaaagtaaaggatcc

SEQ ID NO: 1532 - DNA, 2623 bp, Artificial Sequence
  Description of Artificial Sequence: Synthetic DNA sequence of Caldicellulosiruptor TOK13B DNA Polymerase K769F
atgaaatacctgctgccgaccgctgctgctggtctgctgctcctcgctgcccagccggcgatggccatggaatttgttatttttgatgggaatagtattctgtatagagctttttttgccttgccacagcttactacctcaacaggcatacctacaaatgctatatatggttttttgaatgtgctgttaaaatacttagattctgaaaaaccggattatgtagcagtagcttttgacaaaaaaggcagagctgtccgaaaaagtgaatatgaagaatacaaggctaacagaaaaccgatgccagattctcttcaggttcagataccttacgtaagagaaatacttgctgctctgaacattcctgtactgaaatgtgaagggtatgaagctgatgacgttataggcacacttgtaaatagatttaaagcccaggatttagagattgtgataataaccggagacagagatacacttcagttacttgataaaaatgtaattgtcaaaatagtcacaacaaggtttgacaggacaactgaagatttgtatgctgtagaaaatgtaaaagaaaaatatggtgtttttgcgcatcaggttgttgactataaagcattagtaggtgatgcgtcagacaatataccaggtgttaagggaattggagataaaactgccataaagctgttagaagagtaccagactctggagaatatatatcagaatctaaataacattaaaggagcgctaaaagagaagttggaatcaggaaaagacatggcatttttatcaaaaagactggctactatcatatgcgatttaccaattgaggtgaatcttgaagaattaaaaaccaaagaatgggacaaagaaagactttatcagattttacttcaacttgagtttaaaagctttattaaaagactgggcttttcagaagagattaactatgcaaggcagaactttcagctacctgaatttagtattaaagaacttcgtgatgtttcagcaatagggggcaaagaaatctatctattgtactcagatgaagaaggacttttttatatttatgaccatcaaacctcaaccatttttacaacttctgataaggaagctattaaagatcttttaacactccaaagcattcaaaaggttgtatatgatttaaaaaatatactccataaggtggactttgatgaagctaatcagataaaaaattgtaatgatgttatgttggcttcatatgttttggacagtacacgcagttcgtacgatttggaaacattgtttatttcttatctcaacactgatatagctgcaatcaaagagaatagatgggctggtgctacagttttattaagaaatctttgggatgaactttcaaaactcattgatttaaactcggcccaatacgtttatgagagcatagagatgcctcttgttcccattttatatgaaatggagaaaatcggttttaaggttgacaaaaacactttgcaggagtatacaaaagagattgagagcaagcttttaaagttggaatcacagatttatcaaatagccggtgaatggtttaacataaactcgccaaaacaactctcatatatattattcgaaaaactgaagcttccggttgttaaaaagaccaaaacaggatattcaacagatgccgaggtattagaagagctgtatgataaacatgacataataccgcttattctggattatagaatgtatacgaaaatactgacaacttactgtcagggactggttcaggcaataaatcctgcaactggaagaattcataccaactttattcagacaggtacggcaactggaagacttgcaagtgcagagcccaatctgcaaaatattcctgtaaaatatgatgagggaaagctaataagaaaggcatttgttccagatgaaggttatgtgttgatagatgctgattattctcagattgagcttagaatacttgcacatatctctgaggatgaacgactgataaatgcttttaaaaataaccttgatattcattcacagacggcggcagagatctttggtgtggatataagtcaggttacaccaattatgcgaagccaggcaaaagcagttaactttggaattgtatatggtatatctgattatggactttcacgggatataaagatttcaagaaaagaagcagccgagtttattaatcgttattttgaaaagtatcccagagtaaaagaatatttggacaatgtcgtcaagtttgcccgtgaaaacggatttgttttgacaatatttaacaggaaaaggtatatctttgatataaagtctactaataaaaacctgagaaactatgcagagagaatagcaatgaattcacctatccagggaagtgctgcagatattatgaaaatagcaatgataagagtttataaaaagctaaaagaaaacaatttaaaatcaagaattattctgcaggtccatgacgaacttttgattgaatcaccctatgaagagaaagagatagtaaaggaaatagtaaaatcggagatggaaaatgcggttttattgaaagttcctttggtagttgaagtgaaagaaggttcaaattggtatgaaacaaagtaaaggatcc

SEQ ID NO: 1533 - DNA, 2623 bp, Artificial Sequence
  Description of Artificial Sequence: Synthetic DNA sequence of Caldicellulosiruptor TOK13B DNA Polymerase K769P
atgaaatacctgctgccgaccgctgctgctggtctgctgctcctcgctgcccagccggcgatggccatggaatttgttatttttgatgggaatagtattctgtatagagctttttttgccttgccacagcttactacctcaacaggcatacctacaaatgctatatatggttttttgaatgtgctgttaaaatacttagattctgaaaaaccggattatgtagcagtagcttttgacaaaaaaggcagagctgtccgaaaaagtgaatatgaagaatacaaggctaacagaaaaccgatgccagattctcttcaggttcagataccttacgtaagagaaatacttgctgctctgaacattcctgtactgaaatgtgaagggtatgaagctgatgacgttataggcacacttgtaaatagatttaaagcccaggatttagagattgtgataataaccggagacagagatacacttcagttacttgataaaaatgtaattgtcaaaatagtcacaacaaggtttgacaggacaactgaagatttgtatgctgtagaaaatgtaaaagaaaaatatggtgtttttgcgcatcaggttgttgactataaagcattagtaggtgatgcgtcagacaatataccaggtgttaagggaattggagataaaactgccataaagctgttagaagagtaccagactctggagaatatatatcagaatctaaataacattaaaggagcgctaaaagagaagttggaatcaggaaaagacatggcatttttatcaaaaagactggctactatcatatgcgatttaccaattgaggtgaatcttgaagaattaaaaaccaaagaatgggacaaagaaagactttatcagattttacttcaacttgagtttaaaagctttattaaaagactgggcttttcagaagagattaactatgcaaggcagaactttcagctacctgaatttagtattaaagaacttcgtgatgtttcagcaatagggggcaaagaaatctatctattgtactcagatgaagaaggacttttttatatttatgaccatcaaacctcaaccatttttacaacttctgataaggaagctattaaagatcttttaacactccaaagcattcaaaaggttgtatatgatttaaaaaatatactccataaggtggactttgatgaagctaatcagataaaaaattgtaatgatgttatgttggcttcatatgttttggacagtacacgcagttcgtacgatttggaaacattgtttatttcttatctcaacactgatatagctgcaatcaaagagaatagatgggctggtgctacagttttattaagaaatctttgggatgaactttcaaaactcattgatttaaactcggcccaatacgtttatgagagcatagagatgcctcttgttcccattttatatgaaatggagaaaatcggttttaaggttgacaaaaacactttgcaggagtatacaaaagagattgagagcaagcttttaaagttggaatcacagatttatcaaatagccggtgaatggtttaacataaactcgccaaaacaactctcatatatattattcgaaaaactgaagcttccggttgttaaaaagaccaaaacaggatattcaacagatgccgaggtattagaagagctgtatgataaacatgacataataccgcttattctggattatagaatgtatacgaaaatactgacaacttactgtcagggactggttcaggcaataaatcctgcaactggaagaattcataccaactttattcagacaggtacggcaactggaagacttgcaagtgcagagcccaatctgcaaaatattcctgtaaaatatgatgagggaaagctaataagaaaggcatttgttccagatgaaggttatgtgttgatagatgctgattattctcagattgagcttagaatacttgcacatatctctgaggatgaacgactgataaatgcttttaaaaataaccttgatattcattcacagacggcggcagagatctttggtgtggatataagtcaggttacaccaattatgcgaagccaggcaaaagcagttaactttggaattgtatatggtatatctgattatggactttcacgggatataaagatttcaagaaaagaagcagccgagtttattaatcgttattttgaaaagtatcccagagtaaaagaatatttggacaatgtcgtcaagtttgcccgtgaaaacggatttgttttgacaatatttaacaggaaaaggtatatccctgatataaagtctactaataaaaacctgagaaactatgcagagagaatagcaatgaattcacctatccagggaagtgctgcagatattatgaaaatagcaatgataagagtttataaaaagctaaaagaaaacaatttaaaatcaagaattattctgcaggtccatgacgaacttttgattgaatcaccctatgaagagaaagagatagtaaaggaaatagtaaaatcggagatggaaaatgcggttttattgaaagttcctttggtagttgaagtgaaagaaggttcaaattggtatgaaacaaagtaaaggatcc

SEQ ID NO: 1534 - DNA, 2623 bp, Artificial Sequence
  Description of Artificial Sequence: Synthetic DNA sequence of Caldicellulosiruptor TOK13B DNA Polymerase K769S
atgaaatacctgctgccgaccgctgctgctggtctgctgctcctcgctgcccagccggcgatggccatggaatttgttatttttgatgggaatagtattctgtatagagctttttttgccttgccacagcttactacctcaacaggcatacctacaaatgctatatatggttttttgaatgtgctgttaaaatacttagattctgaaaaaccggattatgtagcagtagcttttgacaaaaaaggcagagctgtccgaaaaagtgaatatgaagaatacaaggctaacagaaaaccgatgccagattctcttcaggttcagataccttacgtaagagaaatacttgctgctctgaacattcctgtactgaaatgtgaagggtatgaagctgatgacgttataggcacacttgtaaatagatttaaagcccaggatttagagattgtgataataaccggagacagagatacacttcagttacttgataaaaatgtaattgtcaaaatagtcacaacaaggtttgacaggacaactgaagatttgtatgctgtagaaaatgtaaaagaaaaatatggtgtttttgcgcatcaggttgttgactataaagcattagtaggtgatgcgtcagacaatataccaggtgttaagggaattggagataaaactgccataaagctgttagaagagtaccagactctggagaatatatatcagaatctaaataacattaaaggagcgctaaaagagaagttggaatcaggaaaagacatggcatttttatcaaaaagactggctactatcatatgcgatttaccaattgaggtgaatcttgaagaattaaaaaccaaagaatgggacaaagaaagactttatcagattttacttcaacttgagtttaaaagctttattaaaagactgggcttttcagaagagattaactatgcaaggcagaactttcagctacctgaatttagtattaaagaacttcgtgatgtttcagcaatagggggcaaagaaatctatctattgtactcagatgaagaaggacttttttatatttatgaccatcaaacctcaaccatttttacaacttctgataaggaagctattaaagatcttttaacactccaaagcattcaaaaggttgtatatgatttaaaaaatatactccataaggtggactttgatgaagctaatcagataaaaaattgtaatgatgttatgttggcttcatatgttttggacagtacacgcagttcgtacgatttggaaacattgtttatttcttatctcaacactgatatagctgcaatcaaagagaatagatgggctggtgctacagttttattaagaaatctttgggatgaactttcaaaactcattgatttaaactcggcccaatacgtttatgagagcatagagatgcctcttgttcccattttatatgaaatggagaaaatcggttttaaggttgacaaaaacactttgcaggagtatacaaaagagattgagagcaagcttttaaagttggaatcacagatttatcaaatagccggtgaatggtttaacataaactcgccaaaacaactctcatatatattattcgaaaaactgaagcttccggttgttaaaaagaccaaaacaggatattcaacagatgccgaggtattagaagagctgtatgataaacatgacataataccgcttattctggattatagaatgtatacgaaaatactgacaacttactgtcagggactggttcaggcaataaatcctgcaactggaagaattcataccaactttattcagacaggtacggcaactggaagacttgcaagtgcagagcccaatctgcaaaatattcctgtaaaatatgatgagggaaagctaataagaaaggcatttgttccagatgaaggttatgtgttgatagatgctgattattctcagattgagcttagaatacttgcacatatctctgaggatgaacgactgataaatgcttttaaaaataaccttgatattcattcacagacggcggcagagatctttggtgtggatataagtcaggttacaccaattatgcgaagccaggcaaaagcagttaactttggaattgtatatggtatatctgattatggactttcacgggatataaagatttcaagaaaagaagcagccgagtttattaatcgttattttgaaaagtatcccagagtaaaagaatatttggacaatgtcgtcaagtttgcccgtgaaaacggatttgttttgacaatatttaacaggaaaaggtatatctctgatataaagtctactaataaaaacctgagaaactatgcagagagaatagcaatgaattcacctatccagggaagtgctgcagatattatgaaaatagcaatgataagagtttataaaaagctaaaagaaaacaatttaaaatcaagaattattctgcaggtccatgacgaacttttgattgaatcaccctatgaagagaaagagatagtaaaggaaatagtaaaatcggagatggaaaatgcggttttattgaaagttcctttggtagttgaagtgaaagaaggttcaaattggtatgaaacaaagtaaaggatcc

SEQ ID NO: 1535 - DNA, 2623 bp, Artificial Sequence
  Description of Artificial Sequence: Synthetic DNA sequence of Caldicellulosiruptor TOK13B DNA Polymerase K769T
atgaaatacctgctgccgaccgctgctgctggtctgctgctcctcgctgcccagccggcgatggccatggaatttgttatttttgatgggaatagtattctgtatagagctttttttgccttgccacagcttactacctcaacaggcatacctacaaatgctatatatggttttttgaatgtgctgttaaaatacttagattctgaaaaaccggattatgtagcagtagcttttgacaaaaaaggcagagctgtccgaaaaagtgaatatgaagaatacaaggctaacagaaaaccgatgccagattctcttcaggttcagataccttacgtaagagaaatacttgctgctctgaacattcctgtactgaaatgtgaagggtatgaagctgatgacgttataggcacacttgtaaatagatttaaagcccaggatttagagattgtgataataaccggagacagagatacacttcagttacttgataaaaatgtaattgtcaaaatagtcacaacaaggtttgacaggacaactgaagatttgtatgctgtagaaaatgtaaaagaaaaatatggtgtttttgcgcatcaggttgttgactataaagcattagtaggtgatgcgtcagacaatataccaggtgttaagggaattggagataaaactgccataaagctgttagaagagtaccagactctggagaatatatatcagaatctaaataacattaaaggagcgctaaaagagaagttggaatcaggaaaagacatggcatttttatcaaaaagactggctactatcatatgcgatttaccaattgaggtgaatcttgaagaattaaaaaccaaagaatgggacaaagaaagactttatcagattttacttcaacttgagtttaaaagctttattaaaagactgggcttttcagaagagattaactatgcaaggcagaactttcagctacctgaatttagtattaaagaacttcgtgatgtttcagcaatagggggcaaagaaatctatctattgtactcagatgaagaaggacttttttatatttatgaccatcaaacctcaaccatttttacaacttctgataaggaagctattaaagatcttttaacactccaaagcattcaaaaggttgtatatgatttaaaaaatatactccataaggtggactttgatgaagctaatcagataaaaaattgtaatgatgttatgttggcttcatatgttttggacagtacacgcagttcgtacgatttggaaacattgtttatttcttatctcaacactgatatagctgcaatcaaagagaatagatgggctggtgctacagttttattaagaaatctttgggatgaactttcaaaactcattgatttaaactcggcccaatacgtttatgagagcatagagatgcctcttgttcccattttatatgaaatggagaaaatcggttttaaggttgacaaaaacactttgcaggagtatacaaaagagattgagagcaagcttttaaagttggaatcacagatttatcaaatagccggtgaatggtttaacataaactcgccaaaacaactctcatatatattattcgaaaaactgaagcttccggttgttaaaaagaccaaaacaggatattcaacagatgccgaggtattagaagagctgtatgataaacatgacataataccgcttattctggattatagaatgtatacgaaaatactgacaacttactgtcagggactggttcaggcaataaatcctgcaactggaagaattcataccaactttattcagacaggtacggcaactggaagacttgcaagtgcagagcccaatctgcaaaatattcctgtaaaatatgatgagggaaagctaataagaaaggcatttgttccagatgaaggttatgtgttgatagatgctgattattctcagattgagcttagaatacttgcacatatctctgaggatgaacgactgataaatgcttttaaaaataaccttgatattcattcacagacggcggcagagatctttggtgtggatataagtcaggttacaccaattatgcgaagccaggcaaaagcagttaactttggaattgtatatggtatatctgattatggactttcacgggatataaagatttcaagaaaagaagcagccgagtttattaatcgttattttgaaaagtatcccagagtaaaagaatatttggacaatgtcgtcaagtttgcccgtgaaaacggatttgttttgacaatatttaacaggaaaaggtatatcactgatataaagtctactaataaaaacctgagaaactatgcagagagaatagcaatgaattcacctatccagggaagtgctgcagatattatgaaaatagcaatgataagagtttataaaaagctaaaagaaaacaatttaaaatcaagaattattctgcaggtccatgacgaacttttgattgaatcaccctatgaagagaaagagatagtaaaggaaatagtaaaatcggagatggaaaatgcggttttattgaaagttcctttggtagttgaagtgaaagaaggttcaaattggtatgaaacaaagtaaaggatcc

SEQ ID NO: 1536 - DNA, 2623 bp, Artificial Sequence
  Description of Artificial Sequence: Synthetic DNA sequence of Caldicellulosiruptor TOK13B DNA Polymerase K769W
atgaaatacctgctgccgaccgctgctgctggtctgctgctcctcgctgcccagccggcgatggccatggaatttgttatttttgatgggaatagtattctgtatagagctttttttgccttgccacagcttactacctcaacaggcatacctacaaatgctatatatggttttttgaatgtgctgttaaaatacttagattctgaaaaaccggattatgtagcagtagcttttgacaaaaaaggcagagctgtccgaaaaagtgaatatgaagaatacaaggctaacagaaaaccgatgccagattctcttcaggttcagataccttacgtaagagaaatacttgctgctctgaacattcctgtactgaaatgtgaagggtatgaagctgatgacgttataggcacacttgtaaatagatttaaagcccaggatttagagattgtgataataaccggagacagagatacacttcagttacttgataaaaatgtaattgtcaaaatagtcacaacaaggtttgacaggacaactgaagatttgtatgctgtagaaaatgtaaaagaaaaatatggtgtttttgcgcatcaggttgttgactataaagcattagtaggtgatgcgtcagacaatataccaggtgttaagggaattggagataaaactgccataaagctgttagaagagtaccagactctggagaatatatatcagaatctaaataacattaaaggagcgctaaaagagaagttggaatcaggaaaagacatggcatttttatcaaaaagactggctactatcatatgcgatttaccaattgaggtgaatcttgaagaattaaaaaccaaagaatgggacaaagaaagactttatcagattttacttcaacttgagtttaaaagctttattaaaagactgggcttttcagaagagattaactatgcaaggcagaactttcagctacctgaatttagtattaaagaacttcgtgatgtttcagcaatagggggcaaagaaatctatctattgtactcagatgaagaaggacttttttatatttatgaccatcaaacctcaaccatttttacaacttctgataaggaagctattaaagatcttttaacactccaaagcattcaaaaggttgtatatgatttaaaaaatatactccataaggtggactttgatgaagctaatcagataaaaaattgtaatgatgttatgttggcttcatatgttttggacagtacacgcagttcgtacgatttggaaacattgtttatttcttatctcaacactgatatagctgcaatcaaagagaatagatgggctggtgctacagttttattaagaaatctttgggatgaactttcaaaactcattgatttaaactcggcccaatacgtttatgagagcatagagatgcctcttgttcccattttatatgaaatggagaaaatcggttttaaggttgacaaaaacactttgcaggagtatacaaaagagattgagagcaagcttttaaagttggaatcacagatttatcaaatagccggtgaatggtttaacataaactcgccaaaacaactctcatatatattattcgaaaaactgaagcttccggttgttaaaaagaccaaaacaggatattcaacagatgccgaggtattagaagagctgtatgataaacatgacataataccgcttattctggattatagaatgtatacgaaaatactgacaacttactgtcagggactggttcaggcaataaatcctgcaactggaagaattcataccaactttattcagacaggtacggcaactggaagacttgcaagtgcagagcccaatctgcaaaatattcctgtaaaatatgatgagggaaagctaataagaaaggcatttgttccagatgaaggttatgtgttgatagatgctgattattctcagattgagcttagaatacttgcacatatctctgaggatgaacgactgataaatgcttttaaaaataaccttgatattcattcacagacggcggcagagatctttggtgtggatataagtcaggttacaccaattatgcgaagccaggcaaaagcagttaactttggaattgtatatggtatatctgattatggactttcacgggatataaagatttcaagaaaagaagcagccgagtttattaatcgttattttgaaaagtatcccagagtaaaagaatatttggacaatgtcgtcaagtttgcccgtgaaaacggatttgttttgacaatatttaacaggaaaaggtatatctgggatataaagtctactaataaaaacctgagaaactatgcagagagaatagcaatgaattcacctatccagggaagtgctgcagatattatgaaaatagcaatgataagagtttataaaaagctaaaagaaaacaatttaaaatcaagaattattctgcaggtccatgacgaacttttgattgaatcaccctatgaagagaaagagatagtaaaggaaatagtaaaatcggagatggaaaatgcggttttattgaaagttcctttggtagttgaagtgaaagaaggttcaaattggtatgaaacaaagtaaaggatcc

SEQ ID NO: 1537 - DNA, 2623 bp, Artificial Sequence
  Description of Artificial Sequence: Synthetic DNA sequence of Caldicellulosiruptor TOK13B DNA Polymerase K769Y
atgaaatacctgctgccgaccgctgctgctggtctgctgctcctcgctgcccagccggcgatggccatggaatttgttatttttgatgggaatagtattctgtatagagctttttttgccttgccacagcttactacctcaacaggcatacctacaaatgctatatatggttttttgaatgtgctgttaaaatacttagattctgaaaaaccggattatgtagcagtagcttttgacaaaaaaggcagagctgtccgaaaaagtgaatatgaagaatacaaggctaacagaaaaccgatgccagattctcttcaggttcagataccttacgtaagagaaatacttgctgctctgaacattcctgtactgaaatgtgaagggtatgaagctgatgacgttataggcacacttgtaaatagatttaaagcccaggatttagagattgtgataataaccggagacagagatacacttcagttacttgataaaaatgtaattgtcaaaatagtcacaacaaggtttgacaggacaactgaagatttgtatgctgtagaaaatgtaaaagaaaaatatggtgtttttgcgcatcaggttgttgactataaagcattagtaggtgatgcgtcagacaatataccaggtgttaagggaattggagataaaactgccataaagctgttagaagagtaccagactctggagaatatatatcagaatctaaataacattaaaggagcgctaaaagagaagttggaatcaggaaaagacatggcatttttatcaaaaagactggctactatcatatgcgatttaccaattgaggtgaatcttgaagaattaaaaaccaaagaatgggacaaagaaagactttatcagattttacttcaacttgagtttaaaagctttattaaaagactgggcttttcagaagagattaactatgcaaggcagaactttcagctacctgaatttagtattaaagaacttcgtgatgtttcagcaatagggggcaaagaaatctatctattgtactcagatgaagaaggacttttttatatttatgaccatcaaacctcaaccatttttacaacttctgataaggaagctattaaagatcttttaacactccaaagcattcaaaaggttgtatatgatttaaaaaatatactccataaggtggactttgatgaagctaatcagataaaaaattgtaatgatgttatgttggcttcatatgttttggacagtacacgcagttcgtacgatttggaaacattgtttatttcttatctcaacactgatatagctgcaatcaaagagaatagatgggctggtgctacagttttattaagaaatctttgggatgaactttcaaaactcattgatttaaactcggcccaatacgtttatgagagcatagagatgcctcttgttcccattttatatgaaatggagaaaatcggttttaaggttgacaaaaacactttgcaggagtatacaaaagagattgagagcaagcttttaaagttggaatcacagatttatcaaatagccggtgaatggtttaacataaactcgccaaaacaactctcatatatattattcgaaaaactgaagcttccggttgttaaaaagaccaaaacaggatattcaacagatgccgaggtattagaagagctgtatgataaacatgacataataccgcttattctggattatagaatgtatacgaaaatactgacaacttactgtcagggactggttcaggcaataaatcctgcaactggaagaattcataccaactttattcagacaggtacggcaactggaagacttgcaagtgcagagcccaatctgcaaaatattcctgtaaaatatgatgagggaaagctaataagaaaggcatttgttccagatgaaggttatgtgttgatagatgctgattattctcagattgagcttagaatacttgcacatatctctgaggatgaacgactgataaatgcttttaaaaataaccttgatattcattcacagacggcggcagagatctttggtgtggatataagtcaggttacaccaattatgcgaagccaggcaaaagcagttaactttggaattgtatatggtatatctgattatggactttcacgggatataaagatttcaagaaaagaagcagccgagtttattaatcgttattttgaaaagtatcccagagtaaaagaatatttggacaatgtcgtcaagtttgcccgtgaaaacggatttgttttgacaatatttaacaggaaaaggtatatctatgatataaagtctactaataaaaacctgagaaactatgcagagagaatagcaatgaattcacctatccagggaagtgctgcagatattatgaaaatagcaatgataagagtttataaaaagctaaaagaaaacaatttaaaatcaagaattattctgcaggtccatgacgaacttttgattgaatcaccctatgaagagaaagagatagtaaaggaaatagtaaaatcggagatggaaaatgcggttttattgaaagttcctttggtagttgaagtgaaagaaggttcaaattggtatgaaacaaagtaaaggatcc

SEQ ID NO: 1538 - DNA, 2623 bp, Artificial Sequence
  Description of Artificial Sequence: Synthetic DNA sequence of Caldicellulosiruptor TOK13B DNA Polymerase K769V
atgaaatacctgctgccgaccgctgctgctggtctgctgctcctcgctgcccagccggcgatggccatggaatttgttatttttgatgggaatagtattctgtatagagctttttttgccttgccacagcttactacctcaacaggcatacctacaaatgctatatatggttttttgaatgtgctgttaaaatacttagattctgaaaaaccggattatgtagcagtagcttttgacaaaaaaggcagagctgtccgaaaaagtgaatatgaagaatacaaggctaacagaaaaccgatgccagattctcttcaggttcagataccttacgtaagagaaatacttgctgctctgaacattcctgtactgaaatgtgaagggtatgaagctgatgacgttataggcacacttgtaaatagatttaaagcccaggatttagagattgtgataataaccggagacagagatacacttcagttacttgataaaaatgtaattgtcaaaatagtcacaacaaggtttgacaggacaactgaagatttgtatgctgtagaaaatgtaaaagaaaaatatggtgtttttgcgcatcaggttgttgactataaagcattagtaggtgatgcgtcagacaatataccaggtgttaagggaattggagataaaactgccataaagctgttagaagagtaccagactctggagaatatatatcagaatctaaataacattaaaggagcgctaaaagagaagttggaatcaggaaaagacatggcatttttatcaaaaagactggctactatcatatgcgatttaccaattgaggtgaatcttgaagaattaaaaaccaaagaatgggacaaagaaagactttatcagattttacttcaacttgagtttaaaagctttattaaaagactgggcttttcagaagagattaactatgcaaggcagaactttcagctacctgaatttagtattaaagaacttcgtgatgtttcagcaatagggggcaaagaaatctatctattgtactcagatgaagaaggacttttttatatttatgaccatcaaacctcaaccatttttacaacttctgataaggaagctattaaagatcttttaacactccaaagcattcaaaaggttgtatatgatttaaaaaatatactccataaggtggactttgatgaagctaatcagataaaaaattgtaatgatgttatgttggcttcatatgttttggacagtacacgcagttcgtacgatttggaaacattgtttatttcttatctcaacactgatatagctgcaatcaaagagaatagatgggctggtgctacagttttattaagaaatctttgggatgaactttcaaaactcattgatttaaactcggcccaatacgtttatgagagcatagagatgcctcttgttcccattttatatgaaatggagaaaatcggttttaaggttgacaaaaacactttgcaggagtatacaaaagagattgagagcaagcttttaaagttggaatcacagatttatcaaatagccggtgaatggtttaacataaactcgccaaaacaactctcatatatattattcgaaaaactgaagcttccggttgttaaaaagaccaaaacaggatattcaacagatgccgaggtattagaagagctgtatgataaacatgacataataccgcttattctggattatagaatgtatacgaaaatactgacaacttactgtcagggactggttcaggcaataaatcctgcaactggaagaattcataccaactttattcagacaggtacggcaactggaagacttgcaagtgcagagcccaatctgcaaaatattcctgtaaaatatgatgagggaaagctaataagaaaggcatttgttccagatgaaggttatgtgttgatagatgctgattattctcagattgagcttagaatacttgcacatatctctgaggatgaacgactgataaatgcttttaaaaataaccttgatattcattcacagacggcggcagagatctttggtgtggatataagtcaggttacaccaattatgcgaagccaggcaaaagcagttaactttggaattgtatatggtatatctgattatggactttcacgggatataaagatttcaagaaaagaagcagccgagtttattaatcgttattttgaaaagtatcccagagtaaaagaatatttggacaatgtcgtcaagtttgcccgtgaaaacggatttgttttgacaatatttaacaggaaaaggtatatcgttgatataaagtctactaataaaaacctgagaaactatgcagagagaatagcaatgaattcacctatccagggaagtgctgcagatattatgaaaatagcaatgataagagtttataaaaagctaaaagaaaacaatttaaaatcaagaattattctgcaggtccatgacgaacttttgattgaatcaccctatgaagagaaagagatagtaaaggaaatagtaaaatcggagatggaaaatgcggttttattgaaagttcctttggtagttgaagtgaaagaaggttcaaattggtatgaaacaaagtaaaggatcc

SEQ ID NO: 1539 - DNA, 2623 bp, Artificial Sequence
  Description of Artificial Sequence: Synthetic DNA sequence of Caldicellulosiruptor TOK13B DNA Polymerase D770A
atgaaatacctgctgccgaccgctgctgctggtctgctgctcctcgctgcccagccggcgatggccatggaatttgttatttttgatgggaatagtattctgtatagagctttttttgccttgccacagcttactacctcaacaggcatacctacaaatgctatatatggttttttgaatgtgctgttaaaatacttagattctgaaaaaccggattatgtagcagtagcttttgacaaaaaaggcagagctgtccgaaaaagtgaatatgaagaatacaaggctaacagaaaaccgatgccagattctcttcaggttcagataccttacgtaagagaaatacttgctgctctgaacattcctgtactgaaatgtgaagggtatgaagctgatgacgttataggcacacttgtaaatagatttaaagcccaggatttagagattgtgataataaccggagacagagatacacttcagttacttgataaaaatgtaattgtcaaaatagtcacaacaaggtttgacaggacaactgaagatttgtatgctgtagaaaatgtaaaagaaaaatatggtgtttttgcgcatcaggttgttgactataaagcattagtaggtgatgcgtcagacaatataccaggtgttaagggaattggagataaaactgccataaagctgttagaagagtaccagactctggagaatatatatcagaatctaaataacattaaaggagcgctaaaagagaagttggaatcaggaaaagacatggcatttttatcaaaaagactggctactatcatatgcgatttaccaattgaggtgaatcttgaagaattaaaaaccaaagaatgggacaaagaaagactttatcagattttacttcaacttgagtttaaaagctttattaaaagactgggcttttcagaagagattaactatgcaaggcagaactttcagctacctgaatttagtattaaagaacttcgtgatgtttcagcaatagggggcaaagaaatctatctattgtactcagatgaagaaggacttttttatatttatgaccatcaaacctcaaccatttttacaacttctgataaggaagctattaaagatcttttaacactccaaagcattcaaaaggttgtatatgatttaaaaaatatactccataaggtggactttgatgaagctaatcagataaaaaattgtaatgatgttatgttggcttcatatgttttggacagtacacgcagttcgtacgatttggaaacattgtttatttcttatctcaacactgatatagctgcaatcaaagagaatagatgggctggtgctacagttttattaagaaatctttgggatgaactttcaaaactcattgatttaaactcggcccaatacgtttatgagagcatagagatgcctcttgttcccattttatatgaaatggagaaaatcggttttaaggttgacaaaaacactttgcaggagtatacaaaagagattgagagcaagcttttaaagttggaatcacagatttatcaaatagccggtgaatggtttaacataaactcgccaaaacaactctcatatatattattcgaaaaactgaagcttccggttgttaaaaagaccaaaacaggatattcaacagatgccgaggtattagaagagctgtatgataaacatgacataataccgcttattctggattatagaatgtatacgaaaatactgacaacttactgtcagggactggttcaggcaataaatcctgcaactggaagaattcataccaactttattcagacaggtacggcaactggaagacttgcaagtgcagagcccaatctgcaaaatattcctgtaaaatatgatgagggaaagctaataagaaaggcatttgttccagatgaaggttatgtgttgatagatgctgattattctcagattgagcttagaatacttgcacatatctctgaggatgaacgactgataaatgcttttaaaaataaccttgatattcattcacagacggcggcagagatctttggtgtggatataagtcaggttacaccaattatgcgaagccaggcaaaagcagttaactttggaattgtatatggtatatctgattatggactttcacgggatataaagatttcaagaaaagaagcagccgagtttattaatcgttattttgaaaagtatcccagagtaaaagaatatttggacaatgtcgtcaagtttgcccgtgaaaacggatttgttttgacaatatttaacaggaaaaggtatatcaaggctataaagtctactaataaaaacctgagaaactatgcagagagaatagcaatgaattcacctatccagggaagtgctgcagatattatgaaaatagcaatgataagagtttataaaaagctaaaagaaaacaatttaaaatcaagaattattctgcaggtccatgacgaacttttgattgaatcaccctatgaagagaaagagatagtaaaggaaatagtaaaatcggagatggaaaatgcggttttattgaaagttcctttggtagttgaagtgaaagaaggttcaaattggtatgaaacaaagtaaaggatcc

SEQ ID NO: 1540 - DNA, 2623 bp, Artificial Sequence
  Description of Artificial Sequence: Synthetic DNA sequence of Caldicellulosiruptor TOK13B DNA Polymerase D770R
atgaaatacctgctgccgaccgctgctgctggtctgctgctcctcgctgcccagccggcgatggccatggaatttgttatttttgatgggaatagtattctgtatagagctttttttgccttgccacagcttactacctcaacaggcatacctacaaatgctatatatggttttttgaatgtgctgttaaaatacttagattctgaaaaaccggattatgtagcagtagcttttgacaaaaaaggcagagctgtccgaaaaagtgaatatgaagaatacaaggctaacagaaaaccgatgccagattctcttcaggttcagataccttacgtaagagaaatacttgctgctctgaacattcctgtactgaaatgtgaagggtatgaagctgatgacgttataggcacacttgtaaatagatttaaagcccaggatttagagattgtgataataaccggagacagagatacacttcagttacttgataaaaatgtaattgtcaaaatagtcacaacaaggtttgacaggacaactgaagatttgtatgctgtagaaaatgtaaaagaaaaatatggtgtttttgcgcatcaggttgttgactataaagcattagtaggtgatgcgtcagacaatataccaggtgttaagggaattggagataaaactgccataaagctgttagaagagtaccagactctggagaatatatatcagaatctaaataacattaaaggagcgctaaaagagaagttggaatcaggaaaagacatggcatttttatcaaaaagactggctactatcatatgcgatttaccaattgaggtgaatcttgaagaattaaaaaccaaagaatgggacaaagaaagactttatcagattttacttcaacttgagtttaaaagctttattaaaagactgggcttttcagaagagattaactatgcaaggcagaactttcagctacctgaatttagtattaaagaacttcgtgatgtttcagcaatagggggcaaagaaatctatctattgtactcagatgaagaaggacttttttatatttatgaccatcaaacctcaaccatttttacaacttctgataaggaagctattaaagatcttttaacactccaaagcattcaaaaggttgtatatgatttaaaaaatatactccataaggtggactttgatgaagctaatcagataaaaaattgtaatgatgttatgttggcttcatatgttttggacagtacacgcagttcgtacgatttggaaacattgtttatttcttatctcaacactgatatagctgcaatcaaagagaatagatgggctggtgctacagttttattaagaaatctttgggatgaactttcaaaactcattgatttaaactcggcccaatacgtttatgagagcatagagatgcctcttgttcccattttatatgaaatggagaaaatcggttttaaggttgacaaaaacactttgcaggagtatacaaaagagattgagagcaagcttttaaagttggaatcacagatttatcaaatagccggtgaatggtttaacataaactcgccaaaacaactctcatatatattattcgaaaaactgaagcttccggttgttaaaaagaccaaaacaggatattcaacagatgccgaggtattagaagagctgtatgataaacatgacataataccgcttattctggattatagaatgtatacgaaaatactgacaacttactgtcagggactggttcaggcaataaatcctgcaactggaagaattcataccaactttattcagacaggtacggcaactggaagacttgcaagtgcagagcccaatctgcaaaatattcctgtaaaatatgatgagggaaagctaataagaaaggcatttgttccagatgaaggttatgtgttgatagatgctgattattctcagattgagcttagaatacttgcacatatctctgaggatgaacgactgataaatgcttttaaaaataaccttgatattcattcacagacggcggcagagatctttggtgtggatataagtcaggttacaccaattatgcgaagccaggcaaaagcagttaactttggaattgtatatggtatatctgattatggactttcacgggatataaagatttcaagaaaagaagcagccgagtttattaatcgttattttgaaaagtatcccagagtaaaagaatatttggacaatgtcgtcaagtttgcccgtgaaaacggatttgttttgacaatatttaacaggaaaaggtatatcaagcgtataaagtctactaataaaaacctgagaaactatgcagagagaatagcaatgaattcacctatccagggaagtgctgcagatattatgaaaatagcaatgataagagtttataaaaagctaaaagaaaacaatttaaaatcaagaattattctgcaggtccatgacgaacttttgattgaatcaccctatgaagagaaagagatagtaaaggaaatagtaaaatcggagatggaaaatgcggttttattgaaagttcctttggtagttgaagtgaaagaaggttcaaattggtatgaaacaaagtaaaggatcc

SEQ ID NO: 1541 - DNA, 2623 bp, Artificial Sequence
  Description of Artificial Sequence: Synthetic DNA sequence of Caldicellulosiruptor TOK13B DNA Polymerase D770N
atgaaatacctgctgccgaccgctgctgctggtctgctgctcctcgctgcccagccggcgatggccatggaatttgttatttttgatgggaatagtattctgtatagagctttttttgccttgccacagcttactacctcaacaggcatacctacaaatgctatatatggttttttgaatgtgctgttaaaatacttagattctgaaaaaccggattatgtagcagtagcttttgacaaaaaaggcagagctgtccgaaaaagtgaatatgaagaatacaaggctaacagaaaaccgatgccagattctcttcaggttcagataccttacgtaagagaaatacttgctgctctgaacattcctgtactgaaatgtgaagggtatgaagctgatgacgttataggcacacttgtaaatagatttaaagcccaggatttagagattgtgataataaccggagacagagatacacttcagttacttgataaaaatgtaattgtcaaaatagtcacaacaaggtttgacaggacaactgaagatttgtatgctgtagaaaatgtaaaagaaaaatatggtgtttttgcgcatcaggttgttgactataaagcattagtaggtgatgcgtcagacaatataccaggtgttaagggaattggagataaaactgccataaagctgttagaagagtaccagactctggagaatatatatcagaatctaaataacattaaaggagcgctaaaagagaagttggaatcaggaaaagacatggcatttttatcaaaaagactggctactatcatatgcgatttaccaattgaggtgaatcttgaagaattaaaaaccaaagaatgggacaaagaaagactttatcagattttacttcaacttgagtttaaaagctttattaaaagactgggcttttcagaagagattaactatgcaaggcagaactttcagctacctgaatttagtattaaagaacttcgtgatgtttcagcaatagggggcaaagaaatctatctattgtactcagatgaagaaggacttttttatatttatgaccatcaaacctcaaccatttttacaacttctgataaggaagctattaaagatcttttaacactccaaagcattcaaaaggttgtatatgatttaaaaaatatactccataaggtggactttgatgaagctaatcagataaaaaattgtaatgatgttatgttggcttcatatgttttggacagtacacgcagttcgtacgatttggaaacattgtttatttcttatctcaacactgatatagctgcaatcaaagagaatagatgggctggtgctacagttttattaagaaatctttgggatgaactttcaaaactcattgatttaaactcggcccaatacgtttatgagagcatagagatgcctcttgttcccattttatatgaaatggagaaaatcggttttaaggttgacaaaaacactttgcaggagtatacaaaagagattgagagcaagcttttaaagttggaatcacagatttatcaaatagccggtgaatggtttaacataaactcgccaaaacaactctcatatatattattcgaaaaactgaagcttccggttgttaaaaagaccaaaacaggatattcaacagatgccgaggtattagaagagctgtatgataaacatgacataataccgcttattctggattatagaatgtatacgaaaatactgacaacttactgtcagggactggttcaggcaataaatcctgcaactggaagaattcataccaactttattcagacaggtacggcaactggaagacttgcaagtgcagagcccaatctgcaaaatattcctgtaaaatatgatgagggaaagctaataagaaaggcatttgttccagatgaaggttatgtgttgatagatgctgattattctcagattgagcttagaatacttgcacatatctctgaggatgaacgactgataaatgcttttaaaaataaccttgatattcattcacagacggcggcagagatctttggtgtggatataagtcaggttacaccaattatgcgaagccaggcaaaagcagttaactttggaattgtatatggtatatctgattatggactttcacgggatataaagatttcaagaaaagaagcagccgagtttattaatcgttattttgaaaagtatcccagagtaaaagaatatttggacaatgtcgtcaagtttgcccgtgaaaacggatttgttttgacaatatttaacaggaaaaggtatatcaagaatataaagtctactaataaaaacctgagaaactatgcagagagaatagcaatgaattcacctatccagggaagtgctgcagatattatgaaaatagcaatgataagagtttataaaaagctaaaagaaaacaatttaaaatcaagaattattctgcaggtccatgacgaacttttgattgaatcaccctatgaagagaaagagatagtaaaggaaatagtaaaatcggagatggaaaatgcggttttattgaaagttcctttggtagttgaagtgaaagaaggttcaaattggtatgaaacaaagtaaaggatcc

SEQ ID NO: 1542 - DNA, 2623 bp, Artificial Sequence
  Description of Artificial Sequence: Synthetic DNA sequence of Caldicellulosiruptor TOK13B DNA Polymerase D770C
atgaaatacctgctgccgaccgctgctgctggtctgctgctcctcgctgcccagccggcgatggccatggaatttgttatttttgatgggaatagtattctgtatagagctttttttgccttgccacagcttactacctcaacaggcatacctacaaatgctatatatggttttttgaatgtgctgttaaaatacttagattctgaaaaaccggattatgtagcagtagcttttgacaaaaaaggcagagctgtccgaaaaagtgaatatgaagaatacaaggctaacagaaaaccgatgccagattctcttcaggttcagataccttacgtaagagaaatacttgctgctctgaacattcctgtactgaaatgtgaagggtatgaagctgatgacgttataggcacacttgtaaatagatttaaagcccaggatttagagattgtgataataaccggagacagagatacacttcagttacttgataaaaatgtaattgtcaaaatagtcacaacaaggtttgacaggacaactgaagatttgtatgctgtagaaaatgtaaaagaaaaatatggtgtttttgcgcatcaggttgttgactataaagcattagtaggtgatgcgtcagacaatataccaggtgttaagggaattggagataaaactgccataaagctgttagaagagtaccagactctggagaatatatatcagaatctaaataacattaaaggagcgctaaaagagaagttggaatcaggaaaagacatggcatttttatcaaaaagactggctactatcatatgcgatttaccaattgaggtgaatcttgaagaattaaaaaccaaagaatgggacaaagaaagactttatcagattttacttcaacttgagtttaaaagctttattaaaagactgggcttttcagaagagattaactatgcaaggcagaactttcagctacctgaatttagtattaaagaacttcgtgatgtttcagcaatagggggcaaagaaatctatctattgtactcagatgaagaaggacttttttatatttatgaccatcaaacctcaaccatttttacaacttctgataaggaagctattaaagatcttttaacactccaaagcattcaaaaggttgtatatgatttaaaaaatatactccataaggtggactttgatgaagctaatcagataaaaaattgtaatgatgttatgttggcttcatatgttttggacagtacacgcagttcgtacgatttggaaacattgtttatttcttatctcaacactgatatagctgcaatcaaagagaatagatgggctggtgctacagttttattaagaaatctttgggatgaactttcaaaactcattgatttaaactcggcccaatacgtttatgagagcatagagatgcctcttgttcccattttatatgaaatggagaaaatcggttttaaggttgacaaaaacactttgcaggagtatacaaaagagattgagagcaagcttttaaagttggaatcacagatttatcaaatagccggtgaatggtttaacataaactcgccaaaacaactctcatatatattattcgaaaaactgaagcttccggttgttaaaaagaccaaaacaggatattcaacagatgccgaggtattagaagagctgtatgataaacatgacataataccgcttattctggattatagaatgtatacgaaaatactgacaacttactgtcagggactggttcaggcaataaatcctgcaactggaagaattcataccaactttattcagacaggtacggcaactggaagacttgcaagtgcagagcccaatctgcaaaatattcctgtaaaatatgatgagggaaagctaataagaaaggcatttgttccagatgaaggttatgtgttgatagatgctgattattctcagattgagcttagaatacttgcacatatctctgaggatgaacgactgataaatgcttttaaaaataaccttgatattcattcacagacggcggcagagatctttggtgtggatataagtcaggttacaccaattatgcgaagccaggcaaaagcagttaactttggaattgtatatggtatatctgattatggactttcacgggatataaagatttcaagaaaagaagcagccgagtttattaatcgttattttgaaaagtatcccagagtaaaagaatatttggacaatgtcgtcaagtttgcccgtgaaaacggatttgttttgacaatatttaacaggaaaaggtatatcaagtgtataaagtctactaataaaaacctgagaaactatgcagagagaatagcaatgaattcacctatccagggaagtgctgcagatattatgaaaatagcaatgataagagtttataaaaagctaaaagaaaacaatttaaaatcaagaattattctgcaggtccatgacgaacttttgattgaatcaccctatgaagagaaagagatagtaaaggaaatagtaaaatcggagatggaaaatgcggttttattgaaagttcctttggtagttgaagtgaaagaaggttcaaattggtatgaaacaaagtaaaggatcc

SEQ ID NO: 1543 - DNA, 2623 bp, Artificial Sequence
  Description of Artificial Sequence: Synthetic DNA sequence of Caldicellulosiruptor TOK13B DNA Polymerase D770E
atgaaatacctgctgccgaccgctgctgctggtctgctgctcctcgctgcccagccggcgatggccatggaatttgttatttttgatgggaatagtattctgtatagagctttttttgccttgccacagcttactacctcaacaggcatacctacaaatgctatatatggttttttgaatgtgctgttaaaatacttagattctgaaaaaccggattatgtagcagtagcttttgacaaaaaaggcagagctgtccgaaaaagtgaatatgaagaatacaaggctaacagaaaaccgatgccagattctcttcaggttcagataccttacgtaagagaaatacttgctgctctgaacattcctgtactgaaatgtgaagggtatgaagctgatgacgttataggcacacttgtaaatagatttaaagcccaggatttagagattgtgataataaccggagacagagatacacttcagttacttgataaaaatgtaattgtcaaaatagtcacaacaaggtttgacaggacaactgaagatttgtatgctgtagaaaatgtaaaagaaaaatatggtgtttttgcgcatcaggttgttgactataaagcattagtaggtgatgcgtcagacaatataccaggtgttaagggaattggagataaaactgccataaagctgttagaagagtaccagactctggagaatatatatcagaatctaaataacattaaaggagcgctaaaagagaagttggaatcaggaaaagacatggcatttttatcaaaaagactggctactatcatatgcgatttaccaattgaggtgaatcttgaagaattaaaaaccaaagaatgggacaaagaaagactttatcagattttacttcaacttgagtttaaaagctttattaaaagactgggcttttcagaagagattaactatgcaaggcagaactttcagctacctgaatttagtattaaagaacttcgtgatgtttcagcaatagggggcaaagaaatctatctattgtactcagatgaagaaggacttttttatatttatgaccatcaaacctcaaccatttttacaacttctgataaggaagctattaaagatcttttaacactccaaagcattcaaaaggttgtatatgatttaaaaaatatactccataaggtggactttgatgaagctaatcagataaaaaattgtaatgatgttatgttggcttcatatgttttggacagtacacgcagttcgtacgatttggaaacattgtttatttcttatctcaacactgatatagctgcaatcaaagagaatagatgggctggtgctacagttttattaagaaatctttgggatgaactttcaaaactcattgatttaaactcggcccaatacgtttatgagagcatagagatgcctcttgttcccattttatatgaaatggagaaaatcggttttaaggttgacaaaaacactttgcaggagtatacaaaagagattgagagcaagcttttaaagttggaatcacagatttatcaaatagccggtgaatggtttaacataaactcgccaaaacaactctcatatatattattcgaaaaactgaagcttccggttgttaaaaagaccaaaacaggatattcaacagatgccgaggtattagaagagctgtatgataaacatgacataataccgcttattctggattatagaatgtatacgaaaatactgacaacttactgtcagggactggttcaggcaataaatcctgcaactggaagaattcataccaactttattcagacaggtacggcaactggaagacttgcaagtgcagagcccaatctgcaaaatattcctgtaaaatatgatgagggaaagctaataagaaaggcatttgttccagatgaaggttatgtgttgatagatgctgattattctcagattgagcttagaatacttgcacatatctctgaggatgaacgactgataaatgcttttaaaaataaccttgatattcattcacagacggcggcagagatctttggtgtggatataagtcaggttacaccaattatgcgaagccaggcaaaagcagttaactttggaattgtatatggtatatctgattatggactttcacgggatataaagatttcaagaaaagaagcagccgagtttattaatcgttattttgaaaagtatcccagagtaaaagaatatttggacaatgtcgtcaagtttgcccgtgaaaacggatttgttttgacaatatttaacaggaaaaggtatatcaaggaaataaagtctactaataaaaacctgagaaactatgcagagagaatagcaatgaattcacctatccagggaagtgctgcagatattatgaaaatagcaatgataagagtttataaaaagctaaaagaaaacaatttaaaatcaagaattattctgcaggtccatgacgaacttttgattgaatcaccctatgaagagaaagagatagtaaaggaaatagtaaaatcggagatggaaaatgcggttttattgaaagttcctttggtagttgaagtgaaagaaggttcaaattggtatgaaacaaagtaaaggatcc

SEQ ID NO: 1544 - DNA, 2623 bp, Artificial Sequence
  Description of Artificial Sequence: Synthetic DNA sequence of Caldicellulosiruptor TOK13B DNA Polymerase D770Q
atgaaatacctgctgccgaccgctgctgctggtctgctgctcctcgctgcccagccggcgatggccatggaatttgttatttttgatgggaatagtattctgtatagagctttttttgccttgccacagcttactacctcaacaggcatacctacaaatgctatatatggttttttgaatgtgctgttaaaatacttagattctgaaaaaccggattatgtagcagtagcttttgacaaaaaaggcagagctgtccgaaaaagtgaatatgaagaatacaaggctaacagaaaaccgatgccagattctcttcaggttcagataccttacgtaagagaaatacttgctgctctgaacattcctgtactgaaatgtgaagggtatgaagctgatgacgttataggcacacttgtaaatagatttaaagcccaggatttagagattgtgataataaccggagacagagatacacttcagttacttgataaaaatgtaattgtcaaaatagtcacaacaaggtttgacaggacaactgaagatttgtatgctgtagaaaatgtaaaagaaaaatatggtgtttttgcgcatcaggttgttgactataaagcattagtaggtgatgcgtcagacaatataccaggtgttaagggaattggagataaaactgccataaagctgttagaagagtaccagactctggagaatatatatcagaatctaaataacattaaaggagcgctaaaagagaagttggaatcaggaaaagacatggcatttttatcaaaaagactggctactatcatatgcgatttaccaattgaggtgaatcttgaagaattaaaaaccaaagaatgggacaaagaaagactttatcagattttacttcaacttgagtttaaaagctttattaaaagactgggcttttcagaagagattaactatgcaaggcagaactttcagctacctgaatttagtattaaagaacttcgtgatgtttcagcaatagggggcaaagaaatctatctattgtactcagatgaagaaggacttttttatatttatgaccatcaaacctcaaccatttttacaacttctgataaggaagctattaaagatcttttaacactccaaagcattcaaaaggttgtatatgatttaaaaaatatactccataaggtggactttgatgaagctaatcagataaaaaattgtaatgatgttatgttggcttcatatgttttggacagtacacgcagttcgtacgatttggaaacattgtttatttcttatctcaacactgatatagctgcaatcaaagagaatagatgggctggtgctacagttttattaagaaatctttgggatgaactttcaaaactcattgatttaaactcggcccaatacgtttatgagagcatagagatgcctcttgttcccattttatatgaaatggagaaaatcggttttaaggttgacaaaaacactttgcaggagtatacaaaagagattgagagcaagcttttaaagttggaatcacagatttatcaaatagccggtgaatggtttaacataaactcgccaaaacaactctcatatatattattcgaaaaactgaagcttccggttgttaaaaagaccaaaacaggatattcaacagatgccgaggtattagaagagctgtatgataaacatgacataataccgcttattctggattatagaatgtatacgaaaatactgacaacttactgtcagggactggttcaggcaataaatcctgcaactggaagaattcataccaactttattcagacaggtacggcaactggaagacttgcaagtgcagagcccaatctgcaaaatattcctgtaaaatatgatgagggaaagctaataagaaaggcatttgttccagatgaaggttatgtgttgatagatgctgattattctcagattgagcttagaatacttgcacatatctctgaggatgaacgactgataaatgcttttaaaaataaccttgatattcattcacagacggcggcagagatctttggtgtggatataagtcaggttacaccaattatgcgaagccaggcaaaagcagttaactttggaattgtatatggtatatctgattatggactttcacgggatataaagatttcaagaaaagaagcagccgagtttattaatcgttattttgaaaagtatcccagagtaaaagaatatttggacaatgtcgtcaagtttgcccgtgaaaacggatttgttttgacaatatttaacaggaaaaggtatatcaagcaaataaagtctactaataaaaacctgagaaactatgcagagagaatagcaatgaattcacctatccagggaagtgctgcagatattatgaaaatagcaatgataagagtttataaaaagctaaaagaaaacaatttaaaatcaagaattattctgcaggtccatgacgaacttttgattgaatcaccctatgaagagaaagagatagtaaaggaaatagtaaaatcggagatggaaaatgcggttttattgaaagttcctttggtagttgaagtgaaagaaggttcaaattggtatgaaacaaagtaaaggatcc

SEQ ID NO: 1545 - DNA, 2623 bp, Artificial Sequence
  Description of Artificial Sequence: Synthetic DNA sequence of Caldicellulosiruptor TOK13B DNA Polymerase D770G
atgaaatacctgctgccgaccgctgctgctggtctgctgctcctcgctgcccagccggcgatggccatggaatttgttatttttgatgggaatagtattctgtatagagctttttttgccttgccacagcttactacctcaacaggcatacctacaaatgctatatatggttttttgaatgtgctgttaaaatacttagattctgaaaaaccggattatgtagcagtagcttttgacaaaaaaggcagagctgtccgaaaaagtgaatatgaagaatacaaggctaacagaaaaccgatgccagattctcttcaggttcagataccttacgtaagagaaatacttgctgctctgaacattcctgtactgaaatgtgaagggtatgaagctgatgacgttataggcacacttgtaaatagatttaaagcccaggatttagagattgtgataataaccggagacagagatacacttcagttacttgataaaaatgtaattgtcaaaatagtcacaacaaggtttgacaggacaactgaagatttgtatgctgtagaaaatgtaaaagaaaaatatggtgtttttgcgcatcaggttgttgactataaagcattagtaggtgatgcgtcagacaatataccaggtgttaagggaattggagataaaactgccataaagctgttagaagagtaccagactctggagaatatatatcagaatctaaataacattaaaggagcgctaaaagagaagttggaatcaggaaaagacatggcatttttatcaaaaagactggctactatcatatgcgatttaccaattgaggtgaatcttgaagaattaaaaaccaaagaatgggacaaagaaagactttatcagattttacttcaacttgagtttaaaagctttattaaaagactgggcttttcagaagagattaactatgcaaggcagaactttcagctacctgaatttagtattaaagaacttcgtgatgtttcagcaatagggggcaaagaaatctatctattgtactcagatgaagaaggacttttttatatttatgaccatcaaacctcaaccatttttacaacttctgataaggaagctattaaagatcttttaacactccaaagcattcaaaaggttgtatatgatttaaaaaatatactccataaggtggactttgatgaagctaatcagataaaaaattgtaatgatgttatgttggcttcatatgttttggacagtacacgcagttcgtacgatttggaaacattgtttatttcttatctcaacactgatatagctgcaatcaaagagaatagatgggctggtgctacagttttattaagaaatctttgggatgaactttcaaaactcattgatttaaactcggcccaatacgtttatgagagcatagagatgcctcttgttcccattttatatgaaatggagaaaatcggttttaaggttgacaaaaacactttgcaggagtatacaaaagagattgagagcaagcttttaaagttggaatcacagatttatcaaatagccggtgaatggtttaacataaactcgccaaaacaactctcatatatattattcgaaaaactgaagcttccggttgttaaaaagaccaaaacaggatattcaacagatgccgaggtattagaagagctgtatgataaacatgacataataccgcttattctggattatagaatgtatacgaaaatactgacaacttactgtcagggactggttcaggcaataaatcctgcaactggaagaattcataccaactttattcagacaggtacggcaactggaagacttgcaagtgcagagcccaatctgcaaaatattcctgtaaaatatgatgagggaaagctaataagaaaggcatttgttccagatgaaggttatgtgttgatagatgctgattattctcagattgagcttagaatacttgcacatatctctgaggatgaacgactgataaatgcttttaaaaataaccttgatattcattcacagacggcggcagagatctttggtgtggatataagtcaggttacaccaattatgcgaagccaggcaaaagcagttaactttggaattgtatatggtatatctgattatggactttcacgggatataaagatttcaagaaaagaagcagccgagtttattaatcgttattttgaaaagtatcccagagtaaaagaatatttggacaatgtcgtcaagtttgcccgtgaaaacggatttgttttgacaatatttaacaggaaaaggtatatcaagggtataaagtctactaataaaaacctgagaaactatgcagagagaatagcaatgaattcacctatccagggaagtgctgcagatattatgaaaatagcaatgataagagtttataaaaagctaaaagaaaacaatttaaaatcaagaattattctgcaggtccatgacgaacttttgattgaatcaccctatgaagagaaagagatagtaaaggaaatagtaaaatcggagatggaaaatgcggttttattgaaagttcctttggtagttgaagtgaaagaaggttcaaattggtatgaaacaaagtaaaggatcc

SEQ ID NO: 1546 - DNA, 2623 bp, Artificial Sequence
  Description of Artificial Sequence: Synthetic DNA sequence of Caldicellulosiruptor TOK13B DNA Polymerase D770H
atgaaatacctgctgccgaccgctgctgctggtctgctgctcctcgctgcccagccggcgatggccatggaatttgttatttttgatgggaatagtattctgtatagagctttttttgccttgccacagcttactacctcaacaggcatacctacaaatgctatatatggttttttgaatgtgctgttaaaatacttagattctgaaaaaccggattatgtagcagtagcttttgacaaaaaaggcagagctgtccgaaaaagtgaatatgaagaatacaaggctaacagaaaaccgatgccagattctcttcaggttcagataccttacgtaagagaaatacttgctgctctgaacattcctgtactgaaatgtgaagggtatgaagctgatgacgttataggcacacttgtaaatagatttaaagcccaggatttagagattgtgataataaccggagacagagatacacttcagttacttgataaaaatgtaattgtcaaaatagtcacaacaaggtttgacaggacaactgaagatttgtatgctgtagaaaatgtaaaagaaaaatatggtgtttttgcgcatcaggttgttgactataaagcattagtaggtgatgcgtcagacaatataccaggtgttaagggaattggagataaaactgccataaagctgttagaagagtaccagactctggagaatatatatcagaatctaaataacattaaaggagcgctaaaagagaagttggaatcaggaaaagacatggcatttttatcaaaaagactggctactatcatatgcgatttaccaattgaggtgaatcttgaagaattaaaaaccaaagaatgggacaaagaaagactttatcagattttacttcaacttgagtttaaaagctttattaaaagactgggcttttcagaagagattaactatgcaaggcagaactttcagctacctgaatttagtattaaagaacttcgtgatgtttcagcaatagggggcaaagaaatctatctattgtactcagatgaagaaggacttttttatatttatgaccatcaaacctcaaccatttttacaacttctgataaggaagctattaaagatcttttaacactccaaagcattcaaaaggttgtatatgatttaaaaaatatactccataaggtggactttgatgaagctaatcagataaaaaattgtaatgatgttatgttggcttcatatgttttggacagtacacgcagttcgtacgatttggaaacattgtttatttcttatctcaacactgatatagctgcaatcaaagagaatagatgggctggtgctacagttttattaagaaatctttgggatgaactttcaaaactcattgatttaaactcggcccaatacgtttatgagagcatagagatgcctcttgttcccattttatatgaaatggagaaaatcggttttaaggttgacaaaaacactttgcaggagtatacaaaagagattgagagcaagcttttaaagttggaatcacagatttatcaaatagccggtgaatggtttaacataaactcgccaaaacaactctcatatatattattcgaaaaactgaagcttccggttgttaaaaagaccaaaacaggatattcaacagatgccgaggtattagaagagctgtatgataaacatgacataataccgcttattctggattatagaatgtatacgaaaatactgacaacttactgtcagggactggttcaggcaataaatcctgcaactggaagaattcataccaactttattcagacaggtacggcaactggaagacttgcaagtgcagagcccaatctgcaaaatattcctgtaaaatatgatgagggaaagctaataagaaaggcatttgttccagatgaaggttatgtgttgatagatgctgattattctcagattgagcttagaatacttgcacatatctctgaggatgaacgactgataaatgcttttaaaaataaccttgatattcattcacagacggcggcagagatctttggtgtggatataagtcaggttacaccaattatgcgaagccaggcaaaagcagttaactttggaattgtatatggtatatctgattatggactttcacgggatataaagatttcaagaaaagaagcagccgagtttattaatcgttattttgaaaagtatcccagagtaaaagaatatttggacaatgtcgtcaagtttgcccgtgaaaacggatttgttttgacaatatttaacaggaaaaggtatatcaagcatataaagtctactaataaaaacctgagaaactatgcagagagaatagcaatgaattcacctatccagggaagtgctgcagatattatgaaaatagcaatgataagagtttataaaaagctaaaagaaaacaatttaaaatcaagaattattctgcaggtccatgacgaacttttgattgaatcaccctatgaagagaaagagatagtaaaggaaatagtaaaatcggagatggaaaatgcggttttattgaaagttcctttggtagttgaagtgaaagaaggttcaaattggtatgaaacaaagtaaaggatcc

SEQ ID NO: 1547 - DNA, 2623 bp, Artificial Sequence
  Description of Artificial Sequence: Synthetic DNA sequence of Caldicellulosiruptor TOK13B DNA Polymerase D770I
atgaaatacctgctgccgaccgctgctgctggtctgctgctcctcgctgcccagccggcgatggccatggaatttgttatttttgatgggaatagtattctgtatagagctttttttgccttgccacagcttactacctcaacaggcatacctacaaatgctatatatggttttttgaatgtgctgttaaaatacttagattctgaaaaaccggattatgtagcagtagcttttgacaaaaaaggcagagctgtccgaaaaagtgaatatgaagaatacaaggctaacagaaaaccgatgccagattctcttcaggttcagataccttacgtaagagaaatacttgctgctctgaacattcctgtactgaaatgtgaagggtatgaagctgatgacgttataggcacacttgtaaatagatttaaagcccaggatttagagattgtgataataaccggagacagagatacacttcagttacttgataaaaatgtaattgtcaaaatagtcacaacaaggtttgacaggacaactgaagatttgtatgctgtagaaaatgtaaaagaaaaatatggtgtttttgcgcatcaggttgttgactataaagcattagtaggtgatgcgtcagacaatataccaggtgttaagggaattggagataaaactgccataaagctgttagaagagtaccagactctggagaatatatatcagaatctaaataacattaaaggagcgctaaaagagaagttggaatcaggaaaagacatggcatttttatcaaaaagactggctactatcatatgcgatttaccaattgaggtgaatcttgaagaattaaaaaccaaagaatgggacaaagaaagactttatcagattttacttcaacttgagtttaaaagctttattaaaagactgggcttttcagaagagattaactatgcaaggcagaactttcagctacctgaatttagtattaaagaacttcgtgatgtttcagcaatagggggcaaagaaatctatctattgtactcagatgaagaaggacttttttatatttatgaccatcaaacctcaaccatttttacaacttctgataaggaagctattaaagatcttttaacactccaaagcattcaaaaggttgtatatgatttaaaaaatatactccataaggtggactttgatgaagctaatcagataaaaaattgtaatgatgttatgttggcttcatatgttttggacagtacacgcagttcgtacgatttggaaacattgtttatttcttatctcaacactgatatagctgcaatcaaagagaatagatgggctggtgctacagttttattaagaaatctttgggatgaactttcaaaactcattgatttaaactcggcccaatacgtttatgagagcatagagatgcctcttgttcccattttatatgaaatggagaaaatcggttttaaggttgacaaaaacactttgcaggagtatacaaaagagattgagagcaagcttttaaagttggaatcacagatttatcaaatagccggtgaatggtttaacataaactcgccaaaacaactctcatatatattattcgaaaaactgaagcttccggttgttaaaaagaccaaaacaggatattcaacagatgccgaggtattagaagagctgtatgataaacatgacataataccgcttattctggattatagaatgtatacgaaaatactgacaacttactgtcagggactggttcaggcaataaatcctgcaactggaagaattcataccaactttattcagacaggtacggcaactggaagacttgcaagtgcagagcccaatctgcaaaatattcctgtaaaatatgatgagggaaagctaataagaaaggcatttgttccagatgaaggttatgtgttgatagatgctgattattctcagattgagcttagaatacttgcacatatctctgaggatgaacgactgataaatgcttttaaaaataaccttgatattcattcacagacggcggcagagatctttggtgtggatataagtcaggttacaccaattatgcgaagccaggcaaaagcagttaactttggaattgtatatggtatatctgattatggactttcacgggatataaagatttcaagaaaagaagcagccgagtttattaatcgttattttgaaaagtatcccagagtaaaagaatatttggacaatgtcgtcaagtttgcccgtgaaaacggatttgttttgacaatatttaacaggaaaaggtatatcaagattataaagtctactaataaaaacctgagaaactatgcagagagaatagcaatgaattcacctatccagggaagtgctgcagatattatgaaaatagcaatgataagagtttataaaaagctaaaagaaaacaatttaaaatcaagaattattctgcaggtccatgacgaacttttgattgaatcaccctatgaagagaaagagatagtaaaggaaatagtaaaatcggagatggaaaatgcggttttattgaaagttcctttggtagttgaagtgaaagaaggttcaaattggtatgaaacaaagtaaaggatcc

SEQ ID NO: 1548 - DNA, 2623 bp, Artificial Sequence
  Description of Artificial Sequence: Synthetic DNA sequence of Caldicellulosiruptor TOK13B DNA Polymerase D770L
atgaaatacctgctgccgaccgctgctgctggtctgctgctcctcgctgcccagccggcgatggccatggaatttgttatttttgatgggaatagtattctgtatagagctttttttgccttgccacagcttactacctcaacaggcatacctacaaatgctatatatggttttttgaatgtgctgttaaaatacttagattctgaaaaaccggattatgtagcagtagcttttgacaaaaaaggcagagctgtccgaaaaagtgaatatgaagaatacaaggctaacagaaaaccgatgccagattctcttcaggttcagataccttacgtaagagaaatacttgctgctctgaacattcctgtactgaaatgtgaagggtatgaagctgatgacgttataggcacacttgtaaatagatttaaagcccaggatttagagattgtgataataaccggagacagagatacacttcagttacttgataaaaatgtaattgtcaaaatagtcacaacaaggtttgacaggacaactgaagatttgtatgctgtagaaaatgtaaaagaaaaatatggtgtttttgcgcatcaggttgttgactataaagcattagtaggtgatgcgtcagacaatataccaggtgttaagggaattggagataaaactgccataaagctgttagaagagtaccagactctggagaatatatatcagaatctaaataacattaaaggagcgctaaaagagaagttggaatcaggaaaagacatggcatttttatcaaaaagactggctactatcatatgcgatttaccaattgaggtgaatcttgaagaattaaaaaccaaagaatgggacaaagaaagactttatcagattttacttcaacttgagtttaaaagctttattaaaagactgggcttttcagaagagattaactatgcaaggcagaactttcagctacctgaatttagtattaaagaacttcgtgatgtttcagcaatagggggcaaagaaatctatctattgtactcagatgaagaaggacttttttatatttatgaccatcaaacctcaaccatttttacaacttctgataaggaagctattaaagatcttttaacactccaaagcattcaaaaggttgtatatgatttaaaaaatatactccataaggtggactttgatgaagctaatcagataaaaaattgtaatgatgttatgttggcttcatatgttttggacagtacacgcagttcgtacgatttggaaacattgtttatttcttatctcaacactgatatagctgcaatcaaagagaatagatgggctggtgctacagttttattaagaaatctttgggatgaactttcaaaactcattgatttaaactcggcccaatacgtttatgagagcatagagatgcctcttgttcccattttatatgaaatggagaaaatcggttttaaggttgacaaaaacactttgcaggagtatacaaaagagattgagagcaagcttttaaagttggaatcacagatttatcaaatagccggtgaatggtttaacataaactcgccaaaacaactctcatatatattattcgaaaaactgaagcttccggttgttaaaaagaccaaaacaggatattcaacagatgccgaggtattagaagagctgtatgataaacatgacataataccgcttattctggattatagaatgtatacgaaaatactgacaacttactgtcagggactggttcaggcaataaatcctgcaactggaagaattcataccaactttattcagacaggtacggcaactggaagacttgcaagtgcagagcccaatctgcaaaatattcctgtaaaatatgatgagggaaagctaataagaaaggcatttgttccagatgaaggttatgtgttgatagatgctgattattctcagattgagcttagaatacttgcacatatctctgaggatgaacgactgataaatgcttttaaaaataaccttgatattcattcacagacggcggcagagatctttggtgtggatataagtcaggttacaccaattatgcgaagccaggcaaaagcagttaactttggaattgtatatggtatatctgattatggactttcacgggatataaagatttcaagaaaagaagcagccgagtttattaatcgttattttgaaaagtatcccagagtaaaagaatatttggacaatgtcgtcaagtttgcccgtgaaaacggatttgttttgacaatatttaacaggaaaaggtatatcaagcttataaagtctactaataaaaacctgagaaactatgcagagagaatagcaatgaattcacctatccagggaagtgctgcagatattatgaaaatagcaatgataagagtttataaaaagctaaaagaaaacaatttaaaatcaagaattattctgcaggtccatgacgaacttttgattgaatcaccctatgaagagaaagagatagtaaaggaaatagtaaaatcggagatggaaaatgcggttttattgaaagttcctttggtagttgaagtgaaagaaggttcaaattggtatgaaacaaagtaaaggatcc

SEQ ID NO: 1549 - DNA, 2623 bp, Artificial Sequence
  Description of Artificial Sequence: Synthetic DNA sequence of Caldicellulosiruptor TOK13B DNA Polymerase D770K
atgaaatacctgctgccgaccgctgctgctggtctgctgctcctcgctgcccagccggcgatggccatggaatttgttatttttgatgggaatagtattctgtatagagctttttttgccttgccacagcttactacctcaacaggcatacctacaaatgctatatatggttttttgaatgtgctgttaaaatacttagattctgaaaaaccggattatgtagcagtagcttttgacaaaaaaggcagagctgtccgaaaaagtgaatatgaagaatacaaggctaacagaaaaccgatgccagattctcttcaggttcagataccttacgtaagagaaatacttgctgctctgaacattcctgtactgaaatgtgaagggtatgaagctgatgacgttataggcacacttgtaaatagatttaaagcccaggatttagagattgtgataataaccggagacagagatacacttcagttacttgataaaaatgtaattgtcaaaatagtcacaacaaggtttgacaggacaactgaagatttgtatgctgtagaaaatgtaaaagaaaaatatggtgtttttgcgcatcaggttgttgactataaagcattagtaggtgatgcgtcagacaatataccaggtgttaagggaattggagataaaactgccataaagctgttagaagagtaccagactctggagaatatatatcagaatctaaataacattaaaggagcgctaaaagagaagttggaatcaggaaaagacatggcatttttatcaaaaagactggctactatcatatgcgatttaccaattgaggtgaatcttgaagaattaaaaaccaaagaatgggacaaagaaagactttatcagattttacttcaacttgagtttaaaagctttattaaaagactgggcttttcagaagagattaactatgcaaggcagaactttcagctacctgaatttagtattaaagaacttcgtgatgtttcagcaatagggggcaaagaaatctatctattgtactcagatgaagaaggacttttttatatttatgaccatcaaacctcaaccatttttacaacttctgataaggaagctattaaagatcttttaacactccaaagcattcaaaaggttgtatatgatttaaaaaatatactccataaggtggactttgatgaagctaatcagataaaaaattgtaatgatgttatgttggcttcatatgttttggacagtacacgcagttcgtacgatttggaaacattgtttatttcttatctcaacactgatatagctgcaatcaaagagaatagatgggctggtgctacagttttattaagaaatctttgggatgaactttcaaaactcattgatttaaactcggcccaatacgtttatgagagcatagagatgcctcttgttcccattttatatgaaatggagaaaatcggttttaaggttgacaaaaacactttgcaggagtatacaaaagagattgagagcaagcttttaaagttggaatcacagatttatcaaatagccggtgaatggtttaacataaactcgccaaaacaactctcatatatattattcgaaaaactgaagcttccggttgttaaaaagaccaaaacaggatattcaacagatgccgaggtattagaagagctgtatgataaacatgacataataccgcttattctggattatagaatgtatacgaaaatactgacaacttactgtcagggactggttcaggcaataaatcctgcaactggaagaattcataccaactttattcagacaggtacggcaactggaagacttgcaagtgcagagcccaatctgcaaaatattcctgtaaaatatgatgagggaaagctaataagaaaggcatttgttccagatgaaggttatgtgttgatagatgctgattattctcagattgagcttagaatacttgcacatatctctgaggatgaacgactgataaatgcttttaaaaataaccttgatattcattcacagacggcggcagagatctttggtgtggatataagtcaggttacaccaattatgcgaagccaggcaaaagcagttaactttggaattgtatatggtatatctgattatggactttcacgggatataaagatttcaagaaaagaagcagccgagtttattaatcgttattttgaaaagtatcccagagtaaaagaatatttggacaatgtcgtcaagtttgcccgtgaaaacggatttgttttgacaatatttaacaggaaaaggtatatcaagaaaataaagtctactaataaaaacctgagaaactatgcagagagaatagcaatgaattcacctatccagggaagtgctgcagatattatgaaaatagcaatgataagagtttataaaaagctaaaagaaaacaatttaaaatcaagaattattctgcaggtccatgacgaacttttgattgaatcaccctatgaagagaaagagatagtaaaggaaatagtaaaatcggagatggaaaatgcggttttattgaaagttcctttggtagttgaagtgaaagaaggttcaaattggtatgaaacaaagtaaaggatcc

SEQ ID NO: 1550 - DNA, 2623 bp, Artificial Sequence
  Description of Artificial Sequence: Synthetic DNA sequence of Caldicellulosiruptor TOK13B DNA Polymerase D770M
atgaaatacctgctgccgaccgctgctgctggtctgctgctcctcgctgcccagccggcgatggccatggaatttgttatttttgatgggaatagtattctgtatagagctttttttgccttgccacagcttactacctcaacaggcatacctacaaatgctatatatggttttttgaatgtgctgttaaaatacttagattctgaaaaaccggattatgtagcagtagcttttgacaaaaaaggcagagctgtccgaaaaagtgaatatgaagaatacaaggctaacagaaaaccgatgccagattctcttcaggttcagataccttacgtaagagaaatacttgctgctctgaacattcctgtactgaaatgtgaagggtatgaagctgatgacgttataggcacacttgtaaatagatttaaagcccaggatttagagattgtgataataaccggagacagagatacacttcagttacttgataaaaatgtaattgtcaaaatagtcacaacaaggtttgacaggacaactgaagatttgtatgctgtagaaaatgtaaaagaaaaatatggtgtttttgcgcatcaggttgttgactataaagcattagtaggtgatgcgtcagacaatataccaggtgttaagggaattggagataaaactgccataaagctgttagaagagtaccagactctggagaatatatatcagaatctaaataacattaaaggagcgctaaaagagaagttggaatcaggaaaagacatggcatttttatcaaaaagactggctactatcatatgcgatttaccaattgaggtgaatcttgaagaattaaaaaccaaagaatgggacaaagaaagactttatcagattttacttcaacttgagtttaaaagctttattaaaagactgggcttttcagaagagattaactatgcaaggcagaactttcagctacctgaatttagtattaaagaacttcgtgatgtttcagcaatagggggcaaagaaatctatctattgtactcagatgaagaaggacttttttatatttatgaccatcaaacctcaaccatttttacaacttctgataaggaagctattaaagatcttttaacactccaaagcattcaaaaggttgtatatgatttaaaaaatatactccataaggtggactttgatgaagctaatcagataaaaaattgtaatgatgttatgttggcttcatatgttttggacagtacacgcagttcgtacgatttggaaacattgtttatttcttatctcaacactgatatagctgcaatcaaagagaatagatgggctggtgctacagttttattaagaaatctttgggatgaactttcaaaactcattgatttaaactcggcccaatacgtttatgagagcatagagatgcctcttgttcccattttatatgaaatggagaaaatcggttttaaggttgacaaaaacactttgcaggagtatacaaaagagattgagagcaagcttttaaagttggaatcacagatttatcaaatagccggtgaatggtttaacataaactcgccaaaacaactctcatatatattattcgaaaaactgaagcttccggttgttaaaaagaccaaaacaggatattcaacagatgccgaggtattagaagagctgtatgataaacatgacataataccgcttattctggattatagaatgtatacgaaaatactgacaacttactgtcagggactggttcaggcaataaatcctgcaactggaagaattcataccaactttattcagacaggtacggcaactggaagacttgcaagtgcagagcccaatctgcaaaatattcctgtaaaatatgatgagggaaagctaataagaaaggcatttgttccagatgaaggttatgtgttgatagatgctgattattctcagattgagcttagaatacttgcacatatctctgaggatgaacgactgataaatgcttttaaaaataaccttgatattcattcacagacggcggcagagatctttggtgtggatataagtcaggttacaccaattatgcgaagccaggcaaaagcagttaactttggaattgtatatggtatatctgattatggactttcacgggatataaagatttcaagaaaagaagcagccgagtttattaatcgttattttgaaaagtatcccagagtaaaagaatatttggacaatgtcgtcaagtttgcccgtgaaaacggatttgttttgacaatatttaacaggaaaaggtatatcaagatgataaagtctactaataaaaacctgagaaactatgcagagagaatagcaatgaattcacctatccagggaagtgctgcagatattatgaaaatagcaatgataagagtttataaaaagctaaaagaaaacaatttaaaatcaagaattattctgcaggtccatgacgaacttttgattgaatcaccctatgaagagaaagagatagtaaaggaaatagtaaaatcggagatggaaaatgcggttttattgaaagttcctttggtagttgaagtgaaagaaggttcaaattggtatgaaacaaagtaaaggatcc

SEQ ID NO: 1551 - DNA, 2623 bp, Artificial Sequence
  Description of Artificial Sequence: Synthetic DNA sequence of Caldicellulosiruptor TOK13B DNA Polymerase D770F
atgaaatacctgctgccgaccgctgctgctggtctgctgctcctcgctgcccagccggcgatggccatggaatttgttatttttgatgggaatagtattctgtatagagctttttttgccttgccacagcttactacctcaacaggcatacctacaaatgctatatatggttttttgaatgtgctgttaaaatacttagattctgaaaaaccggattatgtagcagtagcttttgacaaaaaaggcagagctgtccgaaaaagtgaatatgaagaatacaaggctaacagaaaaccgatgccagattctcttcaggttcagataccttacgtaagagaaatacttgctgctctgaacattcctgtactgaaatgtgaagggtatgaagctgatgacgttataggcacacttgtaaatagatttaaagcccaggatttagagattgtgataataaccggagacagagatacacttcagttacttgataaaaatgtaattgtcaaaatagtcacaacaaggtttgacaggacaactgaagatttgtatgctgtagaaaatgtaaaagaaaaatatggtgtttttgcgcatcaggttgttgactataaagcattagtaggtgatgcgtcagacaatataccaggtgttaagggaattggagataaaactgccataaagctgttagaagagtaccagactctggagaatatatatcagaatctaaataacattaaaggagcgctaaaagagaagttggaatcaggaaaagacatggcatttttatcaaaaagactggctactatcatatgcgatttaccaattgaggtgaatcttgaagaattaaaaaccaaagaatgggacaaagaaagactttatcagattttacttcaacttgagtttaaaagctttattaaaagactgggcttttcagaagagattaactatgcaaggcagaactttcagctacctgaatttagtattaaagaacttcgtgatgtttcagcaatagggggcaaagaaatctatctattgtactcagatgaagaaggacttttttatatttatgaccatcaaacctcaaccatttttacaacttctgataaggaagctattaaagatcttttaacactccaaagcattcaaaaggttgtatatgatttaaaaaatatactccataaggtggactttgatgaagctaatcagataaaaaattgtaatgatgttatgttggcttcatatgttttggacagtacacgcagttcgtacgatttggaaacattgtttatttcttatctcaacactgatatagctgcaatcaaagagaatagatgggctggtgctacagttttattaagaaatctttgggatgaactttcaaaactcattgatttaaactcggcccaatacgtttatgagagcatagagatgcctcttgttcccattttatatgaaatggagaaaatcggttttaaggttgacaaaaacactttgcaggagtatacaaaagagattgagagcaagcttttaaagttggaatcacagatttatcaaatagccggtgaatggtttaacataaactcgccaaaacaactctcatatatattattcgaaaaactgaagcttccggttgttaaaaagaccaaaacaggatattcaacagatgccgaggtattagaagagctgtatgataaacatgacataataccgcttattctggattatagaatgtatacgaaaatactgacaacttactgtcagggactggttcaggcaataaatcctgcaactggaagaattcataccaactttattcagacaggtacggcaactggaagacttgcaagtgcagagcccaatctgcaaaatattcctgtaaaatatgatgagggaaagctaataagaaaggcatttgttccagatgaaggttatgtgttgatagatgctgattattctcagattgagcttagaatacttgcacatatctctgaggatgaacgactgataaatgcttttaaaaataaccttgatattcattcacagacggcggcagagatctttggtgtggatataagtcaggttacaccaattatgcgaagccaggcaaaagcagttaactttggaattgtatatggtatatctgattatggactttcacgggatataaagatttcaagaaaagaagcagccgagtttattaatcgttattttgaaaagtatcccagagtaaaagaatatttggacaatgtcgtcaagtttgcccgtgaaaacggatttgttttgacaatatttaacaggaaaaggtatatcaagtttataaagtctactaataaaaacctgagaaactatgcagagagaatagcaatgaattcacctatccagggaagtgctgcagatattatgaaaatagcaatgataagagtttataaaaagctaaaagaaaacaatttaaaatcaagaattattctgcaggtccatgacgaacttttgattgaatcaccctatgaagagaaagagatagtaaaggaaatagtaaaatcggagatggaaaatgcggttttattgaaagttcctttggtagttgaagtgaaagaaggttcaaattggtatgaaacaaagtaaaggatcc

SEQ ID NO: 1552 - DNA, 2623 bp, Artificial Sequence
  Description of Artificial Sequence: Synthetic DNA sequence of Caldicellulosiruptor TOK13B DNA Polymerase D770P
atgaaatacctgctgccgaccgctgctgctggtctgctgctcctcgctgcccagccggcgatggccatggaatttgttatttttgatgggaatagtattctgtatagagctttttttgccttgccacagcttactacctcaacaggcatacctacaaatgctatatatggttttttgaatgtgctgttaaaatacttagattctgaaaaaccggattatgtagcagtagcttttgacaaaaaaggcagagctgtccgaaaaagtgaatatgaagaatacaaggctaacagaaaaccgatgccagattctcttcaggttcagataccttacgtaagagaaatacttgctgctctgaacattcctgtactgaaatgtgaagggtatgaagctgatgacgttataggcacacttgtaaatagatttaaagcccaggatttagagattgtgataataaccggagacagagatacacttcagttacttgataaaaatgtaattgtcaaaatagtcacaacaaggtttgacaggacaactgaagatttgtatgctgtagaaaatgtaaaagaaaaatatggtgtttttgcgcatcaggttgttgactataaagcattagtaggtgatgcgtcagacaatataccaggtgttaagggaattggagataaaactgccataaagctgttagaagagtaccagactctggagaatatatatcagaatctaaataacattaaaggagcgctaaaagagaagttggaatcaggaaaagacatggcatttttatcaaaaagactggctactatcatatgcgatttaccaattgaggtgaatcttgaagaattaaaaaccaaagaatgggacaaagaaagactttatcagattttacttcaacttgagtttaaaagctttattaaaagactgggcttttcagaagagattaactatgcaaggcagaactttcagctacctgaatttagtattaaagaacttcgtgatgtttcagcaatagggggcaaagaaatctatctattgtactcagatgaagaaggacttttttatatttatgaccatcaaacctcaaccatttttacaacttctgataaggaagctattaaagatcttttaacactccaaagcattcaaaaggttgtatatgatttaaaaaatatactccataaggtggactttgatgaagctaatcagataaaaaattgtaatgatgttatgttggcttcatatgttttggacagtacacgcagttcgtacgatttggaaacattgtttatttcttatctcaacactgatatagctgcaatcaaagagaatagatgggctggtgctacagttttattaagaaatctttgggatgaactttcaaaactcattgatttaaactcggcccaatacgtttatgagagcatagagatgcctcttgttcccattttatatgaaatggagaaaatcggttttaaggttgacaaaaacactttgcaggagtatacaaaagagattgagagcaagcttttaaagttggaatcacagatttatcaaatagccggtgaatggtttaacataaactcgccaaaacaactctcatatatattattcgaaaaactgaagcttccggttgttaaaaagaccaaaacaggatattcaacagatgccgaggtattagaagagctgtatgataaacatgacataataccgcttattctggattatagaatgtatacgaaaatactgacaacttactgtcagggactggttcaggcaataaatcctgcaactggaagaattcataccaactttattcagacaggtacggcaactggaagacttgcaagtgcagagcccaatctgcaaaatattcctgtaaaatatgatgagggaaagctaataagaaaggcatttgttccagatgaaggttatgtgttgatagatgctgattattctcagattgagcttagaatacttgcacatatctctgaggatgaacgactgataaatgcttttaaaaataaccttgatattcattcacagacggcggcagagatctttggtgtggatataagtcaggttacaccaattatgcgaagccaggcaaaagcagttaactttggaattgtatatggtatatctgattatggactttcacgggatataaagatttcaagaaaagaagcagccgagtttattaatcgttattttgaaaagtatcccagagtaaaagaatatttggacaatgtcgtcaagtttgcccgtgaaaacggatttgttttgacaatatttaacaggaaaaggtatatcaagcctataaagtctactaataaaaacctgagaaactatgcagagagaatagcaatgaattcacctatccagggaagtgctgcagatattatgaaaatagcaatgataagagtttataaaaagctaaaagaaaacaatttaaaatcaagaattattctgcaggtccatgacgaacttttgattgaatcaccctatgaagagaaagagatagtaaaggaaatagtaaaatcggagatggaaaatgcggttttattgaaagttcctttggtagttgaagtgaaagaaggttcaaattggtatgaaacaaagtaaaggatcc

SEQ ID NO: 1553 - DNA, 2623 bp, Artificial Sequence
  Description of Artificial Sequence: Synthetic DNA sequence of Caldicellulosiruptor TOK13B DNA Polymerase D770S
atgaaatacctgctgccgaccgctgctgctggtctgctgctcctcgctgcccagccggcgatggccatggaatttgttatttttgatgggaatagtattctgtatagagctttttttgccttgccacagcttactacctcaacaggcatacctacaaatgctatatatggttttttgaatgtgctgttaaaatacttagattctgaaaaaccggattatgtagcagtagcttttgacaaaaaaggcagagctgtccgaaaaagtgaatatgaagaatacaaggctaacagaaaaccgatgccagattctcttcaggttcagataccttacgtaagagaaatacttgctgctctgaacattcctgtactgaaatgtgaagggtatgaagctgatgacgttataggcacacttgtaaatagatttaaagcccaggatttagagattgtgataataaccggagacagagatacacttcagttacttgataaaaatgtaattgtcaaaatagtcacaacaaggtttgacaggacaactgaagatttgtatgctgtagaaaatgtaaaagaaaaatatggtgtttttgcgcatcaggttgttgactataaagcattagtaggtgatgcgtcagacaatataccaggtgttaagggaattggagataaaactgccataaagctgttagaagagtaccagactctggagaatatatatcagaatctaaataacattaaaggagcgctaaaagagaagttggaatcaggaaaagacatggcatttttatcaaaaagactggctactatcatatgcgatttaccaattgaggtgaatcttgaagaattaaaaaccaaagaatgggacaaagaaagactttatcagattttacttcaacttgagtttaaaagctttattaaaagactgggcttttcagaagagattaactatgcaaggcagaactttcagctacctgaatttagtattaaagaacttcgtgatgtttcagcaatagggggcaaagaaatctatctattgtactcagatgaagaaggacttttttatatttatgaccatcaaacctcaaccatttttacaacttctgataaggaagctattaaagatcttttaacactccaaagcattcaaaaggttgtatatgatttaaaaaatatactccataaggtggactttgatgaagctaatcagataaaaaattgtaatgatgttatgttggcttcatatgttttggacagtacacgcagttcgtacgatttggaaacattgtttatttcttatctcaacactgatatagctgcaatcaaagagaatagatgggctggtgctacagttttattaagaaatctttgggatgaactttcaaaactcattgatttaaactcggcccaatacgtttatgagagcatagagatgcctcttgttcccattttatatgaaatggagaaaatcggttttaaggttgacaaaaacactttgcaggagtatacaaaagagattgagagcaagcttttaaagttggaatcacagatttatcaaatagccggtgaatggtttaacataaactcgccaaaacaactctcatatatattattcgaaaaactgaagcttccggttgttaaaaagaccaaaacaggatattcaacagatgccgaggtattagaagagctgtatgataaacatgacataataccgcttattctggattatagaatgtatacgaaaatactgacaacttactgtcagggactggttcaggcaataaatcctgcaactggaagaattcataccaactttattcagacaggtacggcaactggaagacttgcaagtgcagagcccaatctgcaaaatattcctgtaaaatatgatgagggaaagctaataagaaaggcatttgttccagatgaaggttatgtgttgatagatgctgattattctcagattgagcttagaatacttgcacatatctctgaggatgaacgactgataaatgcttttaaaaataaccttgatattcattcacagacggcggcagagatctttggtgtggatataagtcaggttacaccaattatgcgaagccaggcaaaagcagttaactttggaattgtatatggtatatctgattatggactttcacgggatataaagatttcaagaaaagaagcagccgagtttattaatcgttattttgaaaagtatcccagagtaaaagaatatttggacaatgtcgtcaagtttgcccgtgaaaacggatttgttttgacaatatttaacaggaaaaggtatatcaagtctataaagtctactaataaaaacctgagaaactatgcagagagaatagcaatgaattcacctatccagggaagtgctgcagatattatgaaaatagcaatgataagagtttataaaaagctaaaagaaaacaatttaaaatcaagaattattctgcaggtccatgacgaacttttgattgaatcaccctatgaagagaaagagatagtaaaggaaatagtaaaatcggagatggaaaatgcggttttattgaaagttcctttggtagttgaagtgaaagaaggttcaaattggtatgaaacaaagtaaaggatcc

SEQ ID NO: 1554 - DNA, 2623 bp, Artificial Sequence
  Description of Artificial Sequence: Synthetic DNA sequence of Caldicellulosiruptor TOK13B DNA Polymerase D770T
atgaaatacctgctgccgaccgctgctgctggtctgctgctcctcgctgcccagccggcgatggccatggaatttgttatttttgatgggaatagtattctgtatagagctttttttgccttgccacagcttactacctcaacaggcatacctacaaatgctatatatggttttttgaatgtgctgttaaaatacttagattctgaaaaaccggattatgtagcagtagcttttgacaaaaaaggcagagctgtccgaaaaagtgaatatgaagaatacaaggctaacagaaaaccgatgccagattctcttcaggttcagataccttacgtaagagaaatacttgctgctctgaacattcctgtactgaaatgtgaagggtatgaagctgatgacgttataggcacacttgtaaatagatttaaagcccaggatttagagattgtgataataaccggagacagagatacacttcagttacttgataaaaatgtaattgtcaaaatagtcacaacaaggtttgacaggacaactgaagatttgtatgctgtagaaaatgtaaaagaaaaatatggtgtttttgcgcatcaggttgttgactataaagcattagtaggtgatgcgtcagacaatataccaggtgttaagggaattggagataaaactgccataaagctgttagaagagtaccagactctggagaatatatatcagaatctaaataacattaaaggagcgctaaaagagaagttggaatcaggaaaagacatggcatttttatcaaaaagactggctactatcatatgcgatttaccaattgaggtgaatcttgaagaattaaaaaccaaagaatgggacaaagaaagactttatcagattttacttcaacttgagtttaaaagctttattaaaagactgggcttttcagaagagattaactatgcaaggcagaactttcagctacctgaatttagtattaaagaacttcgtgatgtttcagcaatagggggcaaagaaatctatctattgtactcagatgaagaaggacttttttatatttatgaccatcaaacctcaaccatttttacaacttctgataaggaagctattaaagatcttttaacactccaaagcattcaaaaggttgtatatgatttaaaaaatatactccataaggtggactttgatgaagctaatcagataaaaaattgtaatgatgttatgttggcttcatatgttttggacagtacacgcagttcgtacgatttggaaacattgtttatttcttatctcaacactgatatagctgcaatcaaagagaatagatgggctggtgctacagttttattaagaaatctttgggatgaactttcaaaactcattgatttaaactcggcccaatacgtttatgagagcatagagatgcctcttgttcccattttatatgaaatggagaaaatcggttttaaggttgacaaaaacactttgcaggagtatacaaaagagattgagagcaagcttttaaagttggaatcacagatttatcaaatagccggtgaatggtttaacataaactcgccaaaacaactctcatatatattattcgaaaaactgaagcttccggttgttaaaaagaccaaaacaggatattcaacagatgccgaggtattagaagagctgtatgataaacatgacataataccgcttattctggattatagaatgtatacgaaaatactgacaacttactgtcagggactggttcaggcaataaatcctgcaactggaagaattcataccaactttattcagacaggtacggcaactggaagacttgcaagtgcagagcccaatctgcaaaatattcctgtaaaatatgatgagggaaagctaataagaaaggcatttgttccagatgaaggttatgtgttgatagatgctgattattctcagattgagcttagaatacttgcacatatctctgaggatgaacgactgataaatgcttttaaaaataaccttgatattcattcacagacggcggcagagatctttggtgtggatataagtcaggttacaccaattatgcgaagccaggcaaaagcagttaactttggaattgtatatggtatatctgattatggactttcacgggatataaagatttcaagaaaagaagcagccgagtttattaatcgttattttgaaaagtatcccagagtaaaagaatatttggacaatgtcgtcaagtttgcccgtgaaaacggatttgttttgacaatatttaacaggaaaaggtatatcaagactataaagtctactaataaaaacctgagaaactatgcagagagaatagcaatgaattcacctatccagggaagtgctgcagatattatgaaaatagcaatgataagagtttataaaaagctaaaagaaaacaatttaaaatcaagaattattctgcaggtccatgacgaacttttgattgaatcaccctatgaagagaaagagatagtaaaggaaatagtaaaatcggagatggaaaatgcggttttattgaaagttcctttggtagttgaagtgaaagaaggttcaaattggtatgaaacaaagtaaaggatcc

SEQ ID NO: 1555 - DNA, 2623 bp, Artificial Sequence
  Description of Artificial Sequence: Synthetic DNA sequence of Caldicellulosiruptor TOK13B DNA Polymerase D770W
atgaaatacctgctgccgaccgctgctgctggtctgctgctcctcgctgcccagccggcgatggccatggaatttgttatttttgatgggaatagtattctgtatagagctttttttgccttgccacagcttactacctcaacaggcatacctacaaatgctatatatggttttttgaatgtgctgttaaaatacttagattctgaaaaaccggattatgtagcagtagcttttgacaaaaaaggcagagctgtccgaaaaagtgaatatgaagaatacaaggctaacagaaaaccgatgccagattctcttcaggttcagataccttacgtaagagaaatacttgctgctctgaacattcctgtactgaaatgtgaagggtatgaagctgatgacgttataggcacacttgtaaatagatttaaagcccaggatttagagattgtgataataaccggagacagagatacacttcagttacttgataaaaatgtaattgtcaaaatagtcacaacaaggtttgacaggacaactgaagatttgtatgctgtagaaaatgtaaaagaaaaatatggtgtttttgcgcatcaggttgttgactataaagcattagtaggtgatgcgtcagacaatataccaggtgttaagggaattggagataaaactgccataaagctgttagaagagtaccagactctggagaatatatatcagaatctaaataacattaaaggagcgctaaaagagaagttggaatcaggaaaagacatggcatttttatcaaaaagactggctactatcatatgcgatttaccaattgaggtgaatcttgaagaattaaaaaccaaagaatgggacaaagaaagactttatcagattttacttcaacttgagtttaaaagctttattaaaagactgggcttttcagaagagattaactatgcaaggcagaactttcagctacctgaatttagtattaaagaacttcgtgatgtttcagcaatagggggcaaagaaatctatctattgtactcagatgaagaaggacttttttatatttatgaccatcaaacctcaaccatttttacaacttctgataaggaagctattaaagatcttttaacactccaaagcattcaaaaggttgtatatgatttaaaaaatatactccataaggtggactttgatgaagctaatcagataaaaaattgtaatgatgttatgttggcttcatatgttttggacagtacacgcagttcgtacgatttggaaacattgtttatttcttatctcaacactgatatagctgcaatcaaagagaatagatgggctggtgctacagttttattaagaaatctttgggatgaactttcaaaactcattgatttaaactcggcccaatacgtttatgagagcatagagatgcctcttgttcccattttatatgaaatggagaaaatcggttttaaggttgacaaaaacactttgcaggagtatacaaaagagattgagagcaagcttttaaagttggaatcacagatttatcaaatagccggtgaatggtttaacataaactcgccaaaacaactctcatatatattattcgaaaaactgaagcttccggttgttaaaaagaccaaaacaggatattcaacagatgccgaggtattagaagagctgtatgataaacatgacataataccgcttattctggattatagaatgtatacgaaaatactgacaacttactgtcagggactggttcaggcaataaatcctgcaactggaagaattcataccaactttattcagacaggtacggcaactggaagacttgcaagtgcagagcccaatctgcaaaatattcctgtaaaatatgatgagggaaagctaataagaaaggcatttgttccagatgaaggttatgtgttgatagatgctgattattctcagattgagcttagaatacttgcacatatctctgaggatgaacgactgataaatgcttttaaaaataaccttgatattcattcacagacggcggcagagatctttggtgtggatataagtcaggttacaccaattatgcgaagccaggcaaaagcagttaactttggaattgtatatggtatatctgattatggactttcacgggatataaagatttcaagaaaagaagcagccgagtttattaatcgttattttgaaaagtatcccagagtaaaagaatatttggacaatgtcgtcaagtttgcccgtgaaaacggatttgttttgacaatatttaacaggaaaaggtatatcaagtggataaagtctactaataaaaacctgagaaactatgcagagagaatagcaatgaattcacctatccagggaagtgctgcagatattatgaaaatagcaatgataagagtttataaaaagctaaaagaaaacaatttaaaatcaagaattattctgcaggtccatgacgaacttttgattgaatcaccctatgaagagaaagagatagtaaaggaaatagtaaaatcggagatggaaaatgcggttttattgaaagttcctttggtagttgaagtgaaagaaggttcaaattggtatgaaacaaagtaaaggatcc

SEQ ID NO: 1556 - DNA, 2623 bp, Artificial Sequence
  Description of Artificial Sequence: Synthetic DNA sequence of Caldicellulosiruptor TOK13B DNA Polymerase D770Y
atgaaatacctgctgccgaccgctgctgctggtctgctgctcctcgctgcccagccggcgatggccatggaatttgttatttttgatgggaatagtattctgtatagagctttttttgccttgccacagcttactacctcaacaggcatacctacaaatgctatatatggttttttgaatgtgctgttaaaatacttagattctgaaaaaccggattatgtagcagtagcttttgacaaaaaaggcagagctgtccgaaaaagtgaatatgaagaatacaaggctaacagaaaaccgatgccagattctcttcaggttcagataccttacgtaagagaaatacttgctgctctgaacattcctgtactgaaatgtgaagggtatgaagctgatgacgttataggcacacttgtaaatagatttaaagcccaggatttagagattgtgataataaccggagacagagatacacttcagttacttgataaaaatgtaattgtcaaaatagtcacaacaaggtttgacaggacaactgaagatttgtatgctgtagaaaatgtaaaagaaaaatatggtgtttttgcgcatcaggttgttgactataaagcattagtaggtgatgcgtcagacaatataccaggtgttaagggaattggagataaaactgccataaagctgttagaagagtaccagactctggagaatatatatcagaatctaaataacattaaaggagcgctaaaagagaagttggaatcaggaaaagacatggcatttttatcaaaaagactggctactatcatatgcgatttaccaattgaggtgaatcttgaagaattaaaaaccaaagaatgggacaaagaaagactttatcagattttacttcaacttgagtttaaaagctttattaaaagactgggcttttcagaagagattaactatgcaaggcagaactttcagctacctgaatttagtattaaagaacttcgtgatgtttcagcaatagggggcaaagaaatctatctattgtactcagatgaagaaggacttttttatatttatgaccatcaaacctcaaccatttttacaacttctgataaggaagctattaaagatcttttaacactccaaagcattcaaaaggttgtatatgatttaaaaaatatactccataaggtggactttgatgaagctaatcagataaaaaattgtaatgatgttatgttggcttcatatgttttggacagtacacgcagttcgtacgatttggaaacattgtttatttcttatctcaacactgatatagctgcaatcaaagagaatagatgggctggtgctacagttttattaagaaatctttgggatgaactttcaaaactcattgatttaaactcggcccaatacgtttatgagagcatagagatgcctcttgttcccattttatatgaaatggagaaaatcggttttaaggttgacaaaaacactttgcaggagtatacaaaagagattgagagcaagcttttaaagttggaatcacagatttatcaaatagccggtgaatggtttaacataaactcgccaaaacaactctcatatatattattcgaaaaactgaagcttccggttgttaaaaagaccaaaacaggatattcaacagatgccgaggtattagaagagctgtatgataaacatgacataataccgcttattctggattatagaatgtatacgaaaatactgacaacttactgtcagggactggttcaggcaataaatcctgcaactggaagaattcataccaactttattcagacaggtacggcaactggaagacttgcaagtgcagagcccaatctgcaaaatattcctgtaaaatatgatgagggaaagctaataagaaaggcatttgttccagatgaaggttatgtgttgatagatgctgattattctcagattgagcttagaatacttgcacatatctctgaggatgaacgactgataaatgcttttaaaaataaccttgatattcattcacagacggcggcagagatctttggtgtggatataagtcaggttacaccaattatgcgaagccaggcaaaagcagttaactttggaattgtatatggtatatctgattatggactttcacgggatataaagatttcaagaaaagaagcagccgagtttattaatcgttattttgaaaagtatcccagagtaaaagaatatttggacaatgtcgtcaagtttgcccgtgaaaacggatttgttttgacaatatttaacaggaaaaggtatatcaagtatataaagtctactaataaaaacctgagaaactatgcagagagaatagcaatgaattcacctatccagggaagtgctgcagatattatgaaaatagcaatgataagagtttataaaaagctaaaagaaaacaatttaaaatcaagaattattctgcaggtccatgacgaacttttgattgaatcaccctatgaagagaaagagatagtaaaggaaatagtaaaatcggagatggaaaatgcggttttattgaaagttcctttggtagttgaagtgaaagaaggttcaaattggtatgaaacaaagtaaaggatcc

SEQ ID NO: 1557 - DNA, 2623 bp, Artificial Sequence
  Description of Artificial Sequence: Synthetic DNA sequence of Caldicellulosiruptor TOK13B DNA Polymerase D770V
atgaaatacctgctgccgaccgctgctgctggtctgctgctcctcgctgcccagccggcgatggccatggaatttgttatttttgatgggaatagtattctgtatagagctttttttgccttgccacagcttactacctcaacaggcatacctacaaatgctatatatggttttttgaatgtgctgttaaaatacttagattctgaaaaaccggattatgtagcagtagcttttgacaaaaaaggcagagctgtccgaaaaagtgaatatgaagaatacaaggctaacagaaaaccgatgccagattctcttcaggttcagataccttacgtaagagaaatacttgctgctctgaacattcctgtactgaaatgtgaagggtatgaagctgatgacgttataggcacacttgtaaatagatttaaagcccaggatttagagattgtgataataaccggagacagagatacacttcagttacttgataaaaatgtaattgtcaaaatagtcacaacaaggtttgacaggacaactgaagatttgtatgctgtagaaaatgtaaaagaaaaatatggtgtttttgcgcatcaggttgttgactataaagcattagtaggtgatgcgtcagacaatataccaggtgttaagggaattggagataaaactgccataaagctgttagaagagtaccagactctggagaatatatatcagaatctaaataacattaaaggagcgctaaaagagaagttggaatcaggaaaagacatggcatttttatcaaaaagactggctactatcatatgcgatttaccaattgaggtgaatcttgaagaattaaaaaccaaagaatgggacaaagaaagactttatcagattttacttcaacttgagtttaaaagctttattaaaagactgggcttttcagaagagattaactatgcaaggcagaactttcagctacctgaatttagtattaaagaacttcgtgatgtttcagcaatagggggcaaagaaatctatctattgtactcagatgaagaaggacttttttatatttatgaccatcaaacctcaaccatttttacaacttctgataaggaagctattaaagatcttttaacactccaaagcattcaaaaggttgtatatgatttaaaaaatatactccataaggtggactttgatgaagctaatcagataaaaaattgtaatgatgttatgttggcttcatatgttttggacagtacacgcagttcgtacgatttggaaacattgtttatttcttatctcaacactgatatagctgcaatcaaagagaatagatgggctggtgctacagttttattaagaaatctttgggatgaactttcaaaactcattgatttaaactcggcccaatacgtttatgagagcatagagatgcctcttgttcccattttatatgaaatggagaaaatcggttttaaggttgacaaaaacactttgcaggagtatacaaaagagattgagagcaagcttttaaagttggaatcacagatttatcaaatagccggtgaatggtttaacataaactcgccaaaacaactctcatatatattattcgaaaaactgaagcttccggttgttaaaaagaccaaaacaggatattcaacagatgccgaggtattagaagagctgtatgataaacatgacataataccgcttattctggattatagaatgtatacgaaaatactgacaacttactgtcagggactggttcaggcaataaatcctgcaactggaagaattcataccaactttattcagacaggtacggcaactggaagacttgcaagtgcagagcccaatctgcaaaatattcctgtaaaatatgatgagggaaagctaataagaaaggcatttgttccagatgaaggttatgtgttgatagatgctgattattctcagattgagcttagaatacttgcacatatctctgaggatgaacgactgataaatgcttttaaaaataaccttgatattcattcacagacggcggcagagatctttggtgtggatataagtcaggttacaccaattatgcgaagccaggcaaaagcagttaactttggaattgtatatggtatatctgattatggactttcacgggatataaagatttcaagaaaagaagcagccgagtttattaatcgttattttgaaaagtatcccagagtaaaagaatatttggacaatgtcgtcaagtttgcccgtgaaaacggatttgttttgacaatatttaacaggaaaaggtatatcaaggttataaagtctactaataaaaacctgagaaactatgcagagagaatagcaatgaattcacctatccagggaagtgctgcagatattatgaaaatagcaatgataagagtttataaaaagctaaaagaaaacaatttaaaatcaagaattattctgcaggtccatgacgaacttttgattgaatcaccctatgaagagaaagagatagtaaaggaaatagtaaaatcggagatggaaaatgcggttttattgaaagttcctttggtagttgaagtgaaagaaggttcaaattggtatgaaacaaagtaaaggatcc

SEQ ID NO: 1558 - DNA, 2623 bp, Artificial Sequence
  Description of Artificial Sequence: Synthetic DNA sequence of Caldicellulosiruptor TOK13B DNA Polymerase I771A
atgaaatacctgctgccgaccgctgctgctggtctgctgctcctcgctgcccagccggcgatggccatggaatttgttatttttgatgggaatagtattctgtatagagctttttttgccttgccacagcttactacctcaacaggcatacctacaaatgctatatatggttttttgaatgtgctgttaaaatacttagattctgaaaaaccggattatgtagcagtagcttttgacaaaaaaggcagagctgtccgaaaaagtgaatatgaagaatacaaggctaacagaaaaccgatgccagattctcttcaggttcagataccttacgtaagagaaatacttgctgctctgaacattcctgtactgaaatgtgaagggtatgaagctgatgacgttataggcacacttgtaaatagatttaaagcccaggatttagagattgtgataataaccggagacagagatacacttcagttacttgataaaaatgtaattgtcaaaatagtcacaacaaggtttgacaggacaactgaagatttgtatgctgtagaaaatgtaaaagaaaaatatggtgtttttgcgcatcaggttgttgactataaagcattagtaggtgatgcgtcagacaatataccaggtgttaagggaattggagataaaactgccataaagctgttagaagagtaccagactctggagaatatatatcagaatctaaataacattaaaggagcgctaaaagagaagttggaatcaggaaaagacatggcatttttatcaaaaagactggctactatcatatgcgatttaccaattgaggtgaatcttgaagaattaaaaaccaaagaatgggacaaagaaagactttatcagattttacttcaacttgagtttaaaagctttattaaaagactgggcttttcagaagagattaactatgcaaggcagaactttcagctacctgaatttagtattaaagaacttcgtgatgtttcagcaatagggggcaaagaaatctatctattgtactcagatgaagaaggacttttttatatttatgaccatcaaacctcaaccatttttacaacttctgataaggaagctattaaagatcttttaacactccaaagcattcaaaaggttgtatatgatttaaaaaatatactccataaggtggactttgatgaagctaatcagataaaaaattgtaatgatgttatgttggcttcatatgttttggacagtacacgcagttcgtacgatttggaaacattgtttatttcttatctcaacactgatatagctgcaatcaaagagaatagatgggctggtgctacagttttattaagaaatctttgggatgaactttcaaaactcattgatttaaactcggcccaatacgtttatgagagcatagagatgcctcttgttcccattttatatgaaatggagaaaatcggttttaaggttgacaaaaacactttgcaggagtatacaaaagagattgagagcaagcttttaaagttggaatcacagatttatcaaatagccggtgaatggtttaacataaactcgccaaaacaactctcatatatattattcgaaaaactgaagcttccggttgttaaaaagaccaaaacaggatattcaacagatgccgaggtattagaagagctgtatgataaacatgacataataccgcttattctggattatagaatgtatacgaaaatactgacaacttactgtcagggactggttcaggcaataaatcctgcaactggaagaattcataccaactttattcagacaggtacggcaactggaagacttgcaagtgcagagcccaatctgcaaaatattcctgtaaaatatgatgagggaaagctaataagaaaggcatttgttccagatgaaggttatgtgttgatagatgctgattattctcagattgagcttagaatacttgcacatatctctgaggatgaacgactgataaatgcttttaaaaataaccttgatattcattcacagacggcggcagagatctttggtgtggatataagtcaggttacaccaattatgcgaagccaggcaaaagcagttaactttggaattgtatatggtatatctgattatggactttcacgggatataaagatttcaagaaaagaagcagccgagtttattaatcgttattttgaaaagtatcccagagtaaaagaatatttggacaatgtcgtcaagtttgcccgtgaaaacggatttgttttgacaatatttaacaggaaaaggtatatcaaggatgctaagtctactaataaaaacctgagaaactatgcagagagaatagcaatgaattcacctatccagggaagtgctgcagatattatgaaaatagcaatgataagagtttataaaaagctaaaagaaaacaatttaaaatcaagaattattctgcaggtccatgacgaacttttgattgaatcaccctatgaagagaaagagatagtaaaggaaatagtaaaatcggagatggaaaatgcggttttattgaaagttcctttggtagttgaagtgaaagaaggttcaaattggtatgaaacaaagtaaaggatcc

SEQ ID NO: 1559 - DNA, 2623 bp, Artificial Sequence
  Description of Artificial Sequence: Synthetic DNA sequence of Caldicellulosiruptor TOK13B DNA Polymerase I771R
atgaaatacctgctgccgaccgctgctgctggtctgctgctcctcgctgcccagccggcgatggccatggaatttgttatttttgatgggaatagtattctgtatagagctttttttgccttgccacagcttactacctcaacaggcatacctacaaatgctatatatggttttttgaatgtgctgttaaaatacttagattctgaaaaaccggattatgtagcagtagcttttgacaaaaaaggcagagctgtccgaaaaagtgaatatgaagaatacaaggctaacagaaaaccgatgccagattctcttcaggttcagataccttacgtaagagaaatacttgctgctctgaacattcctgtactgaaatgtgaagggtatgaagctgatgacgttataggcacacttgtaaatagatttaaagcccaggatttagagattgtgataataaccggagacagagatacacttcagttacttgataaaaatgtaattgtcaaaatagtcacaacaaggtttgacaggacaactgaagatttgtatgctgtagaaaatgtaaaagaaaaatatggtgtttttgcgcatcaggttgttgactataaagcattagtaggtgatgcgtcagacaatataccaggtgttaagggaattggagataaaactgccataaagctgttagaagagtaccagactctggagaatatatatcagaatctaaataacattaaaggagcgctaaaagagaagttggaatcaggaaaagacatggcatttttatcaaaaagactggctactatcatatgcgatttaccaattgaggtgaatcttgaagaattaaaaaccaaagaatgggacaaagaaagactttatcagattttacttcaacttgagtttaaaagctttattaaaagactgggcttttcagaagagattaactatgcaaggcagaactttcagctacctgaatttagtattaaagaacttcgtgatgtttcagcaatagggggcaaagaaatctatctattgtactcagatgaagaaggacttttttatatttatgaccatcaaacctcaaccatttttacaacttctgataaggaagctattaaagatcttttaacactccaaagcattcaaaaggttgtatatgatttaaaaaatatactccataaggtggactttgatgaagctaatcagataaaaaattgtaatgatgttatgttggcttcatatgttttggacagtacacgcagttcgtacgatttggaaacattgtttatttcttatctcaacactgatatagctgcaatcaaagagaatagatgggctggtgctacagttttattaagaaatctttgggatgaactttcaaaactcattgatttaaactcggcccaatacgtttatgagagcatagagatgcctcttgttcccattttatatgaaatggagaaaatcggttttaaggttgacaaaaacactttgcaggagtatacaaaagagattgagagcaagcttttaaagttggaatcacagatttatcaaatagccggtgaatggtttaacataaactcgccaaaacaactctcatatatattattcgaaaaactgaagcttccggttgttaaaaagaccaaaacaggatattcaacagatgccgaggtattagaagagctgtatgataaacatgacataataccgcttattctggattatagaatgtatacgaaaatactgacaacttactgtcagggactggttcaggcaataaatcctgcaactggaagaattcataccaactttattcagacaggtacggcaactggaagacttgcaagtgcagagcccaatctgcaaaatattcctgtaaaatatgatgagggaaagctaataagaaaggcatttgttccagatgaaggttatgtgttgatagatgctgattattctcagattgagcttagaatacttgcacatatctctgaggatgaacgactgataaatgcttttaaaaataaccttgatattcattcacagacggcggcagagatctttggtgtggatataagtcaggttacaccaattatgcgaagccaggcaaaagcagttaactttggaattgtatatggtatatctgattatggactttcacgggatataaagatttcaagaaaagaagcagccgagtttattaatcgttattttgaaaagtatcccagagtaaaagaatatttggacaatgtcgtcaagtttgcccgtgaaaacggatttgttttgacaatatttaacaggaaaaggtatatcaaggatcgtaagtctactaataaaaacctgagaaactatgcagagagaatagcaatgaattcacctatccagggaagtgctgcagatattatgaaaatagcaatgataagagtttataaaaagctaaaagaaaacaatttaaaatcaagaattattctgcaggtccatgacgaacttttgattgaatcaccctatgaagagaaagagatagtaaaggaaatagtaaaatcggagatggaaaatgcggttttattgaaagttcctttggtagttgaagtgaaagaaggttcaaattggtatgaaacaaagtaaaggatcc

SEQ ID NO: 1560 - DNA, 2623 bp, Artificial Sequence
  Description of Artificial Sequence: Synthetic DNA sequence of Caldicellulosiruptor TOK13B DNA Polymerase I771N
atgaaatacctgctgccgaccgctgctgctggtctgctgctcctcgctgcccagccggcgatggccatggaatttgttatttttgatgggaatagtattctgtatagagctttttttgccttgccacagcttactacctcaacaggcatacctacaaatgctatatatggttttttgaatgtgctgttaaaatacttagattctgaaaaaccggattatgtagcagtagcttttgacaaaaaaggcagagctgtccgaaaaagtgaatatgaagaatacaaggctaacagaaaaccgatgccagattctcttcaggttcagataccttacgtaagagaaatacttgctgctctgaacattcctgtactgaaatgtgaagggtatgaagctgatgacgttataggcacacttgtaaatagatttaaagcccaggatttagagattgtgataataaccggagacagagatacacttcagttacttgataaaaatgtaattgtcaaaatagtcacaacaaggtttgacaggacaactgaagatttgtatgctgtagaaaatgtaaaagaaaaatatggtgtttttgcgcatcaggttgttgactataaagcattagtaggtgatgcgtcagacaatataccaggtgttaagggaattggagataaaactgccataaagctgttagaagagtaccagactctggagaatatatatcagaatctaaataacattaaaggagcgctaaaagagaagttggaatcaggaaaagacatggcatttttatcaaaaagactggctactatcatatgcgatttaccaattgaggtgaatcttgaagaattaaaaaccaaagaatgggacaaagaaagactttatcagattttacttcaacttgagtttaaaagctttattaaaagactgggcttttcagaagagattaactatgcaaggcagaactttcagctacctgaatttagtattaaagaacttcgtgatgtttcagcaatagggggcaaagaaatctatctattgtactcagatgaagaaggacttttttatatttatgaccatcaaacctcaaccatttttacaacttctgataaggaagctattaaagatcttttaacactccaaagcattcaaaaggttgtatatgatttaaaaaatatactccataaggtggactttgatgaagctaatcagataaaaaattgtaatgatgttatgttggcttcatatgttttggacagtacacgcagttcgtacgatttggaaacattgtttatttcttatctcaacactgatatagctgcaatcaaagagaatagatgggctggtgctacagttttattaagaaatctttgggatgaactttcaaaactcattgatttaaactcggcccaatacgtttatgagagcatagagatgcctcttgttcccattttatatgaaatggagaaaatcggttttaaggttgacaaaaacactttgcaggagtatacaaaagagattgagagcaagcttttaaagttggaatcacagatttatcaaatagccggtgaatggtttaacataaactcgccaaaacaactctcatatatattattcgaaaaactgaagcttccggttgttaaaaagaccaaaacaggatattcaacagatgccgaggtattagaagagctgtatgataaacatgacataataccgcttattctggattatagaatgtatacgaaaatactgacaacttactgtcagggactggttcaggcaataaatcctgcaactggaagaattcataccaactttattcagacaggtacggcaactggaagacttgcaagtgcagagcccaatctgcaaaatattcctgtaaaatatgatgagggaaagctaataagaaaggcatttgttccagatgaaggttatgtgttgatagatgctgattattctcagattgagcttagaatacttgcacatatctctgaggatgaacgactgataaatgcttttaaaaataaccttgatattcattcacagacggcggcagagatctttggtgtggatataagtcaggttacaccaattatgcgaagccaggcaaaagcagttaactttggaattgtatatggtatatctgattatggactttcacgggatataaagatttcaagaaaagaagcagccgagtttattaatcgttattttgaaaagtatcccagagtaaaagaatatttggacaatgtcgtcaagtttgcccgtgaaaacggatttgttttgacaatatttaacaggaaaaggtatatcaaggataataagtctactaataaaaacctgagaaactatgcagagagaatagcaatgaattcacctatccagggaagtgctgcagatattatgaaaatagcaatgataagagtttataaaaagctaaaagaaaacaatttaaaatcaagaattattctgcaggtccatgacgaacttttgattgaatcaccctatgaagagaaagagatagtaaaggaaatagtaaaatcggagatggaaaatgcggttttattgaaagttcctttggtagttgaagtgaaagaaggttcaaattggtatgaaacaaagtaaaggatcc

SEQ ID NO: 1561 - DNA, 2623 bp, Artificial Sequence
  Description of Artificial Sequence: Synthetic DNA sequence of Caldicellulosiruptor TOK13B DNA Polymerase I771D
atgaaatacctgctgccgaccgctgctgctggtctgctgctcctcgctgcccagccggcgatggccatggaatttgttatttttgatgggaatagtattctgtatagagctttttttgccttgccacagcttactacctcaacaggcatacctacaaatgctatatatggttttttgaatgtgctgttaaaatacttagattctgaaaaaccggattatgtagcagtagcttttgacaaaaaaggcagagctgtccgaaaaagtgaatatgaagaatacaaggctaacagaaaaccgatgccagattctcttcaggttcagataccttacgtaagagaaatacttgctgctctgaacattcctgtactgaaatgtgaagggtatgaagctgatgacgttataggcacacttgtaaatagatttaaagcccaggatttagagattgtgataataaccggagacagagatacacttcagttacttgataaaaatgtaattgtcaaaatagtcacaacaaggtttgacaggacaactgaagatttgtatgctgtagaaaatgtaaaagaaaaatatggtgtttttgcgcatcaggttgttgactataaagcattagtaggtgatgcgtcagacaatataccaggtgttaagggaattggagataaaactgccataaagctgttagaagagtaccagactctggagaatatatatcagaatctaaataacattaaaggagcgctaaaagagaagttggaatcaggaaaagacatggcatttttatcaaaaagactggctactatcatatgcgatttaccaattgaggtgaatcttgaagaattaaaaaccaaagaatgggacaaagaaagactttatcagattttacttcaacttgagtttaaaagctttattaaaagactgggcttttcagaagagattaactatgcaaggcagaactttcagctacctgaatttagtattaaagaacttcgtgatgtttcagcaatagggggcaaagaaatctatctattgtactcagatgaagaaggacttttttatatttatgaccatcaaacctcaaccatttttacaacttctgataaggaagctattaaagatcttttaacactccaaagcattcaaaaggttgtatatgatttaaaaaatatactccataaggtggactttgatgaagctaatcagataaaaaattgtaatgatgttatgttggcttcatatgttttggacagtacacgcagttcgtacgatttggaaacattgtttatttcttatctcaacactgatatagctgcaatcaaagagaatagatgggctggtgctacagttttattaagaaatctttgggatgaactttcaaaactcattgatttaaactcggcccaatacgtttatgagagcatagagatgcctcttgttcccattttatatgaaatggagaaaatcggttttaaggttgacaaaaacactttgcaggagtatacaaaagagattgagagcaagcttttaaagttggaatcacagatttatcaaatagccggtgaatggtttaacataaactcgccaaaacaactctcatatatattattcgaaaaactgaagcttccggttgttaaaaagaccaaaacaggatattcaacagatgccgaggtattagaagagctgtatgataaacatgacataataccgcttattctggattatagaatgtatacgaaaatactgacaacttactgtcagggactggttcaggcaataaatcctgcaactggaagaattcataccaactttattcagacaggtacggcaactggaagacttgcaagtgcagagcccaatctgcaaaatattcctgtaaaatatgatgagggaaagctaataagaaaggcatttgttccagatgaaggttatgtgttgatagatgctgattattctcagattgagcttagaatacttgcacatatctctgaggatgaacgactgataaatgcttttaaaaataaccttgatattcattcacagacggcggcagagatctttggtgtggatataagtcaggttacaccaattatgcgaagccaggcaaaagcagttaactttggaattgtatatggtatatctgattatggactttcacgggatataaagatttcaagaaaagaagcagccgagtttattaatcgttattttgaaaagtatcccagagtaaaagaatatttggacaatgtcgtcaagtttgcccgtgaaaacggatttgttttgacaatatttaacaggaaaaggtatatcaaggatgataagtctactaataaaaacctgagaaactatgcagagagaatagcaatgaattcacctatccagggaagtgctgcagatattatgaaaatagcaatgataagagtttataaaaagctaaaagaaaacaatttaaaatcaagaattattctgcaggtccatgacgaacttttgattgaatcaccctatgaagagaaagagatagtaaaggaaatagtaaaatcggagatggaaaatgcggttttattgaaagttcctttggtagttgaagtgaaagaaggttcaaattggtatgaaacaaagtaaaggatcc

SEQ ID NO: 1562 - DNA, 2623 bp, Artificial Sequence
  Description of Artificial Sequence: Synthetic DNA sequence of Caldicellulosiruptor TOK13B DNA Polymerase I771C
atgaaatacctgctgccgaccgctgctgctggtctgctgctcctcgctgcccagccggcgatggccatggaatttgttatttttgatgggaatagtattctgtatagagctttttttgccttgccacagcttactacctcaacaggcatacctacaaatgctatatatggttttttgaatgtgctgttaaaatacttagattctgaaaaaccggattatgtagcagtagcttttgacaaaaaaggcagagctgtccgaaaaagtgaatatgaagaatacaaggctaacagaaaaccgatgccagattctcttcaggttcagataccttacgtaagagaaatacttgctgctctgaacattcctgtactgaaatgtgaagggtatgaagctgatgacgttataggcacacttgtaaatagatttaaagcccaggatttagagattgtgataataaccggagacagagatacacttcagttacttgataaaaatgtaattgtcaaaatagtcacaacaaggtttgacaggacaactgaagatttgtatgctgtagaaaatgtaaaagaaaaatatggtgtttttgcgcatcaggttgttgactataaagcattagtaggtgatgcgtcagacaatataccaggtgttaagggaattggagataaaactgccataaagctgttagaagagtaccagactctggagaatatatatcagaatctaaataacattaaaggagcgctaaaagagaagttggaatcaggaaaagacatggcatttttatcaaaaagactggctactatcatatgcgatttaccaattgaggtgaatcttgaagaattaaaaaccaaagaatgggacaaagaaagactttatcagattttacttcaacttgagtttaaaagctttattaaaagactgggcttttcagaagagattaactatgcaaggcagaactttcagctacctgaatttagtattaaagaacttcgtgatgtttcagcaatagggggcaaagaaatctatctattgtactcagatgaagaaggacttttttatatttatgaccatcaaacctcaaccatttttacaacttctgataaggaagctattaaagatcttttaacactccaaagcattcaaaaggttgtatatgatttaaaaaatatactccataaggtggactttgatgaagctaatcagataaaaaattgtaatgatgttatgttggcttcatatgttttggacagtacacgcagttcgtacgatttggaaacattgtttatttcttatctcaacactgatatagctgcaatcaaagagaatagatgggctggtgctacagttttattaagaaatctttgggatgaactttcaaaactcattgatttaaactcggcccaatacgtttatgagagcatagagatgcctcttgttcccattttatatgaaatggagaaaatcggttttaaggttgacaaaaacactttgcaggagtatacaaaagagattgagagcaagcttttaaagttggaatcacagatttatcaaatagccggtgaatggtttaacataaactcgccaaaacaactctcatatatattattcgaaaaactgaagcttccggttgttaaaaagaccaaaacaggatattcaacagatgccgaggtattagaagagctgtatgataaacatgacataataccgcttattctggattatagaatgtatacgaaaatactgacaacttactgtcagggactggttcaggcaataaatcctgcaactggaagaattcataccaactttattcagacaggtacggcaactggaagacttgcaagtgcagagcccaatctgcaaaatattcctgtaaaatatgatgagggaaagctaataagaaaggcatttgttccagatgaaggttatgtgttgatagatgctgattattctcagattgagcttagaatacttgcacatatctctgaggatgaacgactgataaatgcttttaaaaataaccttgatattcattcacagacggcggcagagatctttggtgtggatataagtcaggttacaccaattatgcgaagccaggcaaaagcagttaactttggaattgtatatggtatatctgattatggactttcacgggatataaagatttcaagaaaagaagcagccgagtttattaatcgttattttgaaaagtatcccagagtaaaagaatatttggacaatgtcgtcaagtttgcccgtgaaaacggatttgttttgacaatatttaacaggaaaaggtatatcaaggattgtaagtctactaataaaaacctgagaaactatgcagagagaatagcaatgaattcacctatccagggaagtgctgcagatattatgaaaatagcaatgataagagtttataaaaagctaaaagaaaacaatttaaaatcaagaattattctgcaggtccatgacgaacttttgattgaatcaccctatgaagagaaagagatagtaaaggaaatagtaaaatcggagatggaaaatgcggttttattgaaagttcctttggtagttgaagtgaaagaaggttcaaattggtatgaaacaaagtaaaggatcc

SEQ ID NO: 1563 - DNA, 2623 bp, Artificial Sequence
  Description of Artificial Sequence: Synthetic DNA sequence of Caldicellulosiruptor TOK13B DNA Polymerase I771E
atgaaatacctgctgccgaccgctgctgctggtctgctgctcctcgctgcccagccggcgatggccatggaatttgttatttttgatgggaatagtattctgtatagagctttttttgccttgccacagcttactacctcaacaggcatacctacaaatgctatatatggttttttgaatgtgctgttaaaatacttagattctgaaaaaccggattatgtagcagtagcttttgacaaaaaaggcagagctgtccgaaaaagtgaatatgaagaatacaaggctaacagaaaaccgatgccagattctcttcaggttcagataccttacgtaagagaaatacttgctgctctgaacattcctgtactgaaatgtgaagggtatgaagctgatgacgttataggcacacttgtaaatagatttaaagcccaggatttagagattgtgataataaccggagacagagatacacttcagttacttgataaaaatgtaattgtcaaaatagtcacaacaaggtttgacaggacaactgaagatttgtatgctgtagaaaatgtaaaagaaaaatatggtgtttttgcgcatcaggttgttgactataaagcattagtaggtgatgcgtcagacaatataccaggtgttaagggaattggagataaaactgccataaagctgttagaagagtaccagactctggagaatatatatcagaatctaaataacattaaaggagcgctaaaagagaagttggaatcaggaaaagacatggcatttttatcaaaaagactggctactatcatatgcgatttaccaattgaggtgaatcttgaagaattaaaaaccaaagaatgggacaaagaaagactttatcagattttacttcaacttgagtttaaaagctttattaaaagactgggcttttcagaagagattaactatgcaaggcagaactttcagctacctgaatttagtattaaagaacttcgtgatgtttcagcaatagggggcaaagaaatctatctattgtactcagatgaagaaggacttttttatatttatgaccatcaaacctcaaccatttttacaacttctgataaggaagctattaaagatcttttaacactccaaagcattcaaaaggttgtatatgatttaaaaaatatactccataaggtggactttgatgaagctaatcagataaaaaattgtaatgatgttatgttggcttcatatgttttggacagtacacgcagttcgtacgatttggaaacattgtttatttcttatctcaacactgatatagctgcaatcaaagagaatagatgggctggtgctacagttttattaagaaatctttgggatgaactttcaaaactcattgatttaaactcggcccaatacgtttatgagagcatagagatgcctcttgttcccattttatatgaaatggagaaaatcggttttaaggttgacaaaaacactttgcaggagtatacaaaagagattgagagcaagcttttaaagttggaatcacagatttatcaaatagccggtgaatggtttaacataaactcgccaaaacaactctcatatatattattcgaaaaactgaagcttccggttgttaaaaagaccaaaacaggatattcaacagatgccgaggtattagaagagctgtatgataaacatgacataataccgcttattctggattatagaatgtatacgaaaatactgacaacttactgtcagggactggttcaggcaataaatcctgcaactggaagaattcataccaactttattcagacaggtacggcaactggaagacttgcaagtgcagagcccaatctgcaaaatattcctgtaaaatatgatgagggaaagctaataagaaaggcatttgttccagatgaaggttatgtgttgatagatgctgattattctcagattgagcttagaatacttgcacatatctctgaggatgaacgactgataaatgcttttaaaaataaccttgatattcattcacagacggcggcagagatctttggtgtggatataagtcaggttacaccaattatgcgaagccaggcaaaagcagttaactttggaattgtatatggtatatctgattatggactttcacgggatataaagatttcaagaaaagaagcagccgagtttattaatcgttattttgaaaagtatcccagagtaaaagaatatttggacaatgtcgtcaagtttgcccgtgaaaacggatttgttttgacaatatttaacaggaaaaggtatatcaaggatgaaaagtctactaataaaaacctgagaaactatgcagagagaatagcaatgaattcacctatccagggaagtgctgcagatattatgaaaatagcaatgataagagtttataaaaagctaaaagaaaacaatttaaaatcaagaattattctgcaggtccatgacgaacttttgattgaatcaccctatgaagagaaagagatagtaaaggaaatagtaaaatcggagatggaaaatgcggttttattgaaagttcctttggtagttgaagtgaaagaaggttcaaattggtatgaaacaaagtaaaggatcc

SEQ ID NO: 1564 - DNA, 2623 bp, Artificial Sequence
  Description of Artificial Sequence: Synthetic DNA sequence of Caldicellulosiruptor TOK13B DNA Polymerase I771Q
atgaaatacctgctgccgaccgctgctgctggtctgctgctcctcgctgcccagccggcgatggccatggaatttgttatttttgatgggaatagtattctgtatagagctttttttgccttgccacagcttactacctcaacaggcatacctacaaatgctatatatggttttttgaatgtgctgttaaaatacttagattctgaaaaaccggattatgtagcagtagcttttgacaaaaaaggcagagctgtccgaaaaagtgaatatgaagaatacaaggctaacagaaaaccgatgccagattctcttcaggttcagataccttacgtaagagaaatacttgctgctctgaacattcctgtactgaaatgtgaagggtatgaagctgatgacgttataggcacacttgtaaatagatttaaagcccaggatttagagattgtgataataaccggagacagagatacacttcagttacttgataaaaatgtaattgtcaaaatagtcacaacaaggtttgacaggacaactgaagatttgtatgctgtagaaaatgtaaaagaaaaatatggtgtttttgcgcatcaggttgttgactataaagcattagtaggtgatgcgtcagacaatataccaggtgttaagggaattggagataaaactgccataaagctgttagaagagtaccagactctggagaatatatatcagaatctaaataacattaaaggagcgctaaaagagaagttggaatcaggaaaagacatggcatttttatcaaaaagactggctactatcatatgcgatttaccaattgaggtgaatcttgaagaattaaaaaccaaagaatgggacaaagaaagactttatcagattttacttcaacttgagtttaaaagctttattaaaagactgggcttttcagaagagattaactatgcaaggcagaactttcagctacctgaatttagtattaaagaacttcgtgatgtttcagcaatagggggcaaagaaatctatctattgtactcagatgaagaaggacttttttatatttatgaccatcaaacctcaaccatttttacaacttctgataaggaagctattaaagatcttttaacactccaaagcattcaaaaggttgtatatgatttaaaaaatatactccataaggtggactttgatgaagctaatcagataaaaaattgtaatgatgttatgttggcttcatatgttttggacagtacacgcagttcgtacgatttggaaacattgtttatttcttatctcaacactgatatagctgcaatcaaagagaatagatgggctggtgctacagttttattaagaaatctttgggatgaactttcaaaactcattgatttaaactcggcccaatacgtttatgagagcatagagatgcctcttgttcccattttatatgaaatggagaaaatcggttttaaggttgacaaaaacactttgcaggagtatacaaaagagattgagagcaagcttttaaagttggaatcacagatttatcaaatagccggtgaatggtttaacataaactcgccaaaacaactctcatatatattattcgaaaaactgaagcttccggttgttaaaaagaccaaaacaggatattcaacagatgccgaggtattagaagagctgtatgataaacatgacataataccgcttattctggattatagaatgtatacgaaaatactgacaacttactgtcagggactggttcaggcaataaatcctgcaactggaagaattcataccaactttattcagacaggtacggcaactggaagacttgcaagtgcagagcccaatctgcaaaatattcctgtaaaatatgatgagggaaagctaataagaaaggcatttgttccagatgaaggttatgtgttgatagatgctgattattctcagattgagcttagaatacttgcacatatctctgaggatgaacgactgataaatgcttttaaaaataaccttgatattcattcacagacggcggcagagatctttggtgtggatataagtcaggttacaccaattatgcgaagccaggcaaaagcagttaactttggaattgtatatggtatatctgattatggactttcacgggatataaagatttcaagaaaagaagcagccgagtttattaatcgttattttgaaaagtatcccagagtaaaagaatatttggacaatgtcgtcaagtttgcccgtgaaaacggatttgttttgacaatatttaacaggaaaaggtatatcaaggatcaaaagtctactaataaaaacctgagaaactatgcagagagaatagcaatgaattcacctatccagggaagtgctgcagatattatgaaaatagcaatgataagagtttataaaaagctaaaagaaaacaatttaaaatcaagaattattctgcaggtccatgacgaacttttgattgaatcaccctatgaagagaaagagatagtaaaggaaatagtaaaatcggagatggaaaatgcggttttattgaaagttcctttggtagttgaagtgaaagaaggttcaaattggtatgaaacaaagtaaaggatcc

SEQ ID NO: 1565 - DNA, 2623 bp, Artificial Sequence
  Description of Artificial Sequence: Synthetic DNA sequence of Caldicellulosiruptor TOK13B DNA Polymerase I771G
atgaaatacctgctgccgaccgctgctgctggtctgctgctcctcgctgcccagccggcgatggccatggaatttgttatttttgatgggaatagtattctgtatagagctttttttgccttgccacagcttactacctcaacaggcatacctacaaatgctatatatggttttttgaatgtgctgttaaaatacttagattctgaaaaaccggattatgtagcagtagcttttgacaaaaaaggcagagctgtccgaaaaagtgaatatgaagaatacaaggctaacagaaaaccgatgccagattctcttcaggttcagataccttacgtaagagaaatacttgctgctctgaacattcctgtactgaaatgtgaagggtatgaagctgatgacgttataggcacacttgtaaatagatttaaagcccaggatttagagattgtgataataaccggagacagagatacacttcagttacttgataaaaatgtaattgtcaaaatagtcacaacaaggtttgacaggacaactgaagatttgtatgctgtagaaaatgtaaaagaaaaatatggtgtttttgcgcatcaggttgttgactataaagcattagtaggtgatgcgtcagacaatataccaggtgttaagggaattggagataaaactgccataaagctgttagaagagtaccagactctggagaatatatatcagaatctaaataacattaaaggagcgctaaaagagaagttggaatcaggaaaagacatggcatttttatcaaaaagactggctactatcatatgcgatttaccaattgaggtgaatcttgaagaattaaaaaccaaagaatgggacaaagaaagactttatcagattttacttcaacttgagtttaaaagctttattaaaagactgggcttttcagaagagattaactatgcaaggcagaactttcagctacctgaatttagtattaaagaacttcgtgatgtttcagcaatagggggcaaagaaatctatctattgtactcagatgaagaaggacttttttatatttatgaccatcaaacctcaaccatttttacaacttctgataaggaagctattaaagatcttttaacactccaaagcattcaaaaggttgtatatgatttaaaaaatatactccataaggtggactttgatgaagctaatcagataaaaaattgtaatgatgttatgttggcttcatatgttttggacagtacacgcagttcgtacgatttggaaacattgtttatttcttatctcaacactgatatagctgcaatcaaagagaatagatgggctggtgctacagttttattaagaaatctttgggatgaactttcaaaactcattgatttaaactcggcccaatacgtttatgagagcatagagatgcctcttgttcccattttatatgaaatggagaaaatcggttttaaggttgacaaaaacactttgcaggagtatacaaaagagattgagagcaagcttttaaagttggaatcacagatttatcaaatagccggtgaatggtttaacataaactcgccaaaacaactctcatatatattattcgaaaaactgaagcttccggttgttaaaaagaccaaaacaggatattcaacagatgccgaggtattagaagagctgtatgataaacatgacataataccgcttattctggattatagaatgtatacgaaaatactgacaacttactgtcagggactggttcaggcaataaatcctgcaactggaagaattcataccaactttattcagacaggtacggcaactggaagacttgcaagtgcagagcccaatctgcaaaatattcctgtaaaatatgatgagggaaagctaataagaaaggcatttgttccagatgaaggttatgtgttgatagatgctgattattctcagattgagcttagaatacttgcacatatctctgaggatgaacgactgataaatgcttttaaaaataaccttgatattcattcacagacggcggcagagatctttggtgtggatataagtcaggttacaccaattatgcgaagccaggcaaaagcagttaactttggaattgtatatggtatatctgattatggactttcacgggatataaagatttcaagaaaagaagcagccgagtttattaatcgttattttgaaaagtatcccagagtaaaagaatatttggacaatgtcgtcaagtttgcccgtgaaaacggatttgttttgacaatatttaacaggaaaaggtatatcaaggatggtaagtctactaataaaaacctgagaaactatgcagagagaatagcaatgaattcacctatccagggaagtgctgcagatattatgaaaatagcaatgataagagtttataaaaagctaaaagaaaacaatttaaaatcaagaattattctgcaggtccatgacgaacttttgattgaatcaccctatgaagagaaagagatagtaaaggaaatagtaaaatcggagatggaaaatgcggttttattgaaagttcctttggtagttgaagtgaaagaaggttcaaattggtatgaaacaaagtaaaggatcc

SEQ ID NO: 1566 - DNA, 2623 bp, Artificial Sequence
  Description of Artificial Sequence: Synthetic DNA sequence of Caldicellulosiruptor TOK13B DNA Polymerase I771H
atgaaatacctgctgccgaccgctgctgctggtctgctgctcctcgctgcccagccggcgatggccatggaatttgttatttttgatgggaatagtattctgtatagagctttttttgccttgccacagcttactacctcaacaggcatacctacaaatgctatatatggttttttgaatgtgctgttaaaatacttagattctgaaaaaccggattatgtagcagtagcttttgacaaaaaaggcagagctgtccgaaaaagtgaatatgaagaatacaaggctaacagaaaaccgatgccagattctcttcaggttcagataccttacgtaagagaaatacttgctgctctgaacattcctgtactgaaatgtgaagggtatgaagctgatgacgttataggcacacttgtaaatagatttaaagcccaggatttagagattgtgataataaccggagacagagatacacttcagttacttgataaaaatgtaattgtcaaaatagtcacaacaaggtttgacaggacaactgaagatttgtatgctgtagaaaatgtaaaagaaaaatatggtgtttttgcgcatcaggttgttgactataaagcattagtaggtgatgcgtcagacaatataccaggtgttaagggaattggagataaaactgccataaagctgttagaagagtaccagactctggagaatatatatcagaatctaaataacattaaaggagcgctaaaagagaagttggaatcaggaaaagacatggcatttttatcaaaaagactggctactatcatatgcgatttaccaattgaggtgaatcttgaagaattaaaaaccaaagaatgggacaaagaaagactttatcagattttacttcaacttgagtttaaaagctttattaaaagactgggcttttcagaagagattaactatgcaaggcagaactttcagctacctgaatttagtattaaagaacttcgtgatgtttcagcaatagggggcaaagaaatctatctattgtactcagatgaagaaggacttttttatatttatgaccatcaaacctcaaccatttttacaacttctgataaggaagctattaaagatcttttaacactccaaagcattcaaaaggttgtatatgatttaaaaaatatactccataaggtggactttgatgaagctaatcagataaaaaattgtaatgatgttatgttggcttcatatgttttggacagtacacgcagttcgtacgatttggaaacattgtttatttcttatctcaacactgatatagctgcaatcaaagagaatagatgggctggtgctacagttttattaagaaatctttgggatgaactttcaaaactcattgatttaaactcggcccaatacgtttatgagagcatagagatgcctcttgttcccattttatatgaaatggagaaaatcggttttaaggttgacaaaaacactttgcaggagtatacaaaagagattgagagcaagcttttaaagttggaatcacagatttatcaaatagccggtgaatggtttaacataaactcgccaaaacaactctcatatatattattcgaaaaactgaagcttccggttgttaaaaagaccaaaacaggatattcaacagatgccgaggtattagaagagctgtatgataaacatgacataataccgcttattctggattatagaatgtatacgaaaatactgacaacttactgtcagggactggttcaggcaataaatcctgcaactggaagaattcataccaactttattcagacaggtacggcaactggaagacttgcaagtgcagagcccaatctgcaaaatattcctgtaaaatatgatgagggaaagctaataagaaaggcatttgttccagatgaaggttatgtgttgatagatgctgattattctcagattgagcttagaatacttgcacatatctctgaggatgaacgactgataaatgcttttaaaaataaccttgatattcattcacagacggcggcagagatctttggtgtggatataagtcaggttacaccaattatgcgaagccaggcaaaagcagttaactttggaattgtatatggtatatctgattatggactttcacgggatataaagatttcaagaaaagaagcagccgagtttattaatcgttattttgaaaagtatcccagagtaaaagaatatttggacaatgtcgtcaagtttgcccgtgaaaacggatttgttttgacaatatttaacaggaaaaggtatatcaaggatcataagtctactaataaaaacctgagaaactatgcagagagaatagcaatgaattcacctatccagggaagtgctgcagatattatgaaaatagcaatgataagagtttataaaaagctaaaagaaaacaatttaaaatcaagaattattctgcaggtccatgacgaacttttgattgaatcaccctatgaagagaaagagatagtaaaggaaatagtaaaatcggagatggaaaatgcggttttattgaaagttcctttggtagttgaagtgaaagaaggttcaaattggtatgaaacaaagtaaaggatcc

SEQ ID NO: 1567 - DNA, 2623 bp, Artificial Sequence
  Description of Artificial Sequence: Synthetic DNA sequence of Caldicellulosiruptor TOK13B DNA Polymerase I771L
atgaaatacctgctgccgaccgctgctgctggtctgctgctcctcgctgcccagccggcgatggccatggaatttgttatttttgatgggaatagtattctgtatagagctttttttgccttgccacagcttactacctcaacaggcatacctacaaatgctatatatggttttttgaatgtgctgttaaaatacttagattctgaaaaaccggattatgtagcagtagcttttgacaaaaaaggcagagctgtccgaaaaagtgaatatgaagaatacaaggctaacagaaaaccgatgccagattctcttcaggttcagataccttacgtaagagaaatacttgctgctctgaacattcctgtactgaaatgtgaagggtatgaagctgatgacgttataggcacacttgtaaatagatttaaagcccaggatttagagattgtgataataaccggagacagagatacacttcagttacttgataaaaatgtaattgtcaaaatagtcacaacaaggtttgacaggacaactgaagatttgtatgctgtagaaaatgtaaaagaaaaatatggtgtttttgcgcatcaggttgttgactataaagcattagtaggtgatgcgtcagacaatataccaggtgttaagggaattggagataaaactgccataaagctgttagaagagtaccagactctggagaatatatatcagaatctaaataacattaaaggagcgctaaaagagaagttggaatcaggaaaagacatggcatttttatcaaaaagactggctactatcatatgcgatttaccaattgaggtgaatcttgaagaattaaaaaccaaagaatgggacaaagaaagactttatcagattttacttcaacttgagtttaaaagctttattaaaagactgggcttttcagaagagattaactatgcaaggcagaactttcagctacctgaatttagtattaaagaacttcgtgatgtttcagcaatagggggcaaagaaatctatctattgtactcagatgaagaaggacttttttatatttatgaccatcaaacctcaaccatttttacaacttctgataaggaagctattaaagatcttttaacactccaaagcattcaaaaggttgtatatgatttaaaaaatatactccataaggtggactttgatgaagctaatcagataaaaaattgtaatgatgttatgttggcttcatatgttttggacagtacacgcagttcgtacgatttggaaacattgtttatttcttatctcaacactgatatagctgcaatcaaagagaatagatgggctggtgctacagttttattaagaaatctttgggatgaactttcaaaactcattgatttaaactcggcccaatacgtttatgagagcatagagatgcctcttgttcccattttatatgaaatggagaaaatcggttttaaggttgacaaaaacactttgcaggagtatacaaaagagattgagagcaagcttttaaagttggaatcacagatttatcaaatagccggtgaatggtttaacataaactcgccaaaacaactctcatatatattattcgaaaaactgaagcttccggttgttaaaaagaccaaaacaggatattcaacagatgccgaggtattagaagagctgtatgataaacatgacataataccgcttattctggattatagaatgtatacgaaaatactgacaacttactgtcagggactggttcaggcaataaatcctgcaactggaagaattcataccaactttattcagacaggtacggcaactggaagacttgcaagtgcagagcccaatctgcaaaatattcctgtaaaatatgatgagggaaagctaataagaaaggcatttgttccagatgaaggttatgtgttgatagatgctgattattctcagattgagcttagaatacttgcacatatctctgaggatgaacgactgataaatgcttttaaaaataaccttgatattcattcacagacggcggcagagatctttggtgtggatataagtcaggttacaccaattatgcgaagccaggcaaaagcagttaactttggaattgtatatggtatatctgattatggactttcacgggatataaagatttcaagaaaagaagcagccgagtttattaatcgttattttgaaaagtatcccagagtaaaagaatatttggacaatgtcgtcaagtttgcccgtgaaaacggatttgttttgacaatatttaacaggaaaaggtatatcaaggatcttaagtctactaataaaaacctgagaaactatgcagagagaatagcaatgaattcacctatccagggaagtgctgcagatattatgaaaatagcaatgataagagtttataaaaagctaaaagaaaacaatttaaaatcaagaattattctgcaggtccatgacgaacttttgattgaatcaccctatgaagagaaagagatagtaaaggaaatagtaaaatcggagatggaaaatgcggttttattgaaagttcctttggtagttgaagtgaaagaaggttcaaattggtatgaaacaaagtaaaggatcc

SEQ ID NO: 1568 - DNA, 2623 bp, Artificial Sequence
  Description of Artificial Sequence: Synthetic DNA sequence of Caldicellulosiruptor TOK13B DNA Polymerase I771K
atgaaatacctgctgccgaccgctgctgctggtctgctgctcctcgctgcccagccggcgatggccatggaatttgttatttttgatgggaatagtattctgtatagagctttttttgccttgccacagcttactacctcaacaggcatacctacaaatgctatatatggttttttgaatgtgctgttaaaatacttagattctgaaaaaccggattatgtagcagtagcttttgacaaaaaaggcagagctgtccgaaaaagtgaatatgaagaatacaaggctaacagaaaaccgatgccagattctcttcaggttcagataccttacgtaagagaaatacttgctgctctgaacattcctgtactgaaatgtgaagggtatgaagctgatgacgttataggcacacttgtaaatagatttaaagcccaggatttagagattgtgataataaccggagacagagatacacttcagttacttgataaaaatgtaattgtcaaaatagtcacaacaaggtttgacaggacaactgaagatttgtatgctgtagaaaatgtaaaagaaaaatatggtgtttttgcgcatcaggttgttgactataaagcattagtaggtgatgcgtcagacaatataccaggtgttaagggaattggagataaaactgccataaagctgttagaagagtaccagactctggagaatatatatcagaatctaaataacattaaaggagcgctaaaagagaagttggaatcaggaaaagacatggcatttttatcaaaaagactggctactatcatatgcgatttaccaattgaggtgaatcttgaagaattaaaaaccaaagaatgggacaaagaaagactttatcagattttacttcaacttgagtttaaaagctttattaaaagactgggcttttcagaagagattaactatgcaaggcagaactttcagctacctgaatttagtattaaagaacttcgtgatgtttcagcaatagggggcaaagaaatctatctattgtactcagatgaagaaggacttttttatatttatgaccatcaaacctcaaccatttttacaacttctgataaggaagctattaaagatcttttaacactccaaagcattcaaaaggttgtatatgatttaaaaaatatactccataaggtggactttgatgaagctaatcagataaaaaattgtaatgatgttatgttggcttcatatgttttggacagtacacgcagttcgtacgatttggaaacattgtttatttcttatctcaacactgatatagctgcaatcaaagagaatagatgggctggtgctacagttttattaagaaatctttgggatgaactttcaaaactcattgatttaaactcggcccaatacgtttatgagagcatagagatgcctcttgttcccattttatatgaaatggagaaaatcggttttaaggttgacaaaaacactttgcaggagtatacaaaagagattgagagcaagcttttaaagttggaatcacagatttatcaaatagccggtgaatggtttaacataaactcgccaaaacaactctcatatatattattcgaaaaactgaagcttccggttgttaaaaagaccaaaacaggatattcaacagatgccgaggtattagaagagctgtatgataaacatgacataataccgcttattctggattatagaatgtatacgaaaatactgacaacttactgtcagggactggttcaggcaataaatcctgcaactggaagaattcataccaactttattcagacaggtacggcaactggaagacttgcaagtgcagagcccaatctgcaaaatattcctgtaaaatatgatgagggaaagctaataagaaaggcatttgttccagatgaaggttatgtgttgatagatgctgattattctcagattgagcttagaatacttgcacatatctctgaggatgaacgactgataaatgcttttaaaaataaccttgatattcattcacagacggcggcagagatctttggtgtggatataagtcaggttacaccaattatgcgaagccaggcaaaagcagttaactttggaattgtatatggtatatctgattatggactttcacgggatataaagatttcaagaaaagaagcagccgagtttattaatcgttattttgaaaagtatcccagagtaaaagaatatttggacaatgtcgtcaagtttgcccgtgaaaacggatttgttttgacaatatttaacaggaaaaggtatatcaaggataaaaagtctactaataaaaacctgagaaactatgcagagagaatagcaatgaattcacctatccagggaagtgctgcagatattatgaaaatagcaatgataagagtttataaaaagctaaaagaaaacaatttaaaatcaagaattattctgcaggtccatgacgaacttttgattgaatcaccctatgaagagaaagagatagtaaaggaaatagtaaaatcggagatggaaaatgcggttttattgaaagttcctttggtagttgaagtgaaagaaggttcaaattggtatgaaacaaagtaaaggatcc

SEQ ID NO: 1569 - DNA, 2623 bp, Artificial Sequence
  Description of Artificial Sequence: Synthetic DNA sequence of Caldicellulosiruptor TOK13B DNA Polymerase I771M
atgaaatacctgctgccgaccgctgctgctggtctgctgctcctcgctgcccagccggcgatggccatggaatttgttatttttgatgggaatagtattctgtatagagctttttttgccttgccacagcttactacctcaacaggcatacctacaaatgctatatatggttttttgaatgtgctgttaaaatacttagattctgaaaaaccggattatgtagcagtagcttttgacaaaaaaggcagagctgtccgaaaaagtgaatatgaagaatacaaggctaacagaaaaccgatgccagattctcttcaggttcagataccttacgtaagagaaatacttgctgctctgaacattcctgtactgaaatgtgaagggtatgaagctgatgacgttataggcacacttgtaaatagatttaaagcccaggatttagagattgtgataataaccggagacagagatacacttcagttacttgataaaaatgtaattgtcaaaatagtcacaacaaggtttgacaggacaactgaagatttgtatgctgtagaaaatgtaaaagaaaaatatggtgtttttgcgcatcaggttgttgactataaagcattagtaggtgatgcgtcagacaatataccaggtgttaagggaattggagataaaactgccataaagctgttagaagagtaccagactctggagaatatatatcagaatctaaataacattaaaggagcgctaaaagagaagttggaatcaggaaaagacatggcatttttatcaaaaagactggctactatcatatgcgatttaccaattgaggtgaatcttgaagaattaaaaaccaaagaatgggacaaagaaagactttatcagattttacttcaacttgagtttaaaagctttattaaaagactgggcttttcagaagagattaactatgcaaggcagaactttcagctacctgaatttagtattaaagaacttcgtgatgtttcagcaatagggggcaaagaaatctatctattgtactcagatgaagaaggacttttttatatttatgaccatcaaacctcaaccatttttacaacttctgataaggaagctattaaagatcttttaacactccaaagcattcaaaaggttgtatatgatttaaaaaatatactccataaggtggactttgatgaagctaatcagataaaaaattgtaatgatgttatgttggcttcatatgttttggacagtacacgcagttcgtacgatttggaaacattgtttatttcttatctcaacactgatatagctgcaatcaaagagaatagatgggctggtgctacagttttattaagaaatctttgggatgaactttcaaaactcattgatttaaactcggcccaatacgtttatgagagcatagagatgcctcttgttcccattttatatgaaatggagaaaatcggttttaaggttgacaaaaacactttgcaggagtatacaaaagagattgagagcaagcttttaaagttggaatcacagatttatcaaatagccggtgaatggtttaacataaactcgccaaaacaactctcatatatattattcgaaaaactgaagcttccggttgttaaaaagaccaaaacaggatattcaacagatgccgaggtattagaagagctgtatgataaacatgacataataccgcttattctggattatagaatgtatacgaaaatactgacaacttactgtcagggactggttcaggcaataaatcctgcaactggaagaattcataccaactttattcagacaggtacggcaactggaagacttgcaagtgcagagcccaatctgcaaaatattcctgtaaaatatgatgagggaaagctaataagaaaggcatttgttccagatgaaggttatgtgttgatagatgctgattattctcagattgagcttagaatacttgcacatatctctgaggatgaacgactgataaatgcttttaaaaataaccttgatattcattcacagacggcggcagagatctttggtgtggatataagtcaggttacaccaattatgcgaagccaggcaaaagcagttaactttggaattgtatatggtatatctgattatggactttcacgggatataaagatttcaagaaaagaagcagccgagtttattaatcgttattttgaaaagtatcccagagtaaaagaatatttggacaatgtcgtcaagtttgcccgtgaaaacggatttgttttgacaatatttaacaggaaaaggtatatcaaggatatgaagtctactaataaaaacctgagaaactatgcagagagaatagcaatgaattcacctatccagggaagtgctgcagatattatgaaaatagcaatgataagagtttataaaaagctaaaagaaaacaatttaaaatcaagaattattctgcaggtccatgacgaacttttgattgaatcaccctatgaagagaaagagatagtaaaggaaatagtaaaatcggagatggaaaatgcggttttattgaaagttcctttggtagttgaagtgaaagaaggttcaaattggtatgaaacaaagtaaaggatcc

SEQ ID NO: 1570 - DNA, 2623 bp, Artificial Sequence
  Description of Artificial Sequence: Synthetic DNA sequence of Caldicellulosiruptor TOK13B DNA Polymerase I771F
atgaaatacctgctgccgaccgctgctgctggtctgctgctcctcgctgcccagccggcgatggccatggaatttgttatttttgatgggaatagtattctgtatagagctttttttgccttgccacagcttactacctcaacaggcatacctacaaatgctatatatggttttttgaatgtgctgttaaaatacttagattctgaaaaaccggattatgtagcagtagcttttgacaaaaaaggcagagctgtccgaaaaagtgaatatgaagaatacaaggctaacagaaaaccgatgccagattctcttcaggttcagataccttacgtaagagaaatacttgctgctctgaacattcctgtactgaaatgtgaagggtatgaagctgatgacgttataggcacacttgtaaatagatttaaagcccaggatttagagattgtgataataaccggagacagagatacacttcagttacttgataaaaatgtaattgtcaaaatagtcacaacaaggtttgacaggacaactgaagatttgtatgctgtagaaaatgtaaaagaaaaatatggtgtttttgcgcatcaggttgttgactataaagcattagtaggtgatgcgtcagacaatataccaggtgttaagggaattggagataaaactgccataaagctgttagaagagtaccagactctggagaatatatatcagaatctaaataacattaaaggagcgctaaaagagaagttggaatcaggaaaagacatggcatttttatcaaaaagactggctactatcatatgcgatttaccaattgaggtgaatcttgaagaattaaaaaccaaagaatgggacaaagaaagactttatcagattttacttcaacttgagtttaaaagctttattaaaagactgggcttttcagaagagattaactatgcaaggcagaactttcagctacctgaatttagtattaaagaacttcgtgatgtttcagcaatagggggcaaagaaatctatctattgtactcagatgaagaaggacttttttatatttatgaccatcaaacctcaaccatttttacaacttctgataaggaagctattaaagatcttttaacactccaaagcattcaaaaggttgtatatgatttaaaaaatatactccataaggtggactttgatgaagctaatcagataaaaaattgtaatgatgttatgttggcttcatatgttttggacagtacacgcagttcgtacgatttggaaacattgtttatttcttatctcaacactgatatagctgcaatcaaagagaatagatgggctggtgctacagttttattaagaaatctttgggatgaactttcaaaactcattgatttaaactcggcccaatacgtttatgagagcatagagatgcctcttgttcccattttatatgaaatggagaaaatcggttttaaggttgacaaaaacactttgcaggagtatacaaaagagattgagagcaagcttttaaagttggaatcacagatttatcaaatagccggtgaatggtttaacataaactcgccaaaacaactctcatatatattattcgaaaaactgaagcttccggttgttaaaaagaccaaaacaggatattcaacagatgccgaggtattagaagagctgtatgataaacatgacataataccgcttattctggattatagaatgtatacgaaaatactgacaacttactgtcagggactggttcaggcaataaatcctgcaactggaagaattcataccaactttattcagacaggtacggcaactggaagacttgcaagtgcagagcccaatctgcaaaatattcctgtaaaatatgatgagggaaagctaataagaaaggcatttgttccagatgaaggttatgtgttgatagatgctgattattctcagattgagcttagaatacttgcacatatctctgaggatgaacgactgataaatgcttttaaaaataaccttgatattcattcacagacggcggcagagatctttggtgtggatataagtcaggttacaccaattatgcgaagccaggcaaaagcagttaactttggaattgtatatggtatatctgattatggactttcacgggatataaagatttcaagaaaagaagcagccgagtttattaatcgttattttgaaaagtatcccagagtaaaagaatatttggacaatgtcgtcaagtttgcccgtgaaaacggatttgttttgacaatatttaacaggaaaaggtatatcaaggattttaagtctactaataaaaacctgagaaactatgcagagagaatagcaatgaattcacctatccagggaagtgctgcagatattatgaaaatagcaatgataagagtttataaaaagctaaaagaaaacaatttaaaatcaagaattattctgcaggtccatgacgaacttttgattgaatcaccctatgaagagaaagagatagtaaaggaaatagtaaaatcggagatggaaaatgcggttttattgaaagttcctttggtagttgaagtgaaagaaggttcaaattggtatgaaacaaagtaaaggatcc

SEQ ID NO: 1571 - DNA, 2623 bp, Artificial Sequence
  Description of Artificial Sequence: Synthetic DNA sequence of Caldicellulosiruptor TOK13B DNA Polymerase I771P
atgaaatacctgctgccgaccgctgctgctggtctgctgctcctcgctgcccagccggcgatggccatggaatttgttatttttgatgggaatagtattctgtatagagctttttttgccttgccacagcttactacctcaacaggcatacctacaaatgctatatatggttttttgaatgtgctgttaaaatacttagattctgaaaaaccggattatgtagcagtagcttttgacaaaaaaggcagagctgtccgaaaaagtgaatatgaagaatacaaggctaacagaaaaccgatgccagattctcttcaggttcagataccttacgtaagagaaatacttgctgctctgaacattcctgtactgaaatgtgaagggtatgaagctgatgacgttataggcacacttgtaaatagatttaaagcccaggatttagagattgtgataataaccggagacagagatacacttcagttacttgataaaaatgtaattgtcaaaatagtcacaacaaggtttgacaggacaactgaagatttgtatgctgtagaaaatgtaaaagaaaaatatggtgtttttgcgcatcaggttgttgactataaagcattagtaggtgatgcgtcagacaatataccaggtgttaagggaattggagataaaactgccataaagctgttagaagagtaccagactctggagaatatatatcagaatctaaataacattaaaggagcgctaaaagagaagttggaatcaggaaaagacatggcatttttatcaaaaagactggctactatcatatgcgatttaccaattgaggtgaatcttgaagaattaaaaaccaaagaatgggacaaagaaagactttatcagattttacttcaacttgagtttaaaagctttattaaaagactgggcttttcagaagagattaactatgcaaggcagaactttcagctacctgaatttagtattaaagaacttcgtgatgtttcagcaatagggggcaaagaaatctatctattgtactcagatgaagaaggacttttttatatttatgaccatcaaacctcaaccatttttacaacttctgataaggaagctattaaagatcttttaacactccaaagcattcaaaaggttgtatatgatttaaaaaatatactccataaggtggactttgatgaagctaatcagataaaaaattgtaatgatgttatgttggcttcatatgttttggacagtacacgcagttcgtacgatttggaaacattgtttatttcttatctcaacactgatatagctgcaatcaaagagaatagatgggctggtgctacagttttattaagaaatctttgggatgaactttcaaaactcattgatttaaactcggcccaatacgtttatgagagcatagagatgcctcttgttcccattttatatgaaatggagaaaatcggttttaaggttgacaaaaacactttgcaggagtatacaaaagagattgagagcaagcttttaaagttggaatcacagatttatcaaatagccggtgaatggtttaacataaactcgccaaaacaactctcatatatattattcgaaaaactgaagcttccggttgttaaaaagaccaaaacaggatattcaacagatgccgaggtattagaagagctgtatgataaacatgacataataccgcttattctggattatagaatgtatacgaaaatactgacaacttactgtcagggactggttcaggcaataaatcctgcaactggaagaattcataccaactttattcagacaggtacggcaactggaagacttgcaagtgcagagcccaatctgcaaaatattcctgtaaaatatgatgagggaaagctaataagaaaggcatttgttccagatgaaggttatgtgttgatagatgctgattattctcagattgagcttagaatacttgcacatatctctgaggatgaacgactgataaatgcttttaaaaataaccttgatattcattcacagacggcggcagagatctttggtgtggatataagtcaggttacaccaattatgcgaagccaggcaaaagcagttaactttggaattgtatatggtatatctgattatggactttcacgggatataaagatttcaagaaaagaagcagccgagtttattaatcgttattttgaaaagtatcccagagtaaaagaatatttggacaatgtcgtcaagtttgcccgtgaaaacggatttgttttgacaatatttaacaggaaaaggtatatcaaggatcctaagtctactaataaaaacctgagaaactatgcagagagaatagcaatgaattcacctatccagggaagtgctgcagatattatgaaaatagcaatgataagagtttataaaaagctaaaagaaaacaatttaaaatcaagaattattctgcaggtccatgacgaacttttgattgaatcaccctatgaagagaaagagatagtaaaggaaatagtaaaatcggagatggaaaatgcggttttattgaaagttcctttggtagttgaagtgaaagaaggttcaaattggtatgaaacaaagtaaaggatcc

SEQ ID NO: 1572 - DNA, 2623 bp, Artificial Sequence
  Description of Artificial Sequence: Synthetic DNA sequence of Caldicellulosiruptor TOK13B DNA Polymerase I771S
atgaaatacctgctgccgaccgctgctgctggtctgctgctcctcgctgcccagccggcgatggccatggaatttgttatttttgatgggaatagtattctgtatagagctttttttgccttgccacagcttactacctcaacaggcatacctacaaatgctatatatggttttttgaatgtgctgttaaaatacttagattctgaaaaaccggattatgtagcagtagcttttgacaaaaaaggcagagctgtccgaaaaagtgaatatgaagaatacaaggctaacagaaaaccgatgccagattctcttcaggttcagataccttacgtaagagaaatacttgctgctctgaacattcctgtactgaaatgtgaagggtatgaagctgatgacgttataggcacacttgtaaatagatttaaagcccaggatttagagattgtgataataaccggagacagagatacacttcagttacttgataaaaatgtaattgtcaaaatagtcacaacaaggtttgacaggacaactgaagatttgtatgctgtagaaaatgtaaaagaaaaatatggtgtttttgcgcatcaggttgttgactataaagcattagtaggtgatgcgtcagacaatataccaggtgttaagggaattggagataaaactgccataaagctgttagaagagtaccagactctggagaatatatatcagaatctaaataacattaaaggagcgctaaaagagaagttggaatcaggaaaagacatggcatttttatcaaaaagactggctactatcatatgcgatttaccaattgaggtgaatcttgaagaattaaaaaccaaagaatgggacaaagaaagactttatcagattttacttcaacttgagtttaaaagctttattaaaagactgggcttttcagaagagattaactatgcaaggcagaactttcagctacctgaatttagtattaaagaacttcgtgatgtttcagcaatagggggcaaagaaatctatctattgtactcagatgaagaaggacttttttatatttatgaccatcaaacctcaaccatttttacaacttctgataaggaagctattaaagatcttttaacactccaaagcattcaaaaggttgtatatgatttaaaaaatatactccataaggtggactttgatgaagctaatcagataaaaaattgtaatgatgttatgttggcttcatatgttttggacagtacacgcagttcgtacgatttggaaacattgtttatttcttatctcaacactgatatagctgcaatcaaagagaatagatgggctggtgctacagttttattaagaaatctttgggatgaactttcaaaactcattgatttaaactcggcccaatacgtttatgagagcatagagatgcctcttgttcccattttatatgaaatggagaaaatcggttttaaggttgacaaaaacactttgcaggagtatacaaaagagattgagagcaagcttttaaagttggaatcacagatttatcaaatagccggtgaatggtttaacataaactcgccaaaacaactctcatatatattattcgaaaaactgaagcttccggttgttaaaaagaccaaaacaggatattcaacagatgccgaggtattagaagagctgtatgataaacatgacataataccgcttattctggattatagaatgtatacgaaaatactgacaacttactgtcagggactggttcaggcaataaatcctgcaactggaagaattcataccaactttattcagacaggtacggcaactggaagacttgcaagtgcagagcccaatctgcaaaatattcctgtaaaatatgatgagggaaagctaataagaaaggcatttgttccagatgaaggttatgtgttgatagatgctgattattctcagattgagcttagaatacttgcacatatctctgaggatgaacgactgataaatgcttttaaaaataaccttgatattcattcacagacggcggcagagatctttggtgtggatataagtcaggttacaccaattatgcgaagccaggcaaaagcagttaactttggaattgtatatggtatatctgattatggactttcacgggatataaagatttcaagaaaagaagcagccgagtttattaatcgttattttgaaaagtatcccagagtaaaagaatatttggacaatgtcgtcaagtttgcccgtgaaaacggatttgttttgacaatatttaacaggaaaaggtatatcaaggattctaagtctactaataaaaacctgagaaactatgcagagagaatagcaatgaattcacctatccagggaagtgctgcagatattatgaaaatagcaatgataagagtttataaaaagctaaaagaaaacaatttaaaatcaagaattattctgcaggtccatgacgaacttttgattgaatcaccctatgaagagaaagagatagtaaaggaaatagtaaaatcggagatggaaaatgcggttttattgaaagttcctttggtagttgaagtgaaagaaggttcaaattggtatgaaacaaagtaaaggatcc

SEQ ID NO: 1573 - DNA, 2623 bp, Artificial Sequence
  Description of Artificial Sequence: Synthetic DNA sequence of Caldicellulosiruptor TOK13B DNA Polymerase I771T
atgaaatacctgctgccgaccgctgctgctggtctgctgctcctcgctgcccagccggcgatggccatggaatttgttatttttgatgggaatagtattctgtatagagctttttttgccttgccacagcttactacctcaacaggcatacctacaaatgctatatatggttttttgaatgtgctgttaaaatacttagattctgaaaaaccggattatgtagcagtagcttttgacaaaaaaggcagagctgtccgaaaaagtgaatatgaagaatacaaggctaacagaaaaccgatgccagattctcttcaggttcagataccttacgtaagagaaatacttgctgctctgaacattcctgtactgaaatgtgaagggtatgaagctgatgacgttataggcacacttgtaaatagatttaaagcccaggatttagagattgtgataataaccggagacagagatacacttcagttacttgataaaaatgtaattgtcaaaatagtcacaacaaggtttgacaggacaactgaagatttgtatgctgtagaaaatgtaaaagaaaaatatggtgtttttgcgcatcaggttgttgactataaagcattagtaggtgatgcgtcagacaatataccaggtgttaagggaattggagataaaactgccataaagctgttagaagagtaccagactctggagaatatatatcagaatctaaataacattaaaggagcgctaaaagagaagttggaatcaggaaaagacatggcatttttatcaaaaagactggctactatcatatgcgatttaccaattgaggtgaatcttgaagaattaaaaaccaaagaatgggacaaagaaagactttatcagattttacttcaacttgagtttaaaagctttattaaaagactgggcttttcagaagagattaactatgcaaggcagaactttcagctacctgaatttagtattaaagaacttcgtgatgtttcagcaatagggggcaaagaaatctatctattgtactcagatgaagaaggacttttttatatttatgaccatcaaacctcaaccatttttacaacttctgataaggaagctattaaagatcttttaacactccaaagcattcaaaaggttgtatatgatttaaaaaatatactccataaggtggactttgatgaagctaatcagataaaaaattgtaatgatgttatgttggcttcatatgttttggacagtacacgcagttcgtacgatttggaaacattgtttatttcttatctcaacactgatatagctgcaatcaaagagaatagatgggctggtgctacagttttattaagaaatctttgggatgaactttcaaaactcattgatttaaactcggcccaatacgtttatgagagcatagagatgcctcttgttcccattttatatgaaatggagaaaatcggttttaaggttgacaaaaacactttgcaggagtatacaaaagagattgagagcaagcttttaaagttggaatcacagatttatcaaatagccggtgaatggtttaacataaactcgccaaaacaactctcatatatattattcgaaaaactgaagcttccggttgttaaaaagaccaaaacaggatattcaacagatgccgaggtattagaagagctgtatgataaacatgacataataccgcttattctggattatagaatgtatacgaaaatactgacaacttactgtcagggactggttcaggcaataaatcctgcaactggaagaattcataccaactttattcagacaggtacggcaactggaagacttgcaagtgcagagcccaatctgcaaaatattcctgtaaaatatgatgagggaaagctaataagaaaggcatttgttccagatgaaggttatgtgttgatagatgctgattattctcagattgagcttagaatacttgcacatatctctgaggatgaacgactgataaatgcttttaaaaataaccttgatattcattcacagacggcggcagagatctttggtgtggatataagtcaggttacaccaattatgcgaagccaggcaaaagcagttaactttggaattgtatatggtatatctgattatggactttcacgggatataaagatttcaagaaaagaagcagccgagtttattaatcgttattttgaaaagtatcccagagtaaaagaatatttggacaatgtcgtcaagtttgcccgtgaaaacggatttgttttgacaatatttaacaggaaaaggtatatcaaggatactaagtctactaataaaaacctgagaaactatgcagagagaatagcaatgaattcacctatccagggaagtgctgcagatattatgaaaatagcaatgataagagtttataaaaagctaaaagaaaacaatttaaaatcaagaattattctgcaggtccatgacgaacttttgattgaatcaccctatgaagagaaagagatagtaaaggaaatagtaaaatcggagatggaaaatgcggttttattgaaagttcctttggtagttgaagtgaaagaaggttcaaattggtatgaaacaaagtaaaggatcc

SEQ ID NO: 1574 - DNA, 2623 bp, Artificial Sequence
  Description of Artificial Sequence: Synthetic DNA sequence of Caldicellulosiruptor TOK13B DNA Polymerase I771W
atgaaatacctgctgccgaccgctgctgctggtctgctgctcctcgctgcccagccggcgatggccatggaatttgttatttttgatgggaatagtattctgtatagagctttttttgccttgccacagcttactacctcaacaggcatacctacaaatgctatatatggttttttgaatgtgctgttaaaatacttagattctgaaaaaccggattatgtagcagtagcttttgacaaaaaaggcagagctgtccgaaaaagtgaatatgaagaatacaaggctaacagaaaaccgatgccagattctcttcaggttcagataccttacgtaagagaaatacttgctgctctgaacattcctgtactgaaatgtgaagggtatgaagctgatgacgttataggcacacttgtaaatagatttaaagcccaggatttagagattgtgataataaccggagacagagatacacttcagttacttgataaaaatgtaattgtcaaaatagtcacaacaaggtttgacaggacaactgaagatttgtatgctgtagaaaatgtaaaagaaaaatatggtgtttttgcgcatcaggttgttgactataaagcattagtaggtgatgcgtcagacaatataccaggtgttaagggaattggagataaaactgccataaagctgttagaagagtaccagactctggagaatatatatcagaatctaaataacattaaaggagcgctaaaagagaagttggaatcaggaaaagacatggcatttttatcaaaaagactggctactatcatatgcgatttaccaattgaggtgaatcttgaagaattaaaaaccaaagaatgggacaaagaaagactttatcagattttacttcaacttgagtttaaaagctttattaaaagactgggcttttcagaagagattaactatgcaaggcagaactttcagctacctgaatttagtattaaagaacttcgtgatgtttcagcaatagggggcaaagaaatctatctattgtactcagatgaagaaggacttttttatatttatgaccatcaaacctcaaccatttttacaacttctgataaggaagctattaaagatcttttaacactccaaagcattcaaaaggttgtatatgatttaaaaaatatactccataaggtggactttgatgaagctaatcagataaaaaattgtaatgatgttatgttggcttcatatgttttggacagtacacgcagttcgtacgatttggaaacattgtttatttcttatctcaacactgatatagctgcaatcaaagagaatagatgggctggtgctacagttttattaagaaatctttgggatgaactttcaaaactcattgatttaaactcggcccaatacgtttatgagagcatagagatgcctcttgttcccattttatatgaaatggagaaaatcggttttaaggttgacaaaaacactttgcaggagtatacaaaagagattgagagcaagcttttaaagttggaatcacagatttatcaaatagccggtgaatggtttaacataaactcgccaaaacaactctcatatatattattcgaaaaactgaagcttccggttgttaaaaagaccaaaacaggatattcaacagatgccgaggtattagaagagctgtatgataaacatgacataataccgcttattctggattatagaatgtatacgaaaatactgacaacttactgtcagggactggttcaggcaataaatcctgcaactggaagaattcataccaactttattcagacaggtacggcaactggaagacttgcaagtgcagagcccaatctgcaaaatattcctgtaaaatatgatgagggaaagctaataagaaaggcatttgttccagatgaaggttatgtgttgatagatgctgattattctcagattgagcttagaatacttgcacatatctctgaggatgaacgactgataaatgcttttaaaaataaccttgatattcattcacagacggcggcagagatctttggtgtggatataagtcaggttacaccaattatgcgaagccaggcaaaagcagttaactttggaattgtatatggtatatctgattatggactttcacgggatataaagatttcaagaaaagaagcagccgagtttattaatcgttattttgaaaagtatcccagagtaaaagaatatttggacaatgtcgtcaagtttgcccgtgaaaacggatttgttttgacaatatttaacaggaaaaggtatatcaaggattggaagtctactaataaaaacctgagaaactatgcagagagaatagcaatgaattcacctatccagggaagtgctgcagatattatgaaaatagcaatgataagagtttataaaaagctaaaagaaaacaatttaaaatcaagaattattctgcaggtccatgacgaacttttgattgaatcaccctatgaagagaaagagatagtaaaggaaatagtaaaatcggagatggaaaatgcggttttattgaaagttcctttggtagttgaagtgaaagaaggttcaaattggtatgaaacaaagtaaaggatcc

SEQ ID NO: 1575 - DNA, 2623 bp, Artificial Sequence
  Description of Artificial Sequence: Synthetic DNA sequence of Caldicellulosiruptor TOK13B DNA Polymerase I771Y
atgaaatacctgctgccgaccgctgctgctggtctgctgctcctcgctgcccagccggcgatggccatggaatttgttatttttgatgggaatagtattctgtatagagctttttttgccttgccacagcttactacctcaacaggcatacctacaaatgctatatatggttttttgaatgtgctgttaaaatacttagattctgaaaaaccggattatgtagcagtagcttttgacaaaaaaggcagagctgtccgaaaaagtgaatatgaagaatacaaggctaacagaaaaccgatgccagattctcttcaggttcagataccttacgtaagagaaatacttgctgctctgaacattcctgtactgaaatgtgaagggtatgaagctgatgacgttataggcacacttgtaaatagatttaaagcccaggatttagagattgtgataataaccggagacagagatacacttcagttacttgataaaaatgtaattgtcaaaatagtcacaacaaggtttgacaggacaactgaagatttgtatgctgtagaaaatgtaaaagaaaaatatggtgtttttgcgcatcaggttgttgactataaagcattagtaggtgatgcgtcagacaatataccaggtgttaagggaattggagataaaactgccataaagctgttagaagagtaccagactctggagaatatatatcagaatctaaataacattaaaggagcgctaaaagagaagttggaatcaggaaaagacatggcatttttatcaaaaagactggctactatcatatgcgatttaccaattgaggtgaatcttgaagaattaaaaaccaaagaatgggacaaagaaagactttatcagattttacttcaacttgagtttaaaagctttattaaaagactgggcttttcagaagagattaactatgcaaggcagaactttcagctacctgaatttagtattaaagaacttcgtgatgtttcagcaatagggggcaaagaaatctatctattgtactcagatgaagaaggacttttttatatttatgaccatcaaacctcaaccatttttacaacttctgataaggaagctattaaagatcttttaacactccaaagcattcaaaaggttgtatatgatttaaaaaatatactccataaggtggactttgatgaagctaatcagataaaaaattgtaatgatgttatgttggcttcatatgttttggacagtacacgcagttcgtacgatttggaaacattgtttatttcttatctcaacactgatatagctgcaatcaaagagaatagatgggctggtgctacagttttattaagaaatctttgggatgaactttcaaaactcattgatttaaactcggcccaatacgtttatgagagcatagagatgcctcttgttcccattttatatgaaatggagaaaatcggttttaaggttgacaaaaacactttgcaggagtatacaaaagagattgagagcaagcttttaaagttggaatcacagatttatcaaatagccggtgaatggtttaacataaactcgccaaaacaactctcatatatattattcgaaaaactgaagcttccggttgttaaaaagaccaaaacaggatattcaacagatgccgaggtattagaagagctgtatgataaacatgacataataccgcttattctggattatagaatgtatacgaaaatactgacaacttactgtcagggactggttcaggcaataaatcctgcaactggaagaattcataccaactttattcagacaggtacggcaactggaagacttgcaagtgcagagcccaatctgcaaaatattcctgtaaaatatgatgagggaaagctaataagaaaggcatttgttccagatgaaggttatgtgttgatagatgctgattattctcagattgagcttagaatacttgcacatatctctgaggatgaacgactgataaatgcttttaaaaataaccttgatattcattcacagacggcggcagagatctttggtgtggatataagtcaggttacaccaattatgcgaagccaggcaaaagcagttaactttggaattgtatatggtatatctgattatggactttcacgggatataaagatttcaagaaaagaagcagccgagtttattaatcgttattttgaaaagtatcccagagtaaaagaatatttggacaatgtcgtcaagtttgcccgtgaaaacggatttgttttgacaatatttaacaggaaaaggtatatcaaggattataagtctactaataaaaacctgagaaactatgcagagagaatagcaatgaattcacctatccagggaagtgctgcagatattatgaaaatagcaatgataagagtttataaaaagctaaaagaaaacaatttaaaatcaagaattattctgcaggtccatgacgaacttttgattgaatcaccctatgaagagaaagagatagtaaaggaaatagtaaaatcggagatggaaaatgcggttttattgaaagttcctttggtagttgaagtgaaagaaggttcaaattggtatgaaacaaagtaaaggatcc

SEQ ID NO: 1576 - DNA, 2623 bp, Artificial Sequence
  Description of Artificial Sequence: Synthetic DNA sequence of Caldicellulosiruptor TOK13B DNA Polymerase I771V
atgaaatacctgctgccgaccgctgctgctggtctgctgctcctcgctgcccagccggcgatggccatggaatttgttatttttgatgggaatagtattctgtatagagctttttttgccttgccacagcttactacctcaacaggcatacctacaaatgctatatatggttttttgaatgtgctgttaaaatacttagattctgaaaaaccggattatgtagcagtagcttttgacaaaaaaggcagagctgtccgaaaaagtgaatatgaagaatacaaggctaacagaaaaccgatgccagattctcttcaggttcagataccttacgtaagagaaatacttgctgctctgaacattcctgtactgaaatgtgaagggtatgaagctgatgacgttataggcacacttgtaaatagatttaaagcccaggatttagagattgtgataataaccggagacagagatacacttcagttacttgataaaaatgtaattgtcaaaatagtcacaacaaggtttgacaggacaactgaagatttgtatgctgtagaaaatgtaaaagaaaaatatggtgtttttgcgcatcaggttgttgactataaagcattagtaggtgatgcgtcagacaatataccaggtgttaagggaattggagataaaactgccataaagctgttagaagagtaccagactctggagaatatatatcagaatctaaataacattaaaggagcgctaaaagagaagttggaatcaggaaaagacatggcatttttatcaaaaagactggctactatcatatgcgatttaccaattgaggtgaatcttgaagaattaaaaaccaaagaatgggacaaagaaagactttatcagattttacttcaacttgagtttaaaagctttattaaaagactgggcttttcagaagagattaactatgcaaggcagaactttcagctacctgaatttagtattaaagaacttcgtgatgtttcagcaatagggggcaaagaaatctatctattgtactcagatgaagaaggacttttttatatttatgaccatcaaacctcaaccatttttacaacttctgataaggaagctattaaagatcttttaacactccaaagcattcaaaaggttgtatatgatttaaaaaatatactccataaggtggactttgatgaagctaatcagataaaaaattgtaatgatgttatgttggcttcatatgttttggacagtacacgcagttcgtacgatttggaaacattgtttatttcttatctcaacactgatatagctgcaatcaaagagaatagatgggctggtgctacagttttattaagaaatctttgggatgaactttcaaaactcattgatttaaactcggcccaatacgtttatgagagcatagagatgcctcttgttcccattttatatgaaatggagaaaatcggttttaaggttgacaaaaacactttgcaggagtatacaaaagagattgagagcaagcttttaaagttggaatcacagatttatcaaatagccggtgaatggtttaacataaactcgccaaaacaactctcatatatattattcgaaaaactgaagcttccggttgttaaaaagaccaaaacaggatattcaacagatgccgaggtattagaagagctgtatgataaacatgacataataccgcttattctggattatagaatgtatacgaaaatactgacaacttactgtcagggactggttcaggcaataaatcctgcaactggaagaattcataccaactttattcagacaggtacggcaactggaagacttgcaagtgcagagcccaatctgcaaaatattcctgtaaaatatgatgagggaaagctaataagaaaggcatttgttccagatgaaggttatgtgttgatagatgctgattattctcagattgagcttagaatacttgcacatatctctgaggatgaacgactgataaatgcttttaaaaataaccttgatattcattcacagacggcggcagagatctttggtgtggatataagtcaggttacaccaattatgcgaagccaggcaaaagcagttaactttggaattgtatatggtatatctgattatggactttcacgggatataaagatttcaagaaaagaagcagccgagtttattaatcgttattttgaaaagtatcccagagtaaaagaatatttggacaatgtcgtcaagtttgcccgtgaaaacggatttgttttgacaatatttaacaggaaaaggtatatcaaggatgttaagtctactaataaaaacctgagaaactatgcagagagaatagcaatgaattcacctatccagggaagtgctgcagatattatgaaaatagcaatgataagagtttataaaaagctaaaagaaaacaatttaaaatcaagaattattctgcaggtccatgacgaacttttgattgaatcaccctatgaagagaaagagatagtaaaggaaatagtaaaatcggagatggaaaatgcggttttattgaaagttcctttggtagttgaagtgaaagaaggttcaaattggtatgaaacaaagtaaaggatcc

SEQ ID NO: 1577 - DNA, 2623 bp, Artificial Sequence
  Description of Artificial Sequence: Synthetic DNA sequence of Caldicellulosiruptor TOK13B DNA Polymerase K772A
atgaaatacctgctgccgaccgctgctgctggtctgctgctcctcgctgcccagccggcgatggccatggaatttgttatttttgatgggaatagtattctgtatagagctttttttgccttgccacagcttactacctcaacaggcatacctacaaatgctatatatggttttttgaatgtgctgttaaaatacttagattctgaaaaaccggattatgtagcagtagcttttgacaaaaaaggcagagctgtccgaaaaagtgaatatgaagaatacaaggctaacagaaaaccgatgccagattctcttcaggttcagataccttacgtaagagaaatacttgctgctctgaacattcctgtactgaaatgtgaagggtatgaagctgatgacgttataggcacacttgtaaatagatttaaagcccaggatttagagattgtgataataaccggagacagagatacacttcagttacttgataaaaatgtaattgtcaaaatagtcacaacaaggtttgacaggacaactgaagatttgtatgctgtagaaaatgtaaaagaaaaatatggtgtttttgcgcatcaggttgttgactataaagcattagtaggtgatgcgtcagacaatataccaggtgttaagggaattggagataaaactgccataaagctgttagaagagtaccagactctggagaatatatatcagaatctaaataacattaaaggagcgctaaaagagaagttggaatcaggaaaagacatggcatttttatcaaaaagactggctactatcatatgcgatttaccaattgaggtgaatcttgaagaattaaaaaccaaagaatgggacaaagaaagactttatcagattttacttcaacttgagtttaaaagctttattaaaagactgggcttttcagaagagattaactatgcaaggcagaactttcagctacctgaatttagtattaaagaacttcgtgatgtttcagcaatagggggcaaagaaatctatctattgtactcagatgaagaaggacttttttatatttatgaccatcaaacctcaaccatttttacaacttctgataaggaagctattaaagatcttttaacactccaaagcattcaaaaggttgtatatgatttaaaaaatatactccataaggtggactttgatgaagctaatcagataaaaaattgtaatgatgttatgttggcttcatatgttttggacagtacacgcagttcgtacgatttggaaacattgtttatttcttatctcaacactgatatagctgcaatcaaagagaatagatgggctggtgctacagttttattaagaaatctttgggatgaactttcaaaactcattgatttaaactcggcccaatacgtttatgagagcatagagatgcctcttgttcccattttatatgaaatggagaaaatcggttttaaggttgacaaaaacactttgcaggagtatacaaaagagattgagagcaagcttttaaagttggaatcacagatttatcaaatagccggtgaatggtttaacataaactcgccaaaacaactctcatatatattattcgaaaaactgaagcttccggttgttaaaaagaccaaaacaggatattcaacagatgccgaggtattagaagagctgtatgataaacatgacataataccgcttattctggattatagaatgtatacgaaaatactgacaacttactgtcagggactggttcaggcaataaatcctgcaactggaagaattcataccaactttattcagacaggtacggcaactggaagacttgcaagtgcagagcccaatctgcaaaatattcctgtaaaatatgatgagggaaagctaataagaaaggcatttgttccagatgaaggttatgtgttgatagatgctgattattctcagattgagcttagaatacttgcacatatctctgaggatgaacgactgataaatgcttttaaaaataaccttgatattcattcacagacggcggcagagatctttggtgtggatataagtcaggttacaccaattatgcgaagccaggcaaaagcagttaactttggaattgtatatggtatatctgattatggactttcacgggatataaagatttcaagaaaagaagcagccgagtttattaatcgttattttgaaaagtatcccagagtaaaagaatatttggacaatgtcgtcaagtttgcccgtgaaaacggatttgttttgacaatatttaacaggaaaaggtatatcaaggatatagcttctactaataaaaacctgagaaactatgcagagagaatagcaatgaattcacctatccagggaagtgctgcagatattatgaaaatagcaatgataagagtttataaaaagctaaaagaaaacaatttaaaatcaagaattattctgcaggtccatgacgaacttttgattgaatcaccctatgaagagaaagagatagtaaaggaaatagtaaaatcggagatggaaaatgcggttttattgaaagttcctttggtagttgaagtgaaagaaggttcaaattggtatgaaacaaagtaaaggatcc

SEQ ID NO: 1578 - DNA, 2623 bp, Artificial Sequence
  Description of Artificial Sequence: Synthetic DNA sequence of Caldicellulosiruptor TOK13B DNA Polymerase K772R
atgaaatacctgctgccgaccgctgctgctggtctgctgctcctcgctgcccagccggcgatggccatggaatttgttatttttgatgggaatagtattctgtatagagctttttttgccttgccacagcttactacctcaacaggcatacctacaaatgctatatatggttttttgaatgtgctgttaaaatacttagattctgaaaaaccggattatgtagcagtagcttttgacaaaaaaggcagagctgtccgaaaaagtgaatatgaagaatacaaggctaacagaaaaccgatgccagattctcttcaggttcagataccttacgtaagagaaatacttgctgctctgaacattcctgtactgaaatgtgaagggtatgaagctgatgacgttataggcacacttgtaaatagatttaaagcccaggatttagagattgtgataataaccggagacagagatacacttcagttacttgataaaaatgtaattgtcaaaatagtcacaacaaggtttgacaggacaactgaagatttgtatgctgtagaaaatgtaaaagaaaaatatggtgtttttgcgcatcaggttgttgactataaagcattagtaggtgatgcgtcagacaatataccaggtgttaagggaattggagataaaactgccataaagctgttagaagagtaccagactctggagaatatatatcagaatctaaataacattaaaggagcgctaaaagagaagttggaatcaggaaaagacatggcatttttatcaaaaagactggctactatcatatgcgatttaccaattgaggtgaatcttgaagaattaaaaaccaaagaatgggacaaagaaagactttatcagattttacttcaacttgagtttaaaagctttattaaaagactgggcttttcagaagagattaactatgcaaggcagaactttcagctacctgaatttagtattaaagaacttcgtgatgtttcagcaatagggggcaaagaaatctatctattgtactcagatgaagaaggacttttttatatttatgaccatcaaacctcaaccatttttacaacttctgataaggaagctattaaagatcttttaacactccaaagcattcaaaaggttgtatatgatttaaaaaatatactccataaggtggactttgatgaagctaatcagataaaaaattgtaatgatgttatgttggcttcatatgttttggacagtacacgcagttcgtacgatttggaaacattgtttatttcttatctcaacactgatatagctgcaatcaaagagaatagatgggctggtgctacagttttattaagaaatctttgggatgaactttcaaaactcattgatttaaactcggcccaatacgtttatgagagcatagagatgcctcttgttcccattttatatgaaatggagaaaatcggttttaaggttgacaaaaacactttgcaggagtatacaaaagagattgagagcaagcttttaaagttggaatcacagatttatcaaatagccggtgaatggtttaacataaactcgccaaaacaactctcatatatattattcgaaaaactgaagcttccggttgttaaaaagaccaaaacaggatattcaacagatgccgaggtattagaagagctgtatgataaacatgacataataccgcttattctggattatagaatgtatacgaaaatactgacaacttactgtcagggactggttcaggcaataaatcctgcaactggaagaattcataccaactttattcagacaggtacggcaactggaagacttgcaagtgcagagcccaatctgcaaaatattcctgtaaaatatgatgagggaaagctaataagaaaggcatttgttccagatgaaggttatgtgttgatagatgctgattattctcagattgagcttagaatacttgcacatatctctgaggatgaacgactgataaatgcttttaaaaataaccttgatattcattcacagacggcggcagagatctttggtgtggatataagtcaggttacaccaattatgcgaagccaggcaaaagcagttaactttggaattgtatatggtatatctgattatggactttcacgggatataaagatttcaagaaaagaagcagccgagtttattaatcgttattttgaaaagtatcccagagtaaaagaatatttggacaatgtcgtcaagtttgcccgtgaaaacggatttgttttgacaatatttaacaggaaaaggtatatcaaggatatacgttctactaataaaaacctgagaaactatgcagagagaatagcaatgaattcacctatccagggaagtgctgcagatattatgaaaatagcaatgataagagtttataaaaagctaaaagaaaacaatttaaaatcaagaattattctgcaggtccatgacgaacttttgattgaatcaccctatgaagagaaagagatagtaaaggaaatagtaaaatcggagatggaaaatgcggttttattgaaagttcctttggtagttgaagtgaaagaaggttcaaattggtatgaaacaaagtaaaggatcc

SEQ ID NO: 1579 - DNA, 2623 bp, Artificial Sequence
  Description of Artificial Sequence: Synthetic DNA sequence of Caldicellulosiruptor TOK13B DNA Polymerase K772N
atgaaatacctgctgccgaccgctgctgctggtctgctgctcctcgctgcccagccggcgatggccatggaatttgttatttttgatgggaatagtattctgtatagagctttttttgccttgccacagcttactacctcaacaggcatacctacaaatgctatatatggttttttgaatgtgctgttaaaatacttagattctgaaaaaccggattatgtagcagtagcttttgacaaaaaaggcagagctgtccgaaaaagtgaatatgaagaatacaaggctaacagaaaaccgatgccagattctcttcaggttcagataccttacgtaagagaaatacttgctgctctgaacattcctgtactgaaatgtgaagggtatgaagctgatgacgttataggcacacttgtaaatagatttaaagcccaggatttagagattgtgataataaccggagacagagatacacttcagttacttgataaaaatgtaattgtcaaaatagtcacaacaaggtttgacaggacaactgaagatttgtatgctgtagaaaatgtaaaagaaaaatatggtgtttttgcgcatcaggttgttgactataaagcattagtaggtgatgcgtcagacaatataccaggtgttaagggaattggagataaaactgccataaagctgttagaagagtaccagactctggagaatatatatcagaatctaaataacattaaaggagcgctaaaagagaagttggaatcaggaaaagacatggcatttttatcaaaaagactggctactatcatatgcgatttaccaattgaggtgaatcttgaagaattaaaaaccaaagaatgggacaaagaaagactttatcagattttacttcaacttgagtttaaaagctttattaaaagactgggcttttcagaagagattaactatgcaaggcagaactttcagctacctgaatttagtattaaagaacttcgtgatgtttcagcaatagggggcaaagaaatctatctattgtactcagatgaagaaggacttttttatatttatgaccatcaaacctcaaccatttttacaacttctgataaggaagctattaaagatcttttaacactccaaagcattcaaaaggttgtatatgatttaaaaaatatactccataaggtggactttgatgaagctaatcagataaaaaattgtaatgatgttatgttggcttcatatgttttggacagtacacgcagttcgtacgatttggaaacattgtttatttcttatctcaacactgatatagctgcaatcaaagagaatagatgggctggtgctacagttttattaagaaatctttgggatgaactttcaaaactcattgatttaaactcggcccaatacgtttatgagagcatagagatgcctcttgttcccattttatatgaaatggagaaaatcggttttaaggttgacaaaaacactttgcaggagtatacaaaagagattgagagcaagcttttaaagttggaatcacagatttatcaaatagccggtgaatggtttaacataaactcgccaaaacaactctcatatatattattcgaaaaactgaagcttccggttgttaaaaagaccaaaacaggatattcaacagatgccgaggtattagaagagctgtatgataaacatgacataataccgcttattctggattatagaatgtatacgaaaatactgacaacttactgtcagggactggttcaggcaataaatcctgcaactggaagaattcataccaactttattcagacaggtacggcaactggaagacttgcaagtgcagagcccaatctgcaaaatattcctgtaaaatatgatgagggaaagctaataagaaaggcatttgttccagatgaaggttatgtgttgatagatgctgattattctcagattgagcttagaatacttgcacatatctctgaggatgaacgactgataaatgcttttaaaaataaccttgatattcattcacagacggcggcagagatctttggtgtggatataagtcaggttacaccaattatgcgaagccaggcaaaagcagttaactttggaattgtatatggtatatctgattatggactttcacgggatataaagatttcaagaaaagaagcagccgagtttattaatcgttattttgaaaagtatcccagagtaaaagaatatttggacaatgtcgtcaagtttgcccgtgaaaacggatttgttttgacaatatttaacaggaaaaggtatatcaaggatataaattctactaataaaaacctgagaaactatgcagagagaatagcaatgaattcacctatccagggaagtgctgcagatattatgaaaatagcaatgataagagtttataaaaagctaaaagaaaacaatttaaaatcaagaattattctgcaggtccatgacgaacttttgattgaatcaccctatgaagagaaagagatagtaaaggaaatagtaaaatcggagatggaaaatgcggttttattgaaagttcctttggtagttgaagtgaaagaaggttcaaattggtatgaaacaaagtaaaggatcc

SEQ ID NO: 1580 - DNA, 2623 bp, Artificial Sequence
  Description of Artificial Sequence: Synthetic DNA sequence of Caldicellulosiruptor TOK13B DNA Polymerase K772D
atgaaatacctgctgccgaccgctgctgctggtctgctgctcctcgctgcccagccggcgatggccatggaatttgttatttttgatgggaatagtattctgtatagagctttttttgccttgccacagcttactacctcaacaggcatacctacaaatgctatatatggttttttgaatgtgctgttaaaatacttagattctgaaaaaccggattatgtagcagtagcttttgacaaaaaaggcagagctgtccgaaaaagtgaatatgaagaatacaaggctaacagaaaaccgatgccagattctcttcaggttcagataccttacgtaagagaaatacttgctgctctgaacattcctgtactgaaatgtgaagggtatgaagctgatgacgttataggcacacttgtaaatagatttaaagcccaggatttagagattgtgataataaccggagacagagatacacttcagttacttgataaaaatgtaattgtcaaaatagtcacaacaaggtttgacaggacaactgaagatttgtatgctgtagaaaatgtaaaagaaaaatatggtgtttttgcgcatcaggttgttgactataaagcattagtaggtgatgcgtcagacaatataccaggtgttaagggaattggagataaaactgccataaagctgttagaagagtaccagactctggagaatatatatcagaatctaaataacattaaaggagcgctaaaagagaagttggaatcaggaaaagacatggcatttttatcaaaaagactggctactatcatatgcgatttaccaattgaggtgaatcttgaagaattaaaaaccaaagaatgggacaaagaaagactttatcagattttacttcaacttgagtttaaaagctttattaaaagactgggcttttcagaagagattaactatgcaaggcagaactttcagctacctgaatttagtattaaagaacttcgtgatgtttcagcaatagggggcaaagaaatctatctattgtactcagatgaagaaggacttttttatatttatgaccatcaaacctcaaccatttttacaacttctgataaggaagctattaaagatcttttaacactccaaagcattcaaaaggttgtatatgatttaaaaaatatactccataaggtggactttgatgaagctaatcagataaaaaattgtaatgatgttatgttggcttcatatgttttggacagtacacgcagttcgtacgatttggaaacattgtttatttcttatctcaacactgatatagctgcaatcaaagagaatagatgggctggtgctacagttttattaagaaatctttgggatgaactttcaaaactcattgatttaaactcggcccaatacgtttatgagagcatagagatgcctcttgttcccattttatatgaaatggagaaaatcggttttaaggttgacaaaaacactttgcaggagtatacaaaagagattgagagcaagcttttaaagttggaatcacagatttatcaaatagccggtgaatggtttaacataaactcgccaaaacaactctcatatatattattcgaaaaactgaagcttccggttgttaaaaagaccaaaacaggatattcaacagatgccgaggtattagaagagctgtatgataaacatgacataataccgcttattctggattatagaatgtatacgaaaatactgacaacttactgtcagggactggttcaggcaataaatcctgcaactggaagaattcataccaactttattcagacaggtacggcaactggaagacttgcaagtgcagagcccaatctgcaaaatattcctgtaaaatatgatgagggaaagctaataagaaaggcatttgttccagatgaaggttatgtgttgatagatgctgattattctcagattgagcttagaatacttgcacatatctctgaggatgaacgactgataaatgcttttaaaaataaccttgatattcattcacagacggcggcagagatctttggtgtggatataagtcaggttacaccaattatgcgaagccaggcaaaagcagttaactttggaattgtatatggtatatctgattatggactttcacgggatataaagatttcaagaaaagaagcagccgagtttattaatcgttattttgaaaagtatcccagagtaaaagaatatttggacaatgtcgtcaagtttgcccgtgaaaacggatttgttttgacaatatttaacaggaaaaggtatatcaaggatatagattctactaataaaaacctgagaaactatgcagagagaatagcaatgaattcacctatccagggaagtgctgcagatattatgaaaatagcaatgataagagtttataaaaagctaaaagaaaacaatttaaaatcaagaattattctgcaggtccatgacgaacttttgattgaatcaccctatgaagagaaagagatagtaaaggaaatagtaaaatcggagatggaaaatgcggttttattgaaagttcctttggtagttgaagtgaaagaaggttcaaattggtatgaaacaaagtaaaggatcc

SEQ ID NO: 1581 - DNA, 2623 bp, Artificial Sequence
  Description of Artificial Sequence: Synthetic DNA sequence of Caldicellulosiruptor TOK13B DNA Polymerase K772C
atgaaatacctgctgccgaccgctgctgctggtctgctgctcctcgctgcccagccggcgatggccatggaatttgttatttttgatgggaatagtattctgtatagagctttttttgccttgccacagcttactacctcaacaggcatacctacaaatgctatatatggttttttgaatgtgctgttaaaatacttagattctgaaaaaccggattatgtagcagtagcttttgacaaaaaaggcagagctgtccgaaaaagtgaatatgaagaatacaaggctaacagaaaaccgatgccagattctcttcaggttcagataccttacgtaagagaaatacttgctgctctgaacattcctgtactgaaatgtgaagggtatgaagctgatgacgttataggcacacttgtaaatagatttaaagcccaggatttagagattgtgataataaccggagacagagatacacttcagttacttgataaaaatgtaattgtcaaaatagtcacaacaaggtttgacaggacaactgaagatttgtatgctgtagaaaatgtaaaagaaaaatatggtgtttttgcgcatcaggttgttgactataaagcattagtaggtgatgcgtcagacaatataccaggtgttaagggaattggagataaaactgccataaagctgttagaagagtaccagactctggagaatatatatcagaatctaaataacattaaaggagcgctaaaagagaagttggaatcaggaaaagacatggcatttttatcaaaaagactggctactatcatatgcgatttaccaattgaggtgaatcttgaagaattaaaaaccaaagaatgggacaaagaaagactttatcagattttacttcaacttgagtttaaaagctttattaaaagactgggcttttcagaagagattaactatgcaaggcagaactttcagctacctgaatttagtattaaagaacttcgtgatgtttcagcaatagggggcaaagaaatctatctattgtactcagatgaagaaggacttttttatatttatgaccatcaaacctcaaccatttttacaacttctgataaggaagctattaaagatcttttaacactccaaagcattcaaaaggttgtatatgatttaaaaaatatactccataaggtggactttgatgaagctaatcagataaaaaattgtaatgatgttatgttggcttcatatgttttggacagtacacgcagttcgtacgatttggaaacattgtttatttcttatctcaacactgatatagctgcaatcaaagagaatagatgggctggtgctacagttttattaagaaatctttgggatgaactttcaaaactcattgatttaaactcggcccaatacgtttatgagagcatagagatgcctcttgttcccattttatatgaaatggagaaaatcggttttaaggttgacaaaaacactttgcaggagtatacaaaagagattgagagcaagcttttaaagttggaatcacagatttatcaaatagccggtgaatggtttaacataaactcgccaaaacaactctcatatatattattcgaaaaactgaagcttccggttgttaaaaagaccaaaacaggatattcaacagatgccgaggtattagaagagctgtatgataaacatgacataataccgcttattctggattatagaatgtatacgaaaatactgacaacttactgtcagggactggttcaggcaataaatcctgcaactggaagaattcataccaactttattcagacaggtacggcaactggaagacttgcaagtgcagagcccaatctgcaaaatattcctgtaaaatatgatgagggaaagctaataagaaaggcatttgttccagatgaaggttatgtgttgatagatgctgattattctcagattgagcttagaatacttgcacatatctctgaggatgaacgactgataaatgcttttaaaaataaccttgatattcattcacagacggcggcagagatctttggtgtggatataagtcaggttacaccaattatgcgaagccaggcaaaagcagttaactttggaattgtatatggtatatctgattatggactttcacgggatataaagatttcaagaaaagaagcagccgagtttattaatcgttattttgaaaagtatcccagagtaaaagaatatttggacaatgtcgtcaagtttgcccgtgaaaacggatttgttttgacaatatttaacaggaaaaggtatatcaaggatatatgttctactaataaaaacctgagaaactatgcagagagaatagcaatgaattcacctatccagggaagtgctgcagatattatgaaaatagcaatgataagagtttataaaaagctaaaagaaaacaatttaaaatcaagaattattctgcaggtccatgacgaacttttgattgaatcaccctatgaagagaaagagatagtaaaggaaatagtaaaatcggagatggaaaatgcggttttattgaaagttcctttggtagttgaagtgaaagaaggttcaaattggtatgaaacaaagtaaaggatcc

SEQ ID NO: 1582 - DNA, 2623 bp, Artificial Sequence
  Description of Artificial Sequence: Synthetic DNA sequence of Caldicellulosiruptor TOK13B DNA Polymerase K772E
atgaaatacctgctgccgaccgctgctgctggtctgctgctcctcgctgcccagccggcgatggccatggaatttgttatttttgatgggaatagtattctgtatagagctttttttgccttgccacagcttactacctcaacaggcatacctacaaatgctatatatggttttttgaatgtgctgttaaaatacttagattctgaaaaaccggattatgtagcagtagcttttgacaaaaaaggcagagctgtccgaaaaagtgaatatgaagaatacaaggctaacagaaaaccgatgccagattctcttcaggttcagataccttacgtaagagaaatacttgctgctctgaacattcctgtactgaaatgtgaagggtatgaagctgatgacgttataggcacacttgtaaatagatttaaagcccaggatttagagattgtgataataaccggagacagagatacacttcagttacttgataaaaatgtaattgtcaaaatagtcacaacaaggtttgacaggacaactgaagatttgtatgctgtagaaaatgtaaaagaaaaatatggtgtttttgcgcatcaggttgttgactataaagcattagtaggtgatgcgtcagacaatataccaggtgttaagggaattggagataaaactgccataaagctgttagaagagtaccagactctggagaatatatatcagaatctaaataacattaaaggagcgctaaaagagaagttggaatcaggaaaagacatggcatttttatcaaaaagactggctactatcatatgcgatttaccaattgaggtgaatcttgaagaattaaaaaccaaagaatgggacaaagaaagactttatcagattttacttcaacttgagtttaaaagctttattaaaagactgggcttttcagaagagattaactatgcaaggcagaactttcagctacctgaatttagtattaaagaacttcgtgatgtttcagcaatagggggcaaagaaatctatctattgtactcagatgaagaaggacttttttatatttatgaccatcaaacctcaaccatttttacaacttctgataaggaagctattaaagatcttttaacactccaaagcattcaaaaggttgtatatgatttaaaaaatatactccataaggtggactttgatgaagctaatcagataaaaaattgtaatgatgttatgttggcttcatatgttttggacagtacacgcagttcgtacgatttggaaacattgtttatttcttatctcaacactgatatagctgcaatcaaagagaatagatgggctggtgctacagttttattaagaaatctttgggatgaactttcaaaactcattgatttaaactcggcccaatacgtttatgagagcatagagatgcctcttgttcccattttatatgaaatggagaaaatcggttttaaggttgacaaaaacactttgcaggagtatacaaaagagattgagagcaagcttttaaagttggaatcacagatttatcaaatagccggtgaatggtttaacataaactcgccaaaacaactctcatatatattattcgaaaaactgaagcttccggttgttaaaaagaccaaaacaggatattcaacagatgccgaggtattagaagagctgtatgataaacatgacataataccgcttattctggattatagaatgtatacgaaaatactgacaacttactgtcagggactggttcaggcaataaatcctgcaactggaagaattcataccaactttattcagacaggtacggcaactggaagacttgcaagtgcagagcccaatctgcaaaatattcctgtaaaatatgatgagggaaagctaataagaaaggcatttgttccagatgaaggttatgtgttgatagatgctgattattctcagattgagcttagaatacttgcacatatctctgaggatgaacgactgataaatgcttttaaaaataaccttgatattcattcacagacggcggcagagatctttggtgtggatataagtcaggttacaccaattatgcgaagccaggcaaaagcagttaactttggaattgtatatggtatatctgattatggactttcacgggatataaagatttcaagaaaagaagcagccgagtttattaatcgttattttgaaaagtatcccagagtaaaagaatatttggacaatgtcgtcaagtttgcccgtgaaaacggatttgttttgacaatatttaacaggaaaaggtatatcaaggatatagaatctactaataaaaacctgagaaactatgcagagagaatagcaatgaattcacctatccagggaagtgctgcagatattatgaaaatagcaatgataagagtttataaaaagctaaaagaaaacaatttaaaatcaagaattattctgcaggtccatgacgaacttttgattgaatcaccctatgaagagaaagagatagtaaaggaaatagtaaaatcggagatggaaaatgcggttttattgaaagttcctttggtagttgaagtgaaagaaggttcaaattggtatgaaacaaagtaaaggatcc

SEQ ID NO: 1583 - DNA, 2623 bp, Artificial Sequence
  Description of Artificial Sequence: Synthetic DNA sequence of Caldicellulosiruptor TOK13B DNA Polymerase K772Q
atgaaatacctgctgccgaccgctgctgctggtctgctgctcctcgctgcccagccggcgatggccatggaatttgttatttttgatgggaatagtattctgtatagagctttttttgccttgccacagcttactacctcaacaggcatacctacaaatgctatatatggttttttgaatgtgctgttaaaatacttagattctgaaaaaccggattatgtagcagtagcttttgacaaaaaaggcagagctgtccgaaaaagtgaatatgaagaatacaaggctaacagaaaaccgatgccagattctcttcaggttcagataccttacgtaagagaaatacttgctgctctgaacattcctgtactgaaatgtgaagggtatgaagctgatgacgttataggcacacttgtaaatagatttaaagcccaggatttagagattgtgataataaccggagacagagatacacttcagttacttgataaaaatgtaattgtcaaaatagtcacaacaaggtttgacaggacaactgaagatttgtatgctgtagaaaatgtaaaagaaaaatatggtgtttttgcgcatcaggttgttgactataaagcattagtaggtgatgcgtcagacaatataccaggtgttaagggaattggagataaaactgccataaagctgttagaagagtaccagactctggagaatatatatcagaatctaaataacattaaaggagcgctaaaagagaagttggaatcaggaaaagacatggcatttttatcaaaaagactggctactatcatatgcgatttaccaattgaggtgaatcttgaagaattaaaaaccaaagaatgggacaaagaaagactttatcagattttacttcaacttgagtttaaaagctttattaaaagactgggcttttcagaagagattaactatgcaaggcagaactttcagctacctgaatttagtattaaagaacttcgtgatgtttcagcaatagggggcaaagaaatctatctattgtactcagatgaagaaggacttttttatatttatgaccatcaaacctcaaccatttttacaacttctgataaggaagctattaaagatcttttaacactccaaagcattcaaaaggttgtatatgatttaaaaaatatactccataaggtggactttgatgaagctaatcagataaaaaattgtaatgatgttatgttggcttcatatgttttggacagtacacgcagttcgtacgatttggaaacattgtttatttcttatctcaacactgatatagctgcaatcaaagagaatagatgggctggtgctacagttttattaagaaatctttgggatgaactttcaaaactcattgatttaaactcggcccaatacgtttatgagagcatagagatgcctcttgttcccattttatatgaaatggagaaaatcggttttaaggttgacaaaaacactttgcaggagtatacaaaagagattgagagcaagcttttaaagttggaatcacagatttatcaaatagccggtgaatggtttaacataaactcgccaaaacaactctcatatatattattcgaaaaactgaagcttccggttgttaaaaagaccaaaacaggatattcaacagatgccgaggtattagaagagctgtatgataaacatgacataataccgcttattctggattatagaatgtatacgaaaatactgacaacttactgtcagggactggttcaggcaataaatcctgcaactggaagaattcataccaactttattcagacaggtacggcaactggaagacttgcaagtgcagagcccaatctgcaaaatattcctgtaaaatatgatgagggaaagctaataagaaaggcatttgttccagatgaaggttatgtgttgatagatgctgattattctcagattgagcttagaatacttgcacatatctctgaggatgaacgactgataaatgcttttaaaaataaccttgatattcattcacagacggcggcagagatctttggtgtggatataagtcaggttacaccaattatgcgaagccaggcaaaagcagttaactttggaattgtatatggtatatctgattatggactttcacgggatataaagatttcaagaaaagaagcagccgagtttattaatcgttattttgaaaagtatcccagagtaaaagaatatttggacaatgtcgtcaagtttgcccgtgaaaacggatttgttttgacaatatttaacaggaaaaggtatatcaaggatatacaatctactaataaaaacctgagaaactatgcagagagaatagcaatgaattcacctatccagggaagtgctgcagatattatgaaaatagcaatgataagagtttataaaaagctaaaagaaaacaatttaaaatcaagaattattctgcaggtccatgacgaacttttgattgaatcaccctatgaagagaaagagatagtaaaggaaatagtaaaatcggagatggaaaatgcggttttattgaaagttcctttggtagttgaagtgaaagaaggttcaaattggtatgaaacaaagtaaaggatcc

SEQ ID NO: 1584 - DNA, 2623 bp, Artificial Sequence
  Description of Artificial Sequence: Synthetic DNA sequence of Caldicellulosiruptor TOK13B DNA Polymerase K772G
atgaaatacctgctgccgaccgctgctgctggtctgctgctcctcgctgcccagccggcgatggccatggaatttgttatttttgatgggaatagtattctgtatagagctttttttgccttgccacagcttactacctcaacaggcatacctacaaatgctatatatggttttttgaatgtgctgttaaaatacttagattctgaaaaaccggattatgtagcagtagcttttgacaaaaaaggcagagctgtccgaaaaagtgaatatgaagaatacaaggctaacagaaaaccgatgccagattctcttcaggttcagataccttacgtaagagaaatacttgctgctctgaacattcctgtactgaaatgtgaagggtatgaagctgatgacgttataggcacacttgtaaatagatttaaagcccaggatttagagattgtgataataaccggagacagagatacacttcagttacttgataaaaatgtaattgtcaaaatagtcacaacaaggtttgacaggacaactgaagatttgtatgctgtagaaaatgtaaaagaaaaatatggtgtttttgcgcatcaggttgttgactataaagcattagtaggtgatgcgtcagacaatataccaggtgttaagggaattggagataaaactgccataaagctgttagaagagtaccagactctggagaatatatatcagaatctaaataacattaaaggagcgctaaaagagaagttggaatcaggaaaagacatggcatttttatcaaaaagactggctactatcatatgcgatttaccaattgaggtgaatcttgaagaattaaaaaccaaagaatgggacaaagaaagactttatcagattttacttcaacttgagtttaaaagctttattaaaagactgggcttttcagaagagattaactatgcaaggcagaactttcagctacctgaatttagtattaaagaacttcgtgatgtttcagcaatagggggcaaagaaatctatctattgtactcagatgaagaaggacttttttatatttatgaccatcaaacctcaaccatttttacaacttctgataaggaagctattaaagatcttttaacactccaaagcattcaaaaggttgtatatgatttaaaaaatatactccataaggtggactttgatgaagctaatcagataaaaaattgtaatgatgttatgttggcttcatatgttttggacagtacacgcagttcgtacgatttggaaacattgtttatttcttatctcaacactgatatagctgcaatcaaagagaatagatgggctggtgctacagttttattaagaaatctttgggatgaactttcaaaactcattgatttaaactcggcccaatacgtttatgagagcatagagatgcctcttgttcccattttatatgaaatggagaaaatcggttttaaggttgacaaaaacactttgcaggagtatacaaaagagattgagagcaagcttttaaagttggaatcacagatttatcaaatagccggtgaatggtttaacataaactcgccaaaacaactctcatatatattattcgaaaaactgaagcttccggttgttaaaaagaccaaaacaggatattcaacagatgccgaggtattagaagagctgtatgataaacatgacataataccgcttattctggattatagaatgtatacgaaaatactgacaacttactgtcagggactggttcaggcaataaatcctgcaactggaagaattcataccaactttattcagacaggtacggcaactggaagacttgcaagtgcagagcccaatctgcaaaatattcctgtaaaatatgatgagggaaagctaataagaaaggcatttgttccagatgaaggttatgtgttgatagatgctgattattctcagattgagcttagaatacttgcacatatctctgaggatgaacgactgataaatgcttttaaaaataaccttgatattcattcacagacggcggcagagatctttggtgtggatataagtcaggttacaccaattatgcgaagccaggcaaaagcagttaactttggaattgtatatggtatatctgattatggactttcacgggatataaagatttcaagaaaagaagcagccgagtttattaatcgttattttgaaaagtatcccagagtaaaagaatatttggacaatgtcgtcaagtttgcccgtgaaaacggatttgttttgacaatatttaacaggaaaaggtatatcaaggatataggttctactaataaaaacctgagaaactatgcagagagaatagcaatgaattcacctatccagggaagtgctgcagatattatgaaaatagcaatgataagagtttataaaaagctaaaagaaaacaatttaaaatcaagaattattctgcaggtccatgacgaacttttgattgaatcaccctatgaagagaaagagatagtaaaggaaatagtaaaatcggagatggaaaatgcggttttattgaaagttcctttggtagttgaagtgaaagaaggttcaaattggtatgaaacaaagtaaaggatcc

SEQ ID NO: 1585 - DNA, 2623 bp, Artificial Sequence
  Description of Artificial Sequence: Synthetic DNA sequence of Caldicellulosiruptor TOK13B DNA Polymerase K772H
atgaaatacctgctgccgaccgctgctgctggtctgctgctcctcgctgcccagccggcgatggccatggaatttgttatttttgatgggaatagtattctgtatagagctttttttgccttgccacagcttactacctcaacaggcatacctacaaatgctatatatggttttttgaatgtgctgttaaaatacttagattctgaaaaaccggattatgtagcagtagcttttgacaaaaaaggcagagctgtccgaaaaagtgaatatgaagaatacaaggctaacagaaaaccgatgccagattctcttcaggttcagataccttacgtaagagaaatacttgctgctctgaacattcctgtactgaaatgtgaagggtatgaagctgatgacgttataggcacacttgtaaatagatttaaagcccaggatttagagattgtgataataaccggagacagagatacacttcagttacttgataaaaatgtaattgtcaaaatagtcacaacaaggtttgacaggacaactgaagatttgtatgctgtagaaaatgtaaaagaaaaatatggtgtttttgcgcatcaggttgttgactataaagcattagtaggtgatgcgtcagacaatataccaggtgttaagggaattggagataaaactgccataaagctgttagaagagtaccagactctggagaatatatatcagaatctaaataacattaaaggagcgctaaaagagaagttggaatcaggaaaagacatggcatttttatcaaaaagactggctactatcatatgcgatttaccaattgaggtgaatcttgaagaattaaaaaccaaagaatgggacaaagaaagactttatcagattttacttcaacttgagtttaaaagctttattaaaagactgggcttttcagaagagattaactatgcaaggcagaactttcagctacctgaatttagtattaaagaacttcgtgatgtttcagcaatagggggcaaagaaatctatctattgtactcagatgaagaaggacttttttatatttatgaccatcaaacctcaaccatttttacaacttctgataaggaagctattaaagatcttttaacactccaaagcattcaaaaggttgtatatgatttaaaaaatatactccataaggtggactttgatgaagctaatcagataaaaaattgtaatgatgttatgttggcttcatatgttttggacagtacacgcagttcgtacgatttggaaacattgtttatttcttatctcaacactgatatagctgcaatcaaagagaatagatgggctggtgctacagttttattaagaaatctttgggatgaactttcaaaactcattgatttaaactcggcccaatacgtttatgagagcatagagatgcctcttgttcccattttatatgaaatggagaaaatcggttttaaggttgacaaaaacactttgcaggagtatacaaaagagattgagagcaagcttttaaagttggaatcacagatttatcaaatagccggtgaatggtttaacataaactcgccaaaacaactctcatatatattattcgaaaaactgaagcttccggttgttaaaaagaccaaaacaggatattcaacagatgccgaggtattagaagagctgtatgataaacatgacataataccgcttattctggattatagaatgtatacgaaaatactgacaacttactgtcagggactggttcaggcaataaatcctgcaactggaagaattcataccaactttattcagacaggtacggcaactggaagacttgcaagtgcagagcccaatctgcaaaatattcctgtaaaatatgatgagggaaagctaataagaaaggcatttgttccagatgaaggttatgtgttgatagatgctgattattctcagattgagcttagaatacttgcacatatctctgaggatgaacgactgataaatgcttttaaaaataaccttgatattcattcacagacggcggcagagatctttggtgtggatataagtcaggttacaccaattatgcgaagccaggcaaaagcagttaactttggaattgtatatggtatatctgattatggactttcacgggatataaagatttcaagaaaagaagcagccgagtttattaatcgttattttgaaaagtatcccagagtaaaagaatatttggacaatgtcgtcaagtttgcccgtgaaaacggatttgttttgacaatatttaacaggaaaaggtatatcaaggatatacattctactaataaaaacctgagaaactatgcagagagaatagcaatgaattcacctatccagggaagtgctgcagatattatgaaaatagcaatgataagagtttataaaaagctaaaagaaaacaatttaaaatcaagaattattctgcaggtccatgacgaacttttgattgaatcaccctatgaagagaaagagatagtaaaggaaatagtaaaatcggagatggaaaatgcggttttattgaaagttcctttggtagttgaagtgaaagaaggttcaaattggtatgaaacaaagtaaaggatcc

SEQ ID NO: 1586 - DNA, 2623 bp, Artificial Sequence
  Description of Artificial Sequence: Synthetic DNA sequence of Caldicellulosiruptor TOK13B DNA Polymerase K772I
atgaaatacctgctgccgaccgctgctgctggtctgctgctcctcgctgcccagccggcgatggccatggaatttgttatttttgatgggaatagtattctgtatagagctttttttgccttgccacagcttactacctcaacaggcatacctacaaatgctatatatggttttttgaatgtgctgttaaaatacttagattctgaaaaaccggattatgtagcagtagcttttgacaaaaaaggcagagctgtccgaaaaagtgaatatgaagaatacaaggctaacagaaaaccgatgccagattctcttcaggttcagataccttacgtaagagaaatacttgctgctctgaacattcctgtactgaaatgtgaagggtatgaagctgatgacgttataggcacacttgtaaatagatttaaagcccaggatttagagattgtgataataaccggagacagagatacacttcagttacttgataaaaatgtaattgtcaaaatagtcacaacaaggtttgacaggacaactgaagatttgtatgctgtagaaaatgtaaaagaaaaatatggtgtttttgcgcatcaggttgttgactataaagcattagtaggtgatgcgtcagacaatataccaggtgttaagggaattggagataaaactgccataaagctgttagaagagtaccagactctggagaatatatatcagaatctaaataacattaaaggagcgctaaaagagaagttggaatcaggaaaagacatggcatttttatcaaaaagactggctactatcatatgcgatttaccaattgaggtgaatcttgaagaattaaaaaccaaagaatgggacaaagaaagactttatcagattttacttcaacttgagtttaaaagctttattaaaagactgggcttttcagaagagattaactatgcaaggcagaactttcagctacctgaatttagtattaaagaacttcgtgatgtttcagcaatagggggcaaagaaatctatctattgtactcagatgaagaaggacttttttatatttatgaccatcaaacctcaaccatttttacaacttctgataaggaagctattaaagatcttttaacactccaaagcattcaaaaggttgtatatgatttaaaaaatatactccataaggtggactttgatgaagctaatcagataaaaaattgtaatgatgttatgttggcttcatatgttttggacagtacacgcagttcgtacgatttggaaacattgtttatttcttatctcaacactgatatagctgcaatcaaagagaatagatgggctggtgctacagttttattaagaaatctttgggatgaactttcaaaactcattgatttaaactcggcccaatacgtttatgagagcatagagatgcctcttgttcccattttatatgaaatggagaaaatcggttttaaggttgacaaaaacactttgcaggagtatacaaaagagattgagagcaagcttttaaagttggaatcacagatttatcaaatagccggtgaatggtttaacataaactcgccaaaacaactctcatatatattattcgaaaaactgaagcttccggttgttaaaaagaccaaaacaggatattcaacagatgccgaggtattagaagagctgtatgataaacatgacataataccgcttattctggattatagaatgtatacgaaaatactgacaacttactgtcagggactggttcaggcaataaatcctgcaactggaagaattcataccaactttattcagacaggtacggcaactggaagacttgcaagtgcagagcccaatctgcaaaatattcctgtaaaatatgatgagggaaagctaataagaaaggcatttgttccagatgaaggttatgtgttgatagatgctgattattctcagattgagcttagaatacttgcacatatctctgaggatgaacgactgataaatgcttttaaaaataaccttgatattcattcacagacggcggcagagatctttggtgtggatataagtcaggttacaccaattatgcgaagccaggcaaaagcagttaactttggaattgtatatggtatatctgattatggactttcacgggatataaagatttcaagaaaagaagcagccgagtttattaatcgttattttgaaaagtatcccagagtaaaagaatatttggacaatgtcgtcaagtttgcccgtgaaaacggatttgttttgacaatatttaacaggaaaaggtatatcaaggatataatttctactaataaaaacctgagaaactatgcagagagaatagcaatgaattcacctatccagggaagtgctgcagatattatgaaaatagcaatgataagagtttataaaaagctaaaagaaaacaatttaaaatcaagaattattctgcaggtccatgacgaacttttgattgaatcaccctatgaagagaaagagatagtaaaggaaatagtaaaatcggagatggaaaatgcggttttattgaaagttcctttggtagttgaagtgaaagaaggttcaaattggtatgaaacaaagtaaaggatcc

SEQ ID NO: 1587 - DNA, 2623 bp, Artificial Sequence
  Description of Artificial Sequence: Synthetic DNA sequence of Caldicellulosiruptor TOK13B DNA Polymerase K772L
atgaaatacctgctgccgaccgctgctgctggtctgctgctcctcgctgcccagccggcgatggccatggaatttgttatttttgatgggaatagtattctgtatagagctttttttgccttgccacagcttactacctcaacaggcatacctacaaatgctatatatggttttttgaatgtgctgttaaaatacttagattctgaaaaaccggattatgtagcagtagcttttgacaaaaaaggcagagctgtccgaaaaagtgaatatgaagaatacaaggctaacagaaaaccgatgccagattctcttcaggttcagataccttacgtaagagaaatacttgctgctctgaacattcctgtactgaaatgtgaagggtatgaagctgatgacgttataggcacacttgtaaatagatttaaagcccaggatttagagattgtgataataaccggagacagagatacacttcagttacttgataaaaatgtaattgtcaaaatagtcacaacaaggtttgacaggacaactgaagatttgtatgctgtagaaaatgtaaaagaaaaatatggtgtttttgcgcatcaggttgttgactataaagcattagtaggtgatgcgtcagacaatataccaggtgttaagggaattggagataaaactgccataaagctgttagaagagtaccagactctggagaatatatatcagaatctaaataacattaaaggagcgctaaaagagaagttggaatcaggaaaagacatggcatttttatcaaaaagactggctactatcatatgcgatttaccaattgaggtgaatcttgaagaattaaaaaccaaagaatgggacaaagaaagactttatcagattttacttcaacttgagtttaaaagctttattaaaagactgggcttttcagaagagattaactatgcaaggcagaactttcagctacctgaatttagtattaaagaacttcgtgatgtttcagcaatagggggcaaagaaatctatctattgtactcagatgaagaaggacttttttatatttatgaccatcaaacctcaaccatttttacaacttctgataaggaagctattaaagatcttttaacactccaaagcattcaaaaggttgtatatgatttaaaaaatatactccataaggtggactttgatgaagctaatcagataaaaaattgtaatgatgttatgttggcttcatatgttttggacagtacacgcagttcgtacgatttggaaacattgtttatttcttatctcaacactgatatagctgcaatcaaagagaatagatgggctggtgctacagttttattaagaaatctttgggatgaactttcaaaactcattgatttaaactcggcccaatacgtttatgagagcatagagatgcctcttgttcccattttatatgaaatggagaaaatcggttttaaggttgacaaaaacactttgcaggagtatacaaaagagattgagagcaagcttttaaagttggaatcacagatttatcaaatagccggtgaatggtttaacataaactcgccaaaacaactctcatatatattattcgaaaaactgaagcttccggttgttaaaaagaccaaaacaggatattcaacagatgccgaggtattagaagagctgtatgataaacatgacataataccgcttattctggattatagaatgtatacgaaaatactgacaacttactgtcagggactggttcaggcaataaatcctgcaactggaagaattcataccaactttattcagacaggtacggcaactggaagacttgcaagtgcagagcccaatctgcaaaatattcctgtaaaatatgatgagggaaagctaataagaaaggcatttgttccagatgaaggttatgtgttgatagatgctgattattctcagattgagcttagaatacttgcacatatctctgaggatgaacgactgataaatgcttttaaaaataaccttgatattcattcacagacggcggcagagatctttggtgtggatataagtcaggttacaccaattatgcgaagccaggcaaaagcagttaactttggaattgtatatggtatatctgattatggactttcacgggatataaagatttcaagaaaagaagcagccgagtttattaatcgttattttgaaaagtatcccagagtaaaagaatatttggacaatgtcgtcaagtttgcccgtgaaaacggatttgttttgacaatatttaacaggaaaaggtatatcaaggatatactttctactaataaaaacctgagaaactatgcagagagaatagcaatgaattcacctatccagggaagtgctgcagatattatgaaaatagcaatgataagagtttataaaaagctaaaagaaaacaatttaaaatcaagaattattctgcaggtccatgacgaacttttgattgaatcaccctatgaagagaaagagatagtaaaggaaatagtaaaatcggagatggaaaatgcggttttattgaaagttcctttggtagttgaagtgaaagaaggttcaaattggtatgaaacaaagtaaaggatcc

SEQ ID NO: 1588 - DNA, 2623 bp, Artificial Sequence
  Description of Artificial Sequence: Synthetic DNA sequence of Caldicellulosiruptor TOK13B DNA Polymerase K772M
atgaaatacctgctgccgaccgctgctgctggtctgctgctcctcgctgcccagccggcgatggccatggaatttgttatttttgatgggaatagtattctgtatagagctttttttgccttgccacagcttactacctcaacaggcatacctacaaatgctatatatggttttttgaatgtgctgttaaaatacttagattctgaaaaaccggattatgtagcagtagcttttgacaaaaaaggcagagctgtccgaaaaagtgaatatgaagaatacaaggctaacagaaaaccgatgccagattctcttcaggttcagataccttacgtaagagaaatacttgctgctctgaacattcctgtactgaaatgtgaagggtatgaagctgatgacgttataggcacacttgtaaatagatttaaagcccaggatttagagattgtgataataaccggagacagagatacacttcagttacttgataaaaatgtaattgtcaaaatagtcacaacaaggtttgacaggacaactgaagatttgtatgctgtagaaaatgtaaaagaaaaatatggtgtttttgcgcatcaggttgttgactataaagcattagtaggtgatgcgtcagacaatataccaggtgttaagggaattggagataaaactgccataaagctgttagaagagtaccagactctggagaatatatatcagaatctaaataacattaaaggagcgctaaaagagaagttggaatcaggaaaagacatggcatttttatcaaaaagactggctactatcatatgcgatttaccaattgaggtgaatcttgaagaattaaaaaccaaagaatgggacaaagaaagactttatcagattttacttcaacttgagtttaaaagctttattaaaagactgggcttttcagaagagattaactatgcaaggcagaactttcagctacctgaatttagtattaaagaacttcgtgatgtttcagcaatagggggcaaagaaatctatctattgtactcagatgaagaaggacttttttatatttatgaccatcaaacctcaaccatttttacaacttctgataaggaagctattaaagatcttttaacactccaaagcattcaaaaggttgtatatgatttaaaaaatatactccataaggtggactttgatgaagctaatcagataaaaaattgtaatgatgttatgttggcttcatatgttttggacagtacacgcagttcgtacgatttggaaacattgtttatttcttatctcaacactgatatagctgcaatcaaagagaatagatgggctggtgctacagttttattaagaaatctttgggatgaactttcaaaactcattgatttaaactcggcccaatacgtttatgagagcatagagatgcctcttgttcccattttatatgaaatggagaaaatcggttttaaggttgacaaaaacactttgcaggagtatacaaaagagattgagagcaagcttttaaagttggaatcacagatttatcaaatagccggtgaatggtttaacataaactcgccaaaacaactctcatatatattattcgaaaaactgaagcttccggttgttaaaaagaccaaaacaggatattcaacagatgccgaggtattagaagagctgtatgataaacatgacataataccgcttattctggattatagaatgtatacgaaaatactgacaacttactgtcagggactggttcaggcaataaatcctgcaactggaagaattcataccaactttattcagacaggtacggcaactggaagacttgcaagtgcagagcccaatctgcaaaatattcctgtaaaatatgatgagggaaagctaataagaaaggcatttgttccagatgaaggttatgtgttgatagatgctgattattctcagattgagcttagaatacttgcacatatctctgaggatgaacgactgataaatgcttttaaaaataaccttgatattcattcacagacggcggcagagatctttggtgtggatataagtcaggttacaccaattatgcgaagccaggcaaaagcagttaactttggaattgtatatggtatatctgattatggactttcacgggatataaagatttcaagaaaagaagcagccgagtttattaatcgttattttgaaaagtatcccagagtaaaagaatatttggacaatgtcgtcaagtttgcccgtgaaaacggatttgttttgacaatatttaacaggaaaaggtatatcaaggatataatgtctactaataaaaacctgagaaactatgcagagagaatagcaatgaattcacctatccagggaagtgctgcagatattatgaaaatagcaatgataagagtttataaaaagctaaaagaaaacaatttaaaatcaagaattattctgcaggtccatgacgaacttttgattgaatcaccctatgaagagaaagagatagtaaaggaaatagtaaaatcggagatggaaaatgcggttttattgaaagttcctttggtagttgaagtgaaagaaggttcaaattggtatgaaacaaagtaaaggatcc

SEQ ID NO: 1589 - DNA, 2623 bp, Artificial Sequence
  Description of Artificial Sequence: Synthetic DNA sequence of Caldicellulosiruptor TOK13B DNA Polymerase K772F
atgaaatacctgctgccgaccgctgctgctggtctgctgctcctcgctgcccagccggcgatggccatggaatttgttatttttgatgggaatagtattctgtatagagctttttttgccttgccacagcttactacctcaacaggcatacctacaaatgctatatatggttttttgaatgtgctgttaaaatacttagattctgaaaaaccggattatgtagcagtagcttttgacaaaaaaggcagagctgtccgaaaaagtgaatatgaagaatacaaggctaacagaaaaccgatgccagattctcttcaggttcagataccttacgtaagagaaatacttgctgctctgaacattcctgtactgaaatgtgaagggtatgaagctgatgacgttataggcacacttgtaaatagatttaaagcccaggatttagagattgtgataataaccggagacagagatacacttcagttacttgataaaaatgtaattgtcaaaatagtcacaacaaggtttgacaggacaactgaagatttgtatgctgtagaaaatgtaaaagaaaaatatggtgtttttgcgcatcaggttgttgactataaagcattagtaggtgatgcgtcagacaatataccaggtgttaagggaattggagataaaactgccataaagctgttagaagagtaccagactctggagaatatatatcagaatctaaataacattaaaggagcgctaaaagagaagttggaatcaggaaaagacatggcatttttatcaaaaagactggctactatcatatgcgatttaccaattgaggtgaatcttgaagaattaaaaaccaaagaatgggacaaagaaagactttatcagattttacttcaacttgagtttaaaagctttattaaaagactgggcttttcagaagagattaactatgcaaggcagaactttcagctacctgaatttagtattaaagaacttcgtgatgtttcagcaatagggggcaaagaaatctatctattgtactcagatgaagaaggacttttttatatttatgaccatcaaacctcaaccatttttacaacttctgataaggaagctattaaagatcttttaacactccaaagcattcaaaaggttgtatatgatttaaaaaatatactccataaggtggactttgatgaagctaatcagataaaaaattgtaatgatgttatgttggcttcatatgttttggacagtacacgcagttcgtacgatttggaaacattgtttatttcttatctcaacactgatatagctgcaatcaaagagaatagatgggctggtgctacagttttattaagaaatctttgggatgaactttcaaaactcattgatttaaactcggcccaatacgtttatgagagcatagagatgcctcttgttcccattttatatgaaatggagaaaatcggttttaaggttgacaaaaacactttgcaggagtatacaaaagagattgagagcaagcttttaaagttggaatcacagatttatcaaatagccggtgaatggtttaacataaactcgccaaaacaactctcatatatattattcgaaaaactgaagcttccggttgttaaaaagaccaaaacaggatattcaacagatgccgaggtattagaagagctgtatgataaacatgacataataccgcttattctggattatagaatgtatacgaaaatactgacaacttactgtcagggactggttcaggcaataaatcctgcaactggaagaattcataccaactttattcagacaggtacggcaactggaagacttgcaagtgcagagcccaatctgcaaaatattcctgtaaaatatgatgagggaaagctaataagaaaggcatttgttccagatgaaggttatgtgttgatagatgctgattattctcagattgagcttagaatacttgcacatatctctgaggatgaacgactgataaatgcttttaaaaataaccttgatattcattcacagacggcggcagagatctttggtgtggatataagtcaggttacaccaattatgcgaagccaggcaaaagcagttaactttggaattgtatatggtatatctgattatggactttcacgggatataaagatttcaagaaaagaagcagccgagtttattaatcgttattttgaaaagtatcccagagtaaaagaatatttggacaatgtcgtcaagtttgcccgtgaaaacggatttgttttgacaatatttaacaggaaaaggtatatcaaggatatattttctactaataaaaacctgagaaactatgcagagagaatagcaatgaattcacctatccagggaagtgctgcagatattatgaaaatagcaatgataagagtttataaaaagctaaaagaaaacaatttaaaatcaagaattattctgcaggtccatgacgaacttttgattgaatcaccctatgaagagaaagagatagtaaaggaaatagtaaaatcggagatggaaaatgcggttttattgaaagttcctttggtagttgaagtgaaagaaggttcaaattggtatgaaacaaagtaaaggatcc

SEQ ID NO: 1590 - DNA, 2623 bp, Artificial Sequence
  Description of Artificial Sequence: Synthetic DNA sequence of Caldicellulosiruptor TOK13B DNA Polymerase K772P
atgaaatacctgctgccgaccgctgctgctggtctgctgctcctcgctgcccagccggcgatggccatggaatttgttatttttgatgggaatagtattctgtatagagctttttttgccttgccacagcttactacctcaacaggcatacctacaaatgctatatatggttttttgaatgtgctgttaaaatacttagattctgaaaaaccggattatgtagcagtagcttttgacaaaaaaggcagagctgtccgaaaaagtgaatatgaagaatacaaggctaacagaaaaccgatgccagattctcttcaggttcagataccttacgtaagagaaatacttgctgctctgaacattcctgtactgaaatgtgaagggtatgaagctgatgacgttataggcacacttgtaaatagatttaaagcccaggatttagagattgtgataataaccggagacagagatacacttcagttacttgataaaaatgtaattgtcaaaatagtcacaacaaggtttgacaggacaactgaagatttgtatgctgtagaaaatgtaaaagaaaaatatggtgtttttgcgcatcaggttgttgactataaagcattagtaggtgatgcgtcagacaatataccaggtgttaagggaattggagataaaactgccataaagctgttagaagagtaccagactctggagaatatatatcagaatctaaataacattaaaggagcgctaaaagagaagttggaatcaggaaaagacatggcatttttatcaaaaagactggctactatcatatgcgatttaccaattgaggtgaatcttgaagaattaaaaaccaaagaatgggacaaagaaagactttatcagattttacttcaacttgagtttaaaagctttattaaaagactgggcttttcagaagagattaactatgcaaggcagaactttcagctacctgaatttagtattaaagaacttcgtgatgtttcagcaatagggggcaaagaaatctatctattgtactcagatgaagaaggacttttttatatttatgaccatcaaacctcaaccatttttacaacttctgataaggaagctattaaagatcttttaacactccaaagcattcaaaaggttgtatatgatttaaaaaatatactccataaggtggactttgatgaagctaatcagataaaaaattgtaatgatgttatgttggcttcatatgttttggacagtacacgcagttcgtacgatttggaaacattgtttatttcttatctcaacactgatatagctgcaatcaaagagaatagatgggctggtgctacagttttattaagaaatctttgggatgaactttcaaaactcattgatttaaactcggcccaatacgtttatgagagcatagagatgcctcttgttcccattttatatgaaatggagaaaatcggttttaaggttgacaaaaacactttgcaggagtatacaaaagagattgagagcaagcttttaaagttggaatcacagatttatcaaatagccggtgaatggtttaacataaactcgccaaaacaactctcatatatattattcgaaaaactgaagcttccggttgttaaaaagaccaaaacaggatattcaacagatgccgaggtattagaagagctgtatgataaacatgacataataccgcttattctggattatagaatgtatacgaaaatactgacaacttactgtcagggactggttcaggcaataaatcctgcaactggaagaattcataccaactttattcagacaggtacggcaactggaagacttgcaagtgcagagcccaatctgcaaaatattcctgtaaaatatgatgagggaaagctaataagaaaggcatttgttccagatgaaggttatgtgttgatagatgctgattattctcagattgagcttagaatacttgcacatatctctgaggatgaacgactgataaatgcttttaaaaataaccttgatattcattcacagacggcggcagagatctttggtgtggatataagtcaggttacaccaattatgcgaagccaggcaaaagcagttaactttggaattgtatatggtatatctgattatggactttcacgggatataaagatttcaagaaaagaagcagccgagtttattaatcgttattttgaaaagtatcccagagtaaaagaatatttggacaatgtcgtcaagtttgcccgtgaaaacggatttgttttgacaatatttaacaggaaaaggtatatcaaggatataccttctactaataaaaacctgagaaactatgcagagagaatagcaatgaattcacctatccagggaagtgctgcagatattatgaaaatagcaatgataagagtttataaaaagctaaaagaaaacaatttaaaatcaagaattattctgcaggtccatgacgaacttttgattgaatcaccctatgaagagaaagagatagtaaaggaaatagtaaaatcggagatggaaaatgcggttttattgaaagttcctttggtagttgaagtgaaagaaggttcaaattggtatgaaacaaagtaaaggatcc

SEQ ID NO: 1591 - DNA, 2623 bp, Artificial Sequence
  Description of Artificial Sequence: Synthetic DNA sequence of Caldicellulosiruptor TOK13B DNA Polymerase K772S
atgaaatacctgctgccgaccgctgctgctggtctgctgctcctcgctgcccagccggcgatggccatggaatttgttatttttgatgggaatagtattctgtatagagctttttttgccttgccacagcttactacctcaacaggcatacctacaaatgctatatatggttttttgaatgtgctgttaaaatacttagattctgaaaaaccggattatgtagcagtagcttttgacaaaaaaggcagagctgtccgaaaaagtgaatatgaagaatacaaggctaacagaaaaccgatgccagattctcttcaggttcagataccttacgtaagagaaatacttgctgctctgaacattcctgtactgaaatgtgaagggtatgaagctgatgacgttataggcacacttgtaaatagatttaaagcccaggatttagagattgtgataataaccggagacagagatacacttcagttacttgataaaaatgtaattgtcaaaatagtcacaacaaggtttgacaggacaactgaagatttgtatgctgtagaaaatgtaaaagaaaaatatggtgtttttgcgcatcaggttgttgactataaagcattagtaggtgatgcgtcagacaatataccaggtgttaagggaattggagataaaactgccataaagctgttagaagagtaccagactctggagaatatatatcagaatctaaataacattaaaggagcgctaaaagagaagttggaatcaggaaaagacatggcatttttatcaaaaagactggctactatcatatgcgatttaccaattgaggtgaatcttgaagaattaaaaaccaaagaatgggacaaagaaagactttatcagattttacttcaacttgagtttaaaagctttattaaaagactgggcttttcagaagagattaactatgcaaggcagaactttcagctacctgaatttagtattaaagaacttcgtgatgtttcagcaatagggggcaaagaaatctatctattgtactcagatgaagaaggacttttttatatttatgaccatcaaacctcaaccatttttacaacttctgataaggaagctattaaagatcttttaacactccaaagcattcaaaaggttgtatatgatttaaaaaatatactccataaggtggactttgatgaagctaatcagataaaaaattgtaatgatgttatgttggcttcatatgttttggacagtacacgcagttcgtacgatttggaaacattgtttatttcttatctcaacactgatatagctgcaatcaaagagaatagatgggctggtgctacagttttattaagaaatctttgggatgaactttcaaaactcattgatttaaactcggcccaatacgtttatgagagcatagagatgcctcttgttcccattttatatgaaatggagaaaatcggttttaaggttgacaaaaacactttgcaggagtatacaaaagagattgagagcaagcttttaaagttggaatcacagatttatcaaatagccggtgaatggtttaacataaactcgccaaaacaactctcatatatattattcgaaaaactgaagcttccggttgttaaaaagaccaaaacaggatattcaacagatgccgaggtattagaagagctgtatgataaacatgacataataccgcttattctggattatagaatgtatacgaaaatactgacaacttactgtcagggactggttcaggcaataaatcctgcaactggaagaattcataccaactttattcagacaggtacggcaactggaagacttgcaagtgcagagcccaatctgcaaaatattcctgtaaaatatgatgagggaaagctaataagaaaggcatttgttccagatgaaggttatgtgttgatagatgctgattattctcagattgagcttagaatacttgcacatatctctgaggatgaacgactgataaatgcttttaaaaataaccttgatattcattcacagacggcggcagagatctttggtgtggatataagtcaggttacaccaattatgcgaagccaggcaaaagcagttaactttggaattgtatatggtatatctgattatggactttcacgggatataaagatttcaagaaaagaagcagccgagtttattaatcgttattttgaaaagtatcccagagtaaaagaatatttggacaatgtcgtcaagtttgcccgtgaaaacggatttgttttgacaatatttaacaggaaaaggtatatcaaggatatatcttctactaataaaaacctgagaaactatgcagagagaatagcaatgaattcacctatccagggaagtgctgcagatattatgaaaatagcaatgataagagtttataaaaagctaaaagaaaacaatttaaaatcaagaattattctgcaggtccatgacgaacttttgattgaatcaccctatgaagagaaagagatagtaaaggaaatagtaaaatcggagatggaaaatgcggttttattgaaagttcctttggtagttgaagtgaaagaaggttcaaattggtatgaaacaaagtaaaggatcc

SEQ ID NO: 1592 - DNA, 2623 bp, Artificial Sequence
  Description of Artificial Sequence: Synthetic DNA sequence of Caldicellulosiruptor TOK13B DNA Polymerase K772T
atgaaatacctgctgccgaccgctgctgctggtctgctgctcctcgctgcccagccggcgatggccatggaatttgttatttttgatgggaatagtattctgtatagagctttttttgccttgccacagcttactacctcaacaggcatacctacaaatgctatatatggttttttgaatgtgctgttaaaatacttagattctgaaaaaccggattatgtagcagtagcttttgacaaaaaaggcagagctgtccgaaaaagtgaatatgaagaatacaaggctaacagaaaaccgatgccagattctcttcaggttcagataccttacgtaagagaaatacttgctgctctgaacattcctgtactgaaatgtgaagggtatgaagctgatgacgttataggcacacttgtaaatagatttaaagcccaggatttagagattgtgataataaccggagacagagatacacttcagttacttgataaaaatgtaattgtcaaaatagtcacaacaaggtttgacaggacaactgaagatttgtatgctgtagaaaatgtaaaagaaaaatatggtgtttttgcgcatcaggttgttgactataaagcattagtaggtgatgcgtcagacaatataccaggtgttaagggaattggagataaaactgccataaagctgttagaagagtaccagactctggagaatatatatcagaatctaaataacattaaaggagcgctaaaagagaagttggaatcaggaaaagacatggcatttttatcaaaaagactggctactatcatatgcgatttaccaattgaggtgaatcttgaagaattaaaaaccaaagaatgggacaaagaaagactttatcagattttacttcaacttgagtttaaaagctttattaaaagactgggcttttcagaagagattaactatgcaaggcagaactttcagctacctgaatttagtattaaagaacttcgtgatgtttcagcaatagggggcaaagaaatctatctattgtactcagatgaagaaggacttttttatatttatgaccatcaaacctcaaccatttttacaacttctgataaggaagctattaaagatcttttaacactccaaagcattcaaaaggttgtatatgatttaaaaaatatactccataaggtggactttgatgaagctaatcagataaaaaattgtaatgatgttatgttggcttcatatgttttggacagtacacgcagttcgtacgatttggaaacattgtttatttcttatctcaacactgatatagctgcaatcaaagagaatagatgggctggtgctacagttttattaagaaatctttgggatgaactttcaaaactcattgatttaaactcggcccaatacgtttatgagagcatagagatgcctcttgttcccattttatatgaaatggagaaaatcggttttaaggttgacaaaaacactttgcaggagtatacaaaagagattgagagcaagcttttaaagttggaatcacagatttatcaaatagccggtgaatggtttaacataaactcgccaaaacaactctcatatatattattcgaaaaactgaagcttccggttgttaaaaagaccaaaacaggatattcaacagatgccgaggtattagaagagctgtatgataaacatgacataataccgcttattctggattatagaatgtatacgaaaatactgacaacttactgtcagggactggttcaggcaataaatcctgcaactggaagaattcataccaactttattcagacaggtacggcaactggaagacttgcaagtgcagagcccaatctgcaaaatattcctgtaaaatatgatgagggaaagctaataagaaaggcatttgttccagatgaaggttatgtgttgatagatgctgattattctcagattgagcttagaatacttgcacatatctctgaggatgaacgactgataaatgcttttaaaaataaccttgatattcattcacagacggcggcagagatctttggtgtggatataagtcaggttacaccaattatgcgaagccaggcaaaagcagttaactttggaattgtatatggtatatctgattatggactttcacgggatataaagatttcaagaaaagaagcagccgagtttattaatcgttattttgaaaagtatcccagagtaaaagaatatttggacaatgtcgtcaagtttgcccgtgaaaacggatttgttttgacaatatttaacaggaaaaggtatatcaaggatataacttctactaataaaaacctgagaaactatgcagagagaatagcaatgaattcacctatccagggaagtgctgcagatattatgaaaatagcaatgataagagtttataaaaagctaaaagaaaacaatttaaaatcaagaattattctgcaggtccatgacgaacttttgattgaatcaccctatgaagagaaagagatagtaaaggaaatagtaaaatcggagatggaaaatgcggttttattgaaagttcctttggtagttgaagtgaaagaaggttcaaattggtatgaaacaaagtaaaggatcc

SEQ ID NO: 1593 - DNA, 2623 bp, Artificial Sequence
  Description of Artificial Sequence: Synthetic DNA sequence of Caldicellulosiruptor TOK13B DNA Polymerase K772W
atgaaatacctgctgccgaccgctgctgctggtctgctgctcctcgctgcccagccggcgatggccatggaatttgttatttttgatgggaatagtattctgtatagagctttttttgccttgccacagcttactacctcaacaggcatacctacaaatgctatatatggttttttgaatgtgctgttaaaatacttagattctgaaaaaccggattatgtagcagtagcttttgacaaaaaaggcagagctgtccgaaaaagtgaatatgaagaatacaaggctaacagaaaaccgatgccagattctcttcaggttcagataccttacgtaagagaaatacttgctgctctgaacattcctgtactgaaatgtgaagggtatgaagctgatgacgttataggcacacttgtaaatagatttaaagcccaggatttagagattgtgataataaccggagacagagatacacttcagttacttgataaaaatgtaattgtcaaaatagtcacaacaaggtttgacaggacaactgaagatttgtatgctgtagaaaatgtaaaagaaaaatatggtgtttttgcgcatcaggttgttgactataaagcattagtaggtgatgcgtcagacaatataccaggtgttaagggaattggagataaaactgccataaagctgttagaagagtaccagactctggagaatatatatcagaatctaaataacattaaaggagcgctaaaagagaagttggaatcaggaaaagacatggcatttttatcaaaaagactggctactatcatatgcgatttaccaattgaggtgaatcttgaagaattaaaaaccaaagaatgggacaaagaaagactttatcagattttacttcaacttgagtttaaaagctttattaaaagactgggcttttcagaagagattaactatgcaaggcagaactttcagctacctgaatttagtattaaagaacttcgtgatgtttcagcaatagggggcaaagaaatctatctattgtactcagatgaagaaggacttttttatatttatgaccatcaaacctcaaccatttttacaacttctgataaggaagctattaaagatcttttaacactccaaagcattcaaaaggttgtatatgatttaaaaaatatactccataaggtggactttgatgaagctaatcagataaaaaattgtaatgatgttatgttggcttcatatgttttggacagtacacgcagttcgtacgatttggaaacattgtttatttcttatctcaacactgatatagctgcaatcaaagagaatagatgggctggtgctacagttttattaagaaatctttgggatgaactttcaaaactcattgatttaaactcggcccaatacgtttatgagagcatagagatgcctcttgttcccattttatatgaaatggagaaaatcggttttaaggttgacaaaaacactttgcaggagtatacaaaagagattgagagcaagcttttaaagttggaatcacagatttatcaaatagccggtgaatggtttaacataaactcgccaaaacaactctcatatatattattcgaaaaactgaagcttccggttgttaaaaagaccaaaacaggatattcaacagatgccgaggtattagaagagctgtatgataaacatgacataataccgcttattctggattatagaatgtatacgaaaatactgacaacttactgtcagggactggttcaggcaataaatcctgcaactggaagaattcataccaactttattcagacaggtacggcaactggaagacttgcaagtgcagagcccaatctgcaaaatattcctgtaaaatatgatgagggaaagctaataagaaaggcatttgttccagatgaaggttatgtgttgatagatgctgattattctcagattgagcttagaatacttgcacatatctctgaggatgaacgactgataaatgcttttaaaaataaccttgatattcattcacagacggcggcagagatctttggtgtggatataagtcaggttacaccaattatgcgaagccaggcaaaagcagttaactttggaattgtatatggtatatctgattatggactttcacgggatataaagatttcaagaaaagaagcagccgagtttattaatcgttattttgaaaagtatcccagagtaaaagaatatttggacaatgtcgtcaagtttgcccgtgaaaacggatttgttttgacaatatttaacaggaaaaggtatatcaaggatatatggtctactaataaaaacctgagaaactatgcagagagaatagcaatgaattcacctatccagggaagtgctgcagatattatgaaaatagcaatgataagagtttataaaaagctaaaagaaaacaatttaaaatcaagaattattctgcaggtccatgacgaacttttgattgaatcaccctatgaagagaaagagatagtaaaggaaatagtaaaatcggagatggaaaatgcggttttattgaaagttcctttggtagttgaagtgaaagaaggttcaaattggtatgaaacaaagtaaaggatcc

SEQ ID NO: 1594 - DNA, 2623 bp, Artificial Sequence
  Description of Artificial Sequence: Synthetic DNA sequence of Caldicellulosiruptor TOK13B DNA Polymerase K772Y
atgaaatacctgctgccgaccgctgctgctggtctgctgctcctcgctgcccagccggcgatggccatggaatttgttatttttgatgggaatagtattctgtatagagctttttttgccttgccacagcttactacctcaacaggcatacctacaaatgctatatatggttttttgaatgtgctgttaaaatacttagattctgaaaaaccggattatgtagcagtagcttttgacaaaaaaggcagagctgtccgaaaaagtgaatatgaagaatacaaggctaacagaaaaccgatgccagattctcttcaggttcagataccttacgtaagagaaatacttgctgctctgaacattcctgtactgaaatgtgaagggtatgaagctgatgacgttataggcacacttgtaaatagatttaaagcccaggatttagagattgtgataataaccggagacagagatacacttcagttacttgataaaaatgtaattgtcaaaatagtcacaacaaggtttgacaggacaactgaagatttgtatgctgtagaaaatgtaaaagaaaaatatggtgtttttgcgcatcaggttgttgactataaagcattagtaggtgatgcgtcagacaatataccaggtgttaagggaattggagataaaactgccataaagctgttagaagagtaccagactctggagaatatatatcagaatctaaataacattaaaggagcgctaaaagagaagttggaatcaggaaaagacatggcatttttatcaaaaagactggctactatcatatgcgatttaccaattgaggtgaatcttgaagaattaaaaaccaaagaatgggacaaagaaagactttatcagattttacttcaacttgagtttaaaagctttattaaaagactgggcttttcagaagagattaactatgcaaggcagaactttcagctacctgaatttagtattaaagaacttcgtgatgtttcagcaatagggggcaaagaaatctatctattgtactcagatgaagaaggacttttttatatttatgaccatcaaacctcaaccatttttacaacttctgataaggaagctattaaagatcttttaacactccaaagcattcaaaaggttgtatatgatttaaaaaatatactccataaggtggactttgatgaagctaatcagataaaaaattgtaatgatgttatgttggcttcatatgttttggacagtacacgcagttcgtacgatttggaaacattgtttatttcttatctcaacactgatatagctgcaatcaaagagaatagatgggctggtgctacagttttattaagaaatctttgggatgaactttcaaaactcattgatttaaactcggcccaatacgtttatgagagcatagagatgcctcttgttcccattttatatgaaatggagaaaatcggttttaaggttgacaaaaacactttgcaggagtatacaaaagagattgagagcaagcttttaaagttggaatcacagatttatcaaatagccggtgaatggtttaacataaactcgccaaaacaactctcatatatattattcgaaaaactgaagcttccggttgttaaaaagaccaaaacaggatattcaacagatgccgaggtattagaagagctgtatgataaacatgacataataccgcttattctggattatagaatgtatacgaaaatactgacaacttactgtcagggactggttcaggcaataaatcctgcaactggaagaattcataccaactttattcagacaggtacggcaactggaagacttgcaagtgcagagcccaatctgcaaaatattcctgtaaaatatgatgagggaaagctaataagaaaggcatttgttccagatgaaggttatgtgttgatagatgctgattattctcagattgagcttagaatacttgcacatatctctgaggatgaacgactgataaatgcttttaaaaataaccttgatattcattcacagacggcggcagagatctttggtgtggatataagtcaggttacaccaattatgcgaagccaggcaaaagcagttaactttggaattgtatatggtatatctgattatggactttcacgggatataaagatttcaagaaaagaagcagccgagtttattaatcgttattttgaaaagtatcccagagtaaaagaatatttggacaatgtcgtcaagtttgcccgtgaaaacggatttgttttgacaatatttaacaggaaaaggtatatcaaggatatatattctactaataaaaacctgagaaactatgcagagagaatagcaatgaattcacctatccagggaagtgctgcagatattatgaaaatagcaatgataagagtttataaaaagctaaaagaaaacaatttaaaatcaagaattattctgcaggtccatgacgaacttttgattgaatcaccctatgaagagaaagagatagtaaaggaaatagtaaaatcggagatggaaaatgcggttttattgaaagttcctttggtagttgaagtgaaagaaggttcaaattggtatgaaacaaagtaaaggatcc

SEQ ID NO: 1595 - DNA, 2623 bp, Artificial Sequence
  Description of Artificial Sequence: Synthetic DNA sequence of Caldicellulosiruptor TOK13B DNA Polymerase K772V
atgaaatacctgctgccgaccgctgctgctggtctgctgctcctcgctgcccagccggcgatggccatggaatttgttatttttgatgggaatagtattctgtatagagctttttttgccttgccacagcttactacctcaacaggcatacctacaaatgctatatatggttttttgaatgtgctgttaaaatacttagattctgaaaaaccggattatgtagcagtagcttttgacaaaaaaggcagagctgtccgaaaaagtgaatatgaagaatacaaggctaacagaaaaccgatgccagattctcttcaggttcagataccttacgtaagagaaatacttgctgctctgaacattcctgtactgaaatgtgaagggtatgaagctgatgacgttataggcacacttgtaaatagatttaaagcccaggatttagagattgtgataataaccggagacagagatacacttcagttacttgataaaaatgtaattgtcaaaatagtcacaacaaggtttgacaggacaactgaagatttgtatgctgtagaaaatgtaaaagaaaaatatggtgtttttgcgcatcaggttgttgactataaagcattagtaggtgatgcgtcagacaatataccaggtgttaagggaattggagataaaactgccataaagctgttagaagagtaccagactctggagaatatatatcagaatctaaataacattaaaggagcgctaaaagagaagttggaatcaggaaaagacatggcatttttatcaaaaagactggctactatcatatgcgatttaccaattgaggtgaatcttgaagaattaaaaaccaaagaatgggacaaagaaagactttatcagattttacttcaacttgagtttaaaagctttattaaaagactgggcttttcagaagagattaactatgcaaggcagaactttcagctacctgaatttagtattaaagaacttcgtgatgtttcagcaatagggggcaaagaaatctatctattgtactcagatgaagaaggacttttttatatttatgaccatcaaacctcaaccatttttacaacttctgataaggaagctattaaagatcttttaacactccaaagcattcaaaaggttgtatatgatttaaaaaatatactccataaggtggactttgatgaagctaatcagataaaaaattgtaatgatgttatgttggcttcatatgttttggacagtacacgcagttcgtacgatttggaaacattgtttatttcttatctcaacactgatatagctgcaatcaaagagaatagatgggctggtgctacagttttattaagaaatctttgggatgaactttcaaaactcattgatttaaactcggcccaatacgtttatgagagcatagagatgcctcttgttcccattttatatgaaatggagaaaatcggttttaaggttgacaaaaacactttgcaggagtatacaaaagagattgagagcaagcttttaaagttggaatcacagatttatcaaatagccggtgaatggtttaacataaactcgccaaaacaactctcatatatattattcgaaaaactgaagcttccggttgttaaaaagaccaaaacaggatattcaacagatgccgaggtattagaagagctgtatgataaacatgacataataccgcttattctggattatagaatgtatacgaaaatactgacaacttactgtcagggactggttcaggcaataaatcctgcaactggaagaattcataccaactttattcagacaggtacggcaactggaagacttgcaagtgcagagcccaatctgcaaaatattcctgtaaaatatgatgagggaaagctaataagaaaggcatttgttccagatgaaggttatgtgttgatagatgctgattattctcagattgagcttagaatacttgcacatatctctgaggatgaacgactgataaatgcttttaaaaataaccttgatattcattcacagacggcggcagagatctttggtgtggatataagtcaggttacaccaattatgcgaagccaggcaaaagcagttaactttggaattgtatatggtatatctgattatggactttcacgggatataaagatttcaagaaaagaagcagccgagtttattaatcgttattttgaaaagtatcccagagtaaaagaatatttggacaatgtcgtcaagtttgcccgtgaaaacggatttgttttgacaatatttaacaggaaaaggtatatcaaggatatagtttctactaataaaaacctgagaaactatgcagagagaatagcaatgaattcacctatccagggaagtgctgcagatattatgaaaatagcaatgataagagtttataaaaagctaaaagaaaacaatttaaaatcaagaattattctgcaggtccatgacgaacttttgattgaatcaccctatgaagagaaagagatagtaaaggaaatagtaaaatcggagatggaaaatgcggttttattgaaagttcctttggtagttgaagtgaaagaaggttcaaattggtatgaaacaaagtaaaggatcc

SEQ ID NO: 1596 - DNA, 2623 bp, Artificial Sequence
  Description of Artificial Sequence: Synthetic DNA sequence of Caldicellulosiruptor TOK13B DNA Polymerase S773A
atgaaatacctgctgccgaccgctgctgctggtctgctgctcctcgctgcccagccggcgatggccatggaatttgttatttttgatgggaatagtattctgtatagagctttttttgccttgccacagcttactacctcaacaggcatacctacaaatgctatatatggttttttgaatgtgctgttaaaatacttagattctgaaaaaccggattatgtagcagtagcttttgacaaaaaaggcagagctgtccgaaaaagtgaatatgaagaatacaaggctaacagaaaaccgatgccagattctcttcaggttcagataccttacgtaagagaaatacttgctgctctgaacattcctgtactgaaatgtgaagggtatgaagctgatgacgttataggcacacttgtaaatagatttaaagcccaggatttagagattgtgataataaccggagacagagatacacttcagttacttgataaaaatgtaattgtcaaaatagtcacaacaaggtttgacaggacaactgaagatttgtatgctgtagaaaatgtaaaagaaaaatatggtgtttttgcgcatcaggttgttgactataaagcattagtaggtgatgcgtcagacaatataccaggtgttaagggaattggagataaaactgccataaagctgttagaagagtaccagactctggagaatatatatcagaatctaaataacattaaaggagcgctaaaagagaagttggaatcaggaaaagacatggcatttttatcaaaaagactggctactatcatatgcgatttaccaattgaggtgaatcttgaagaattaaaaaccaaagaatgggacaaagaaagactttatcagattttacttcaacttgagtttaaaagctttattaaaagactgggcttttcagaagagattaactatgcaaggcagaactttcagctacctgaatttagtattaaagaacttcgtgatgtttcagcaatagggggcaaagaaatctatctattgtactcagatgaagaaggacttttttatatttatgaccatcaaacctcaaccatttttacaacttctgataaggaagctattaaagatcttttaacactccaaagcattcaaaaggttgtatatgatttaaaaaatatactccataaggtggactttgatgaagctaatcagataaaaaattgtaatgatgttatgttggcttcatatgttttggacagtacacgcagttcgtacgatttggaaacattgtttatttcttatctcaacactgatatagctgcaatcaaagagaatagatgggctggtgctacagttttattaagaaatctttgggatgaactttcaaaactcattgatttaaactcggcccaatacgtttatgagagcatagagatgcctcttgttcccattttatatgaaatggagaaaatcggttttaaggttgacaaaaacactttgcaggagtatacaaaagagattgagagcaagcttttaaagttggaatcacagatttatcaaatagccggtgaatggtttaacataaactcgccaaaacaactctcatatatattattcgaaaaactgaagcttccggttgttaaaaagaccaaaacaggatattcaacagatgccgaggtattagaagagctgtatgataaacatgacataataccgcttattctggattatagaatgtatacgaaaatactgacaacttactgtcagggactggttcaggcaataaatcctgcaactggaagaattcataccaactttattcagacaggtacggcaactggaagacttgcaagtgcagagcccaatctgcaaaatattcctgtaaaatatgatgagggaaagctaataagaaaggcatttgttccagatgaaggttatgtgttgatagatgctgattattctcagattgagcttagaatacttgcacatatctctgaggatgaacgactgataaatgcttttaaaaataaccttgatattcattcacagacggcggcagagatctttggtgtggatataagtcaggttacaccaattatgcgaagccaggcaaaagcagttaactttggaattgtatatggtatatctgattatggactttcacgggatataaagatttcaagaaaagaagcagccgagtttattaatcgttattttgaaaagtatcccagagtaaaagaatatttggacaatgtcgtcaagtttgcccgtgaaaacggatttgttttgacaatatttaacaggaaaaggtatatcaaggatataaaggctactaataaaaacctgagaaactatgcagagagaatagcaatgaattcacctatccagggaagtgctgcagatattatgaaaatagcaatgataagagtttataaaaagctaaaagaaaacaatttaaaatcaagaattattctgcaggtccatgacgaacttttgattgaatcaccctatgaagagaaagagatagtaaaggaaatagtaaaatcggagatggaaaatgcggttttattgaaagttcctttggtagttgaagtgaaagaaggttcaaattggtatgaaacaaagtaaaggatcc

SEQ ID NO: 1597 - DNA, 2623 bp, Artificial Sequence
  Description of Artificial Sequence: Synthetic DNA sequence of Caldicellulosiruptor TOK13B DNA Polymerase S773R
atgaaatacctgctgccgaccgctgctgctggtctgctgctcctcgctgcccagccggcgatggccatggaatttgttatttttgatgggaatagtattctgtatagagctttttttgccttgccacagcttactacctcaacaggcatacctacaaatgctatatatggttttttgaatgtgctgttaaaatacttagattctgaaaaaccggattatgtagcagtagcttttgacaaaaaaggcagagctgtccgaaaaagtgaatatgaagaatacaaggctaacagaaaaccgatgccagattctcttcaggttcagataccttacgtaagagaaatacttgctgctctgaacattcctgtactgaaatgtgaagggtatgaagctgatgacgttataggcacacttgtaaatagatttaaagcccaggatttagagattgtgataataaccggagacagagatacacttcagttacttgataaaaatgtaattgtcaaaatagtcacaacaaggtttgacaggacaactgaagatttgtatgctgtagaaaatgtaaaagaaaaatatggtgtttttgcgcatcaggttgttgactataaagcattagtaggtgatgcgtcagacaatataccaggtgttaagggaattggagataaaactgccataaagctgttagaagagtaccagactctggagaatatatatcagaatctaaataacattaaaggagcgctaaaagagaagttggaatcaggaaaagacatggcatttttatcaaaaagactggctactatcatatgcgatttaccaattgaggtgaatcttgaagaattaaaaaccaaagaatgggacaaagaaagactttatcagattttacttcaacttgagtttaaaagctttattaaaagactgggcttttcagaagagattaactatgcaaggcagaactttcagctacctgaatttagtattaaagaacttcgtgatgtttcagcaatagggggcaaagaaatctatctattgtactcagatgaagaaggacttttttatatttatgaccatcaaacctcaaccatttttacaacttctgataaggaagctattaaagatcttttaacactccaaagcattcaaaaggttgtatatgatttaaaaaatatactccataaggtggactttgatgaagctaatcagataaaaaattgtaatgatgttatgttggcttcatatgttttggacagtacacgcagttcgtacgatttggaaacattgtttatttcttatctcaacactgatatagctgcaatcaaagagaatagatgggctggtgctacagttttattaagaaatctttgggatgaactttcaaaactcattgatttaaactcggcccaatacgtttatgagagcatagagatgcctcttgttcccattttatatgaaatggagaaaatcggttttaaggttgacaaaaacactttgcaggagtatacaaaagagattgagagcaagcttttaaagttggaatcacagatttatcaaatagccggtgaatggtttaacataaactcgccaaaacaactctcatatatattattcgaaaaactgaagcttccggttgttaaaaagaccaaaacaggatattcaacagatgccgaggtattagaagagctgtatgataaacatgacataataccgcttattctggattatagaatgtatacgaaaatactgacaacttactgtcagggactggttcaggcaataaatcctgcaactggaagaattcataccaactttattcagacaggtacggcaactggaagacttgcaagtgcagagcccaatctgcaaaatattcctgtaaaatatgatgagggaaagctaataagaaaggcatttgttccagatgaaggttatgtgttgatagatgctgattattctcagattgagcttagaatacttgcacatatctctgaggatgaacgactgataaatgcttttaaaaataaccttgatattcattcacagacggcggcagagatctttggtgtggatataagtcaggttacaccaattatgcgaagccaggcaaaagcagttaactttggaattgtatatggtatatctgattatggactttcacgggatataaagatttcaagaaaagaagcagccgagtttattaatcgttattttgaaaagtatcccagagtaaaagaatatttggacaatgtcgtcaagtttgcccgtgaaaacggatttgttttgacaatatttaacaggaaaaggtatatcaaggatataaagcgtactaataaaaacctgagaaactatgcagagagaatagcaatgaattcacctatccagggaagtgctgcagatattatgaaaatagcaatgataagagtttataaaaagctaaaagaaaacaatttaaaatcaagaattattctgcaggtccatgacgaacttttgattgaatcaccctatgaagagaaagagatagtaaaggaaatagtaaaatcggagatggaaaatgcggttttattgaaagttcctttggtagttgaagtgaaagaaggttcaaattggtatgaaacaaagtaaaggatcc

SEQ ID NO: 1598 - DNA, 2623 bp, Artificial Sequence
  Description of Artificial Sequence: Synthetic DNA sequence of Caldicellulosiruptor TOK13B DNA Polymerase S773N
atgaaatacctgctgccgaccgctgctgctggtctgctgctcctcgctgcccagccggcgatggccatggaatttgttatttttgatgggaatagtattctgtatagagctttttttgccttgccacagcttactacctcaacaggcatacctacaaatgctatatatggttttttgaatgtgctgttaaaatacttagattctgaaaaaccggattatgtagcagtagcttttgacaaaaaaggcagagctgtccgaaaaagtgaatatgaagaatacaaggctaacagaaaaccgatgccagattctcttcaggttcagataccttacgtaagagaaatacttgctgctctgaacattcctgtactgaaatgtgaagggtatgaagctgatgacgttataggcacacttgtaaatagatttaaagcccaggatttagagattgtgataataaccggagacagagatacacttcagttacttgataaaaatgtaattgtcaaaatagtcacaacaaggtttgacaggacaactgaagatttgtatgctgtagaaaatgtaaaagaaaaatatggtgtttttgcgcatcaggttgttgactataaagcattagtaggtgatgcgtcagacaatataccaggtgttaagggaattggagataaaactgccataaagctgttagaagagtaccagactctggagaatatatatcagaatctaaataacattaaaggagcgctaaaagagaagttggaatcaggaaaagacatggcatttttatcaaaaagactggctactatcatatgcgatttaccaattgaggtgaatcttgaagaattaaaaaccaaagaatgggacaaagaaagactttatcagattttacttcaacttgagtttaaaagctttattaaaagactgggcttttcagaagagattaactatgcaaggcagaactttcagctacctgaatttagtattaaagaacttcgtgatgtttcagcaatagggggcaaagaaatctatctattgtactcagatgaagaaggacttttttatatttatgaccatcaaacctcaaccatttttacaacttctgataaggaagctattaaagatcttttaacactccaaagcattcaaaaggttgtatatgatttaaaaaatatactccataaggtggactttgatgaagctaatcagataaaaaattgtaatgatgttatgttggcttcatatgttttggacagtacacgcagttcgtacgatttggaaacattgtttatttcttatctcaacactgatatagctgcaatcaaagagaatagatgggctggtgctacagttttattaagaaatctttgggatgaactttcaaaactcattgatttaaactcggcccaatacgtttatgagagcatagagatgcctcttgttcccattttatatgaaatggagaaaatcggttttaaggttgacaaaaacactttgcaggagtatacaaaagagattgagagcaagcttttaaagttggaatcacagatttatcaaatagccggtgaatggtttaacataaactcgccaaaacaactctcatatatattattcgaaaaactgaagcttccggttgttaaaaagaccaaaacaggatattcaacagatgccgaggtattagaagagctgtatgataaacatgacataataccgcttattctggattatagaatgtatacgaaaatactgacaacttactgtcagggactggttcaggcaataaatcctgcaactggaagaattcataccaactttattcagacaggtacggcaactggaagacttgcaagtgcagagcccaatctgcaaaatattcctgtaaaatatgatgagggaaagctaataagaaaggcatttgttccagatgaaggttatgtgttgatagatgctgattattctcagattgagcttagaatacttgcacatatctctgaggatgaacgactgataaatgcttttaaaaataaccttgatattcattcacagacggcggcagagatctttggtgtggatataagtcaggttacaccaattatgcgaagccaggcaaaagcagttaactttggaattgtatatggtatatctgattatggactttcacgggatataaagatttcaagaaaagaagcagccgagtttattaatcgttattttgaaaagtatcccagagtaaaagaatatttggacaatgtcgtcaagtttgcccgtgaaaacggatttgttttgacaatatttaacaggaaaaggtatatcaaggatataaagaatactaataaaaacctgagaaactatgcagagagaatagcaatgaattcacctatccagggaagtgctgcagatattatgaaaatagcaatgataagagtttataaaaagctaaaagaaaacaatttaaaatcaagaattattctgcaggtccatgacgaacttttgattgaatcaccctatgaagagaaagagatagtaaaggaaatagtaaaatcggagatggaaaatgcggttttattgaaagttcctttggtagttgaagtgaaagaaggttcaaattggtatgaaacaaagtaaaggatcc

SEQ ID NO: 1599 - DNA, 2623 bp, Artificial Sequence
  Description of Artificial Sequence: Synthetic DNA sequence of Caldicellulosiruptor TOK13B DNA Polymerase S773D
atgaaatacctgctgccgaccgctgctgctggtctgctgctcctcgctgcccagccggcgatggccatggaatttgttatttttgatgggaatagtattctgtatagagctttttttgccttgccacagcttactacctcaacaggcatacctacaaatgctatatatggttttttgaatgtgctgttaaaatacttagattctgaaaaaccggattatgtagcagtagcttttgacaaaaaaggcagagctgtccgaaaaagtgaatatgaagaatacaaggctaacagaaaaccgatgccagattctcttcaggttcagataccttacgtaagagaaatacttgctgctctgaacattcctgtactgaaatgtgaagggtatgaagctgatgacgttataggcacacttgtaaatagatttaaagcccaggatttagagattgtgataataaccggagacagagatacacttcagttacttgataaaaatgtaattgtcaaaatagtcacaacaaggtttgacaggacaactgaagatttgtatgctgtagaaaatgtaaaagaaaaatatggtgtttttgcgcatcaggttgttgactataaagcattagtaggtgatgcgtcagacaatataccaggtgttaagggaattggagataaaactgccataaagctgttagaagagtaccagactctggagaatatatatcagaatctaaataacattaaaggagcgctaaaagagaagttggaatcaggaaaagacatggcatttttatcaaaaagactggctactatcatatgcgatttaccaattgaggtgaatcttgaagaattaaaaaccaaagaatgggacaaagaaagactttatcagattttacttcaacttgagtttaaaagctttattaaaagactgggcttttcagaagagattaactatgcaaggcagaactttcagctacctgaatttagtattaaagaacttcgtgatgtttcagcaatagggggcaaagaaatctatctattgtactcagatgaagaaggacttttttatatttatgaccatcaaacctcaaccatttttacaacttctgataaggaagctattaaagatcttttaacactccaaagcattcaaaaggttgtatatgatttaaaaaatatactccataaggtggactttgatgaagctaatcagataaaaaattgtaatgatgttatgttggcttcatatgttttggacagtacacgcagttcgtacgatttggaaacattgtttatttcttatctcaacactgatatagctgcaatcaaagagaatagatgggctggtgctacagttttattaagaaatctttgggatgaactttcaaaactcattgatttaaactcggcccaatacgtttatgagagcatagagatgcctcttgttcccattttatatgaaatggagaaaatcggttttaaggttgacaaaaacactttgcaggagtatacaaaagagattgagagcaagcttttaaagttggaatcacagatttatcaaatagccggtgaatggtttaacataaactcgccaaaacaactctcatatatattattcgaaaaactgaagcttccggttgttaaaaagaccaaaacaggatattcaacagatgccgaggtattagaagagctgtatgataaacatgacataataccgcttattctggattatagaatgtatacgaaaatactgacaacttactgtcagggactggttcaggcaataaatcctgcaactggaagaattcataccaactttattcagacaggtacggcaactggaagacttgcaagtgcagagcccaatctgcaaaatattcctgtaaaatatgatgagggaaagctaataagaaaggcatttgttccagatgaaggttatgtgttgatagatgctgattattctcagattgagcttagaatacttgcacatatctctgaggatgaacgactgataaatgcttttaaaaataaccttgatattcattcacagacggcggcagagatctttggtgtggatataagtcaggttacaccaattatgcgaagccaggcaaaagcagttaactttggaattgtatatggtatatctgattatggactttcacgggatataaagatttcaagaaaagaagcagccgagtttattaatcgttattttgaaaagtatcccagagtaaaagaatatttggacaatgtcgtcaagtttgcccgtgaaaacggatttgttttgacaatatttaacaggaaaaggtatatcaaggatataaaggatactaataaaaacctgagaaactatgcagagagaatagcaatgaattcacctatccagggaagtgctgcagatattatgaaaatagcaatgataagagtttataaaaagctaaaagaaaacaatttaaaatcaagaattattctgcaggtccatgacgaacttttgattgaatcaccctatgaagagaaagagatagtaaaggaaatagtaaaatcggagatggaaaatgcggttttattgaaagttcctttggtagttgaagtgaaagaaggttcaaattggtatgaaacaaagtaaaggatcc

SEQ ID NO: 1600 - DNA, 2623 bp, Artificial Sequence
  Description of Artificial Sequence: Synthetic DNA sequence of Caldicellulosiruptor TOK13B DNA Polymerase S773C
atgaaatacctgctgccgaccgctgctgctggtctgctgctcctcgctgcccagccggcgatggccatggaatttgttatttttgatgggaatagtattctgtatagagctttttttgccttgccacagcttactacctcaacaggcatacctacaaatgctatatatggttttttgaatgtgctgttaaaatacttagattctgaaaaaccggattatgtagcagtagcttttgacaaaaaaggcagagctgtccgaaaaagtgaatatgaagaatacaaggctaacagaaaaccgatgccagattctcttcaggttcagataccttacgtaagagaaatacttgctgctctgaacattcctgtactgaaatgtgaagggtatgaagctgatgacgttataggcacacttgtaaatagatttaaagcccaggatttagagattgtgataataaccggagacagagatacacttcagttacttgataaaaatgtaattgtcaaaatagtcacaacaaggtttgacaggacaactgaagatttgtatgctgtagaaaatgtaaaagaaaaatatggtgtttttgcgcatcaggttgttgactataaagcattagtaggtgatgcgtcagacaatataccaggtgttaagggaattggagataaaactgccataaagctgttagaagagtaccagactctggagaatatatatcagaatctaaataacattaaaggagcgctaaaagagaagttggaatcaggaaaagacatggcatttttatcaaaaagactggctactatcatatgcgatttaccaattgaggtgaatcttgaagaattaaaaaccaaagaatgggacaaagaaagactttatcagattttacttcaacttgagtttaaaagctttattaaaagactgggcttttcagaagagattaactatgcaaggcagaactttcagctacctgaatttagtattaaagaacttcgtgatgtttcagcaatagggggcaaagaaatctatctattgtactcagatgaagaaggacttttttatatttatgaccatcaaacctcaaccatttttacaacttctgataaggaagctattaaagatcttttaacactccaaagcattcaaaaggttgtatatgatttaaaaaatatactccataaggtggactttgatgaagctaatcagataaaaaattgtaatgatgttatgttggcttcatatgttttggacagtacacgcagttcgtacgatttggaaacattgtttatttcttatctcaacactgatatagctgcaatcaaagagaatagatgggctggtgctacagttttattaagaaatctttgggatgaactttcaaaactcattgatttaaactcggcccaatacgtttatgagagcatagagatgcctcttgttcccattttatatgaaatggagaaaatcggttttaaggttgacaaaaacactttgcaggagtatacaaaagagattgagagcaagcttttaaagttggaatcacagatttatcaaatagccggtgaatggtttaacataaactcgccaaaacaactctcatatatattattcgaaaaactgaagcttccggttgttaaaaagaccaaaacaggatattcaacagatgccgaggtattagaagagctgtatgataaacatgacataataccgcttattctggattatagaatgtatacgaaaatactgacaacttactgtcagggactggttcaggcaataaatcctgcaactggaagaattcataccaactttattcagacaggtacggcaactggaagacttgcaagtgcagagcccaatctgcaaaatattcctgtaaaatatgatgagggaaagctaataagaaaggcatttgttccagatgaaggttatgtgttgatagatgctgattattctcagattgagcttagaatacttgcacatatctctgaggatgaacgactgataaatgcttttaaaaataaccttgatattcattcacagacggcggcagagatctttggtgtggatataagtcaggttacaccaattatgcgaagccaggcaaaagcagttaactttggaattgtatatggtatatctgattatggactttcacgggatataaagatttcaagaaaagaagcagccgagtttattaatcgttattttgaaaagtatcccagagtaaaagaatatttggacaatgtcgtcaagtttgcccgtgaaaacggatttgttttgacaatatttaacaggaaaaggtatatcaaggatataaagtgtactaataaaaacctgagaaactatgcagagagaatagcaatgaattcacctatccagggaagtgctgcagatattatgaaaatagcaatgataagagtttataaaaagctaaaagaaaacaatttaaaatcaagaattattctgcaggtccatgacgaacttttgattgaatcaccctatgaagagaaagagatagtaaaggaaatagtaaaatcggagatggaaaatgcggttttattgaaagttcctttggtagttgaagtgaaagaaggttcaaattggtatgaaacaaagtaaaggatcc

SEQ ID NO: 1601 - DNA, 2623 bp, Artificial Sequence
  Description of Artificial Sequence: Synthetic DNA sequence of Caldicellulosiruptor TOK13B DNA Polymerase S773E
atgaaatacctgctgccgaccgctgctgctggtctgctgctcctcgctgcccagccggcgatggccatggaatttgttatttttgatgggaatagtattctgtatagagctttttttgccttgccacagcttactacctcaacaggcatacctacaaatgctatatatggttttttgaatgtgctgttaaaatacttagattctgaaaaaccggattatgtagcagtagcttttgacaaaaaaggcagagctgtccgaaaaagtgaatatgaagaatacaaggctaacagaaaaccgatgccagattctcttcaggttcagataccttacgtaagagaaatacttgctgctctgaacattcctgtactgaaatgtgaagggtatgaagctgatgacgttataggcacacttgtaaatagatttaaagcccaggatttagagattgtgataataaccggagacagagatacacttcagttacttgataaaaatgtaattgtcaaaatagtcacaacaaggtttgacaggacaactgaagatttgtatgctgtagaaaatgtaaaagaaaaatatggtgtttttgcgcatcaggttgttgactataaagcattagtaggtgatgcgtcagacaatataccaggtgttaagggaattggagataaaactgccataaagctgttagaagagtaccagactctggagaatatatatcagaatctaaataacattaaaggagcgctaaaagagaagttggaatcaggaaaagacatggcatttttatcaaaaagactggctactatcatatgcgatttaccaattgaggtgaatcttgaagaattaaaaaccaaagaatgggacaaagaaagactttatcagattttacttcaacttgagtttaaaagctttattaaaagactgggcttttcagaagagattaactatgcaaggcagaactttcagctacctgaatttagtattaaagaacttcgtgatgtttcagcaatagggggcaaagaaatctatctattgtactcagatgaagaaggacttttttatatttatgaccatcaaacctcaaccatttttacaacttctgataaggaagctattaaagatcttttaacactccaaagcattcaaaaggttgtatatgatttaaaaaatatactccataaggtggactttgatgaagctaatcagataaaaaattgtaatgatgttatgttggcttcatatgttttggacagtacacgcagttcgtacgatttggaaacattgtttatttcttatctcaacactgatatagctgcaatcaaagagaatagatgggctggtgctacagttttattaagaaatctttgggatgaactttcaaaactcattgatttaaactcggcccaatacgtttatgagagcatagagatgcctcttgttcccattttatatgaaatggagaaaatcggttttaaggttgacaaaaacactttgcaggagtatacaaaagagattgagagcaagcttttaaagttggaatcacagatttatcaaatagccggtgaatggtttaacataaactcgccaaaacaactctcatatatattattcgaaaaactgaagcttccggttgttaaaaagaccaaaacaggatattcaacagatgccgaggtattagaagagctgtatgataaacatgacataataccgcttattctggattatagaatgtatacgaaaatactgacaacttactgtcagggactggttcaggcaataaatcctgcaactggaagaattcataccaactttattcagacaggtacggcaactggaagacttgcaagtgcagagcccaatctgcaaaatattcctgtaaaatatgatgagggaaagctaataagaaaggcatttgttccagatgaaggttatgtgttgatagatgctgattattctcagattgagcttagaatacttgcacatatctctgaggatgaacgactgataaatgcttttaaaaataaccttgatattcattcacagacggcggcagagatctttggtgtggatataagtcaggttacaccaattatgcgaagccaggcaaaagcagttaactttggaattgtatatggtatatctgattatggactttcacgggatataaagatttcaagaaaagaagcagccgagtttattaatcgttattttgaaaagtatcccagagtaaaagaatatttggacaatgtcgtcaagtttgcccgtgaaaacggatttgttttgacaatatttaacaggaaaaggtatatcaaggatataaaggaaactaataaaaacctgagaaactatgcagagagaatagcaatgaattcacctatccagggaagtgctgcagatattatgaaaatagcaatgataagagtttataaaaagctaaaagaaaacaatttaaaatcaagaattattctgcaggtccatgacgaacttttgattgaatcaccctatgaagagaaagagatagtaaaggaaatagtaaaatcggagatggaaaatgcggttttattgaaagttcctttggtagttgaagtgaaagaaggttcaaattggtatgaaacaaagtaaaggatcc

SEQ ID NO: 1602 - DNA, 2623 bp, Artificial Sequence
  Description of Artificial Sequence: Synthetic DNA sequence of Caldicellulosiruptor TOK13B DNA Polymerase S773Q
atgaaatacctgctgccgaccgctgctgctggtctgctgctcctcgctgcccagccggcgatggccatggaatttgttatttttgatgggaatagtattctgtatagagctttttttgccttgccacagcttactacctcaacaggcatacctacaaatgctatatatggttttttgaatgtgctgttaaaatacttagattctgaaaaaccggattatgtagcagtagcttttgacaaaaaaggcagagctgtccgaaaaagtgaatatgaagaatacaaggctaacagaaaaccgatgccagattctcttcaggttcagataccttacgtaagagaaatacttgctgctctgaacattcctgtactgaaatgtgaagggtatgaagctgatgacgttataggcacacttgtaaatagatttaaagcccaggatttagagattgtgataataaccggagacagagatacacttcagttacttgataaaaatgtaattgtcaaaatagtcacaacaaggtttgacaggacaactgaagatttgtatgctgtagaaaatgtaaaagaaaaatatggtgtttttgcgcatcaggttgttgactataaagcattagtaggtgatgcgtcagacaatataccaggtgttaagggaattggagataaaactgccataaagctgttagaagagtaccagactctggagaatatatatcagaatctaaataacattaaaggagcgctaaaagagaagttggaatcaggaaaagacatggcatttttatcaaaaagactggctactatcatatgcgatttaccaattgaggtgaatcttgaagaattaaaaaccaaagaatgggacaaagaaagactttatcagattttacttcaacttgagtttaaaagctttattaaaagactgggcttttcagaagagattaactatgcaaggcagaactttcagctacctgaatttagtattaaagaacttcgtgatgtttcagcaatagggggcaaagaaatctatctattgtactcagatgaagaaggacttttttatatttatgaccatcaaacctcaaccatttttacaacttctgataaggaagctattaaagatcttttaacactccaaagcattcaaaaggttgtatatgatttaaaaaatatactccataaggtggactttgatgaagctaatcagataaaaaattgtaatgatgttatgttggcttcatatgttttggacagtacacgcagttcgtacgatttggaaacattgtttatttcttatctcaacactgatatagctgcaatcaaagagaatagatgggctggtgctacagttttattaagaaatctttgggatgaactttcaaaactcattgatttaaactcggcccaatacgtttatgagagcatagagatgcctcttgttcccattttatatgaaatggagaaaatcggttttaaggttgacaaaaacactttgcaggagtatacaaaagagattgagagcaagcttttaaagttggaatcacagatttatcaaatagccggtgaatggtttaacataaactcgccaaaacaactctcatatatattattcgaaaaactgaagcttccggttgttaaaaagaccaaaacaggatattcaacagatgccgaggtattagaagagctgtatgataaacatgacataataccgcttattctggattatagaatgtatacgaaaatactgacaacttactgtcagggactggttcaggcaataaatcctgcaactggaagaattcataccaactttattcagacaggtacggcaactggaagacttgcaagtgcagagcccaatctgcaaaatattcctgtaaaatatgatgagggaaagctaataagaaaggcatttgttccagatgaaggttatgtgttgatagatgctgattattctcagattgagcttagaatacttgcacatatctctgaggatgaacgactgataaatgcttttaaaaataaccttgatattcattcacagacggcggcagagatctttggtgtggatataagtcaggttacaccaattatgcgaagccaggcaaaagcagttaactttggaattgtatatggtatatctgattatggactttcacgggatataaagatttcaagaaaagaagcagccgagtttattaatcgttattttgaaaagtatcccagagtaaaagaatatttggacaatgtcgtcaagtttgcccgtgaaaacggatttgttttgacaatatttaacaggaaaaggtatatcaaggatataaagcaaactaataaaaacctgagaaactatgcagagagaatagcaatgaattcacctatccagggaagtgctgcagatattatgaaaatagcaatgataagagtttataaaaagctaaaagaaaacaatttaaaatcaagaattattctgcaggtccatgacgaacttttgattgaatcaccctatgaagagaaagagatagtaaaggaaatagtaaaatcggagatggaaaatgcggttttattgaaagttcctttggtagttgaagtgaaagaaggttcaaattggtatgaaacaaagtaaaggatcc

SEQ ID NO: 1603 - DNA, 2623 bp, Artificial Sequence
  Description of Artificial Sequence: Synthetic DNA sequence of Caldicellulosiruptor TOK13B DNA Polymerase S773G
atgaaatacctgctgccgaccgctgctgctggtctgctgctcctcgctgcccagccggcgatggccatggaatttgttatttttgatgggaatagtattctgtatagagctttttttgccttgccacagcttactacctcaacaggcatacctacaaatgctatatatggttttttgaatgtgctgttaaaatacttagattctgaaaaaccggattatgtagcagtagcttttgacaaaaaaggcagagctgtccgaaaaagtgaatatgaagaatacaaggctaacagaaaaccgatgccagattctcttcaggttcagataccttacgtaagagaaatacttgctgctctgaacattcctgtactgaaatgtgaagggtatgaagctgatgacgttataggcacacttgtaaatagatttaaagcccaggatttagagattgtgataataaccggagacagagatacacttcagttacttgataaaaatgtaattgtcaaaatagtcacaacaaggtttgacaggacaactgaagatttgtatgctgtagaaaatgtaaaagaaaaatatggtgtttttgcgcatcaggttgttgactataaagcattagtaggtgatgcgtcagacaatataccaggtgttaagggaattggagataaaactgccataaagctgttagaagagtaccagactctggagaatatatatcagaatctaaataacattaaaggagcgctaaaagagaagttggaatcaggaaaagacatggcatttttatcaaaaagactggctactatcatatgcgatttaccaattgaggtgaatcttgaagaattaaaaaccaaagaatgggacaaagaaagactttatcagattttacttcaacttgagtttaaaagctttattaaaagactgggcttttcagaagagattaactatgcaaggcagaactttcagctacctgaatttagtattaaagaacttcgtgatgtttcagcaatagggggcaaagaaatctatctattgtactcagatgaagaaggacttttttatatttatgaccatcaaacctcaaccatttttacaacttctgataaggaagctattaaagatcttttaacactccaaagcattcaaaaggttgtatatgatttaaaaaatatactccataaggtggactttgatgaagctaatcagataaaaaattgtaatgatgttatgttggcttcatatgttttggacagtacacgcagttcgtacgatttggaaacattgtttatttcttatctcaacactgatatagctgcaatcaaagagaatagatgggctggtgctacagttttattaagaaatctttgggatgaactttcaaaactcattgatttaaactcggcccaatacgtttatgagagcatagagatgcctcttgttcccattttatatgaaatggagaaaatcggttttaaggttgacaaaaacactttgcaggagtatacaaaagagattgagagcaagcttttaaagttggaatcacagatttatcaaatagccggtgaatggtttaacataaactcgccaaaacaactctcatatatattattcgaaaaactgaagcttccggttgttaaaaagaccaaaacaggatattcaacagatgccgaggtattagaagagctgtatgataaacatgacataataccgcttattctggattatagaatgtatacgaaaatactgacaacttactgtcagggactggttcaggcaataaatcctgcaactggaagaattcataccaactttattcagacaggtacggcaactggaagacttgcaagtgcagagcccaatctgcaaaatattcctgtaaaatatgatgagggaaagctaataagaaaggcatttgttccagatgaaggttatgtgttgatagatgctgattattctcagattgagcttagaatacttgcacatatctctgaggatgaacgactgataaatgcttttaaaaataaccttgatattcattcacagacggcggcagagatctttggtgtggatataagtcaggttacaccaattatgcgaagccaggcaaaagcagttaactttggaattgtatatggtatatctgattatggactttcacgggatataaagatttcaagaaaagaagcagccgagtttattaatcgttattttgaaaagtatcccagagtaaaagaatatttggacaatgtcgtcaagtttgcccgtgaaaacggatttgttttgacaatatttaacaggaaaaggtatatcaaggatataaagggtactaataaaaacctgagaaactatgcagagagaatagcaatgaattcacctatccagggaagtgctgcagatattatgaaaatagcaatgataagagtttataaaaagctaaaagaaaacaatttaaaatcaagaattattctgcaggtccatgacgaacttttgattgaatcaccctatgaagagaaagagatagtaaaggaaatagtaaaatcggagatggaaaatgcggttttattgaaagttcctttggtagttgaagtgaaagaaggttcaaattggtatgaaacaaagtaaaggatcc

SEQ ID NO: 1604 - DNA, 2623 bp, Artificial Sequence
  Description of Artificial Sequence: Synthetic DNA sequence of Caldicellulosiruptor TOK13B DNA Polymerase S773H
atgaaatacctgctgccgaccgctgctgctggtctgctgctcctcgctgcccagccggcgatggccatggaatttgttatttttgatgggaatagtattctgtatagagctttttttgccttgccacagcttactacctcaacaggcatacctacaaatgctatatatggttttttgaatgtgctgttaaaatacttagattctgaaaaaccggattatgtagcagtagcttttgacaaaaaaggcagagctgtccgaaaaagtgaatatgaagaatacaaggctaacagaaaaccgatgccagattctcttcaggttcagataccttacgtaagagaaatacttgctgctctgaacattcctgtactgaaatgtgaagggtatgaagctgatgacgttataggcacacttgtaaatagatttaaagcccaggatttagagattgtgataataaccggagacagagatacacttcagttacttgataaaaatgtaattgtcaaaatagtcacaacaaggtttgacaggacaactgaagatttgtatgctgtagaaaatgtaaaagaaaaatatggtgtttttgcgcatcaggttgttgactataaagcattagtaggtgatgcgtcagacaatataccaggtgttaagggaattggagataaaactgccataaagctgttagaagagtaccagactctggagaatatatatcagaatctaaataacattaaaggagcgctaaaagagaagttggaatcaggaaaagacatggcatttttatcaaaaagactggctactatcatatgcgatttaccaattgaggtgaatcttgaagaattaaaaaccaaagaatgggacaaagaaagactttatcagattttacttcaacttgagtttaaaagctttattaaaagactgggcttttcagaagagattaactatgcaaggcagaactttcagctacctgaatttagtattaaagaacttcgtgatgtttcagcaatagggggcaaagaaatctatctattgtactcagatgaagaaggacttttttatatttatgaccatcaaacctcaaccatttttacaacttctgataaggaagctattaaagatcttttaacactccaaagcattcaaaaggttgtatatgatttaaaaaatatactccataaggtggactttgatgaagctaatcagataaaaaattgtaatgatgttatgttggcttcatatgttttggacagtacacgcagttcgtacgatttggaaacattgtttatttcttatctcaacactgatatagctgcaatcaaagagaatagatgggctggtgctacagttttattaagaaatctttgggatgaactttcaaaactcattgatttaaactcggcccaatacgtttatgagagcatagagatgcctcttgttcccattttatatgaaatggagaaaatcggttttaaggttgacaaaaacactttgcaggagtatacaaaagagattgagagcaagcttttaaagttggaatcacagatttatcaaatagccggtgaatggtttaacataaactcgccaaaacaactctcatatatattattcgaaaaactgaagcttccggttgttaaaaagaccaaaacaggatattcaacagatgccgaggtattagaagagctgtatgataaacatgacataataccgcttattctggattatagaatgtatacgaaaatactgacaacttactgtcagggactggttcaggcaataaatcctgcaactggaagaattcataccaactttattcagacaggtacggcaactggaagacttgcaagtgcagagcccaatctgcaaaatattcctgtaaaatatgatgagggaaagctaataagaaaggcatttgttccagatgaaggttatgtgttgatagatgctgattattctcagattgagcttagaatacttgcacatatctctgaggatgaacgactgataaatgcttttaaaaataaccttgatattcattcacagacggcggcagagatctttggtgtggatataagtcaggttacaccaattatgcgaagccaggcaaaagcagttaactttggaattgtatatggtatatctgattatggactttcacgggatataaagatttcaagaaaagaagcagccgagtttattaatcgttattttgaaaagtatcccagagtaaaagaatatttggacaatgtcgtcaagtttgcccgtgaaaacggatttgttttgacaatatttaacaggaaaaggtatatcaaggatataaagcatactaataaaaacctgagaaactatgcagagagaatagcaatgaattcacctatccagggaagtgctgcagatattatgaaaatagcaatgataagagtttataaaaagctaaaagaaaacaatttaaaatcaagaattattctgcaggtccatgacgaacttttgattgaatcaccctatgaagagaaagagatagtaaaggaaatagtaaaatcggagatggaaaatgcggttttattgaaagttcctttggtagttgaagtgaaagaaggttcaaattggtatgaaacaaagtaaaggatcc

SEQ ID NO: 1605 - DNA, 2623 bp, Artificial Sequence
  Description of Artificial Sequence: Synthetic DNA sequence of Caldicellulosiruptor TOK13B DNA Polymerase S773I
atgaaatacctgctgccgaccgctgctgctggtctgctgctcctcgctgcccagccggcgatggccatggaatttgttatttttgatgggaatagtattctgtatagagctttttttgccttgccacagcttactacctcaacaggcatacctacaaatgctatatatggttttttgaatgtgctgttaaaatacttagattctgaaaaaccggattatgtagcagtagcttttgacaaaaaaggcagagctgtccgaaaaagtgaatatgaagaatacaaggctaacagaaaaccgatgccagattctcttcaggttcagataccttacgtaagagaaatacttgctgctctgaacattcctgtactgaaatgtgaagggtatgaagctgatgacgttataggcacacttgtaaatagatttaaagcccaggatttagagattgtgataataaccggagacagagatacacttcagttacttgataaaaatgtaattgtcaaaatagtcacaacaaggtttgacaggacaactgaagatttgtatgctgtagaaaatgtaaaagaaaaatatggtgtttttgcgcatcaggttgttgactataaagcattagtaggtgatgcgtcagacaatataccaggtgttaagggaattggagataaaactgccataaagctgttagaagagtaccagactctggagaatatatatcagaatctaaataacattaaaggagcgctaaaagagaagttggaatcaggaaaagacatggcatttttatcaaaaagactggctactatcatatgcgatttaccaattgaggtgaatcttgaagaattaaaaaccaaagaatgggacaaagaaagactttatcagattttacttcaacttgagtttaaaagctttattaaaagactgggcttttcagaagagattaactatgcaaggcagaactttcagctacctgaatttagtattaaagaacttcgtgatgtttcagcaatagggggcaaagaaatctatctattgtactcagatgaagaaggacttttttatatttatgaccatcaaacctcaaccatttttacaacttctgataaggaagctattaaagatcttttaacactccaaagcattcaaaaggttgtatatgatttaaaaaatatactccataaggtggactttgatgaagctaatcagataaaaaattgtaatgatgttatgttggcttcatatgttttggacagtacacgcagttcgtacgatttggaaacattgtttatttcttatctcaacactgatatagctgcaatcaaagagaatagatgggctggtgctacagttttattaagaaatctttgggatgaactttcaaaactcattgatttaaactcggcccaatacgtttatgagagcatagagatgcctcttgttcccattttatatgaaatggagaaaatcggttttaaggttgacaaaaacactttgcaggagtatacaaaagagattgagagcaagcttttaaagttggaatcacagatttatcaaatagccggtgaatggtttaacataaactcgccaaaacaactctcatatatattattcgaaaaactgaagcttccggttgttaaaaagaccaaaacaggatattcaacagatgccgaggtattagaagagctgtatgataaacatgacataataccgcttattctggattatagaatgtatacgaaaatactgacaacttactgtcagggactggttcaggcaataaatcctgcaactggaagaattcataccaactttattcagacaggtacggcaactggaagacttgcaagtgcagagcccaatctgcaaaatattcctgtaaaatatgatgagggaaagctaataagaaaggcatttgttccagatgaaggttatgtgttgatagatgctgattattctcagattgagcttagaatacttgcacatatctctgaggatgaacgactgataaatgcttttaaaaataaccttgatattcattcacagacggcggcagagatctttggtgtggatataagtcaggttacaccaattatgcgaagccaggcaaaagcagttaactttggaattgtatatggtatatctgattatggactttcacgggatataaagatttcaagaaaagaagcagccgagtttattaatcgttattttgaaaagtatcccagagtaaaagaatatttggacaatgtcgtcaagtttgcccgtgaaaacggatttgttttgacaatatttaacaggaaaaggtatatcaaggatataaagattactaataaaaacctgagaaactatgcagagagaatagcaatgaattcacctatccagggaagtgctgcagatattatgaaaatagcaatgataagagtttataaaaagctaaaagaaaacaatttaaaatcaagaattattctgcaggtccatgacgaacttttgattgaatcaccctatgaagagaaagagatagtaaaggaaatagtaaaatcggagatggaaaatgcggttttattgaaagttcctttggtagttgaagtgaaagaaggttcaaattggtatgaaacaaagtaaaggatcc

SEQ ID NO: 1606 - DNA, 2623 bp, Artificial Sequence
  Description of Artificial Sequence: Synthetic DNA sequence of Caldicellulosiruptor TOK13B DNA Polymerase S773L
atgaaatacctgctgccgaccgctgctgctggtctgctgctcctcgctgcccagccggcgatggccatggaatttgttatttttgatgggaatagtattctgtatagagctttttttgccttgccacagcttactacctcaacaggcatacctacaaatgctatatatggttttttgaatgtgctgttaaaatacttagattctgaaaaaccggattatgtagcagtagcttttgacaaaaaaggcagagctgtccgaaaaagtgaatatgaagaatacaaggctaacagaaaaccgatgccagattctcttcaggttcagataccttacgtaagagaaatacttgctgctctgaacattcctgtactgaaatgtgaagggtatgaagctgatgacgttataggcacacttgtaaatagatttaaagcccaggatttagagattgtgataataaccggagacagagatacacttcagttacttgataaaaatgtaattgtcaaaatagtcacaacaaggtttgacaggacaactgaagatttgtatgctgtagaaaatgtaaaagaaaaatatggtgtttttgcgcatcaggttgttgactataaagcattagtaggtgatgcgtcagacaatataccaggtgttaagggaattggagataaaactgccataaagctgttagaagagtaccagactctggagaatatatatcagaatctaaataacattaaaggagcgctaaaagagaagttggaatcaggaaaagacatggcatttttatcaaaaagactggctactatcatatgcgatttaccaattgaggtgaatcttgaagaattaaaaaccaaagaatgggacaaagaaagactttatcagattttacttcaacttgagtttaaaagctttattaaaagactgggcttttcagaagagattaactatgcaaggcagaactttcagctacctgaatttagtattaaagaacttcgtgatgtttcagcaatagggggcaaagaaatctatctattgtactcagatgaagaaggacttttttatatttatgaccatcaaacctcaaccatttttacaacttctgataaggaagctattaaagatcttttaacactccaaagcattcaaaaggttgtatatgatttaaaaaatatactccataaggtggactttgatgaagctaatcagataaaaaattgtaatgatgttatgttggcttcatatgttttggacagtacacgcagttcgtacgatttggaaacattgtttatttcttatctcaacactgatatagctgcaatcaaagagaatagatgggctggtgctacagttttattaagaaatctttgggatgaactttcaaaactcattgatttaaactcggcccaatacgtttatgagagcatagagatgcctcttgttcccattttatatgaaatggagaaaatcggttttaaggttgacaaaaacactttgcaggagtatacaaaagagattgagagcaagcttttaaagttggaatcacagatttatcaaatagccggtgaatggtttaacataaactcgccaaaacaactctcatatatattattcgaaaaactgaagcttccggttgttaaaaagaccaaaacaggatattcaacagatgccgaggtattagaagagctgtatgataaacatgacataataccgcttattctggattatagaatgtatacgaaaatactgacaacttactgtcagggactggttcaggcaataaatcctgcaactggaagaattcataccaactttattcagacaggtacggcaactggaagacttgcaagtgcagagcccaatctgcaaaatattcctgtaaaatatgatgagggaaagctaataagaaaggcatttgttccagatgaaggttatgtgttgatagatgctgattattctcagattgagcttagaatacttgcacatatctctgaggatgaacgactgataaatgcttttaaaaataaccttgatattcattcacagacggcggcagagatctttggtgtggatataagtcaggttacaccaattatgcgaagccaggcaaaagcagttaactttggaattgtatatggtatatctgattatggactttcacgggatataaagatttcaagaaaagaagcagccgagtttattaatcgttattttgaaaagtatcccagagtaaaagaatatttggacaatgtcgtcaagtttgcccgtgaaaacggatttgttttgacaatatttaacaggaaaaggtatatcaaggatataaagcttactaataaaaacctgagaaactatgcagagagaatagcaatgaattcacctatccagggaagtgctgcagatattatgaaaatagcaatgataagagtttataaaaagctaaaagaaaacaatttaaaatcaagaattattctgcaggtccatgacgaacttttgattgaatcaccctatgaagagaaagagatagtaaaggaaatagtaaaatcggagatggaaaatgcggttttattgaaagttcctttggtagttgaagtgaaagaaggttcaaattggtatgaaacaaagtaaaggatcc

SEQ ID NO: 1607 - DNA, 2623 bp, Artificial Sequence
  Description of Artificial Sequence: Synthetic DNA sequence of Caldicellulosiruptor TOK13B DNA Polymerase S773K
atgaaatacctgctgccgaccgctgctgctggtctgctgctcctcgctgcccagccggcgatggccatggaatttgttatttttgatgggaatagtattctgtatagagctttttttgccttgccacagcttactacctcaacaggcatacctacaaatgctatatatggttttttgaatgtgctgttaaaatacttagattctgaaaaaccggattatgtagcagtagcttttgacaaaaaaggcagagctgtccgaaaaagtgaatatgaagaatacaaggctaacagaaaaccgatgccagattctcttcaggttcagataccttacgtaagagaaatacttgctgctctgaacattcctgtactgaaatgtgaagggtatgaagctgatgacgttataggcacacttgtaaatagatttaaagcccaggatttagagattgtgataataaccggagacagagatacacttcagttacttgataaaaatgtaattgtcaaaatagtcacaacaaggtttgacaggacaactgaagatttgtatgctgtagaaaatgtaaaagaaaaatatggtgtttttgcgcatcaggttgttgactataaagcattagtaggtgatgcgtcagacaatataccaggtgttaagggaattggagataaaactgccataaagctgttagaagagtaccagactctggagaatatatatcagaatctaaataacattaaaggagcgctaaaagagaagttggaatcaggaaaagacatggcatttttatcaaaaagactggctactatcatatgcgatttaccaattgaggtgaatcttgaagaattaaaaaccaaagaatgggacaaagaaagactttatcagattttacttcaacttgagtttaaaagctttattaaaagactgggcttttcagaagagattaactatgcaaggcagaactttcagctacctgaatttagtattaaagaacttcgtgatgtttcagcaatagggggcaaagaaatctatctattgtactcagatgaagaaggacttttttatatttatgaccatcaaacctcaaccatttttacaacttctgataaggaagctattaaagatcttttaacactccaaagcattcaaaaggttgtatatgatttaaaaaatatactccataaggtggactttgatgaagctaatcagataaaaaattgtaatgatgttatgttggcttcatatgttttggacagtacacgcagttcgtacgatttggaaacattgtttatttcttatctcaacactgatatagctgcaatcaaagagaatagatgggctggtgctacagttttattaagaaatctttgggatgaactttcaaaactcattgatttaaactcggcccaatacgtttatgagagcatagagatgcctcttgttcccattttatatgaaatggagaaaatcggttttaaggttgacaaaaacactttgcaggagtatacaaaagagattgagagcaagcttttaaagttggaatcacagatttatcaaatagccggtgaatggtttaacataaactcgccaaaacaactctcatatatattattcgaaaaactgaagcttccggttgttaaaaagaccaaaacaggatattcaacagatgccgaggtattagaagagctgtatgataaacatgacataataccgcttattctggattatagaatgtatacgaaaatactgacaacttactgtcagggactggttcaggcaataaatcctgcaactggaagaattcataccaactttattcagacaggtacggcaactggaagacttgcaagtgcagagcccaatctgcaaaatattcctgtaaaatatgatgagggaaagctaataagaaaggcatttgttccagatgaaggttatgtgttgatagatgctgattattctcagattgagcttagaatacttgcacatatctctgaggatgaacgactgataaatgcttttaaaaataaccttgatattcattcacagacggcggcagagatctttggtgtggatataagtcaggttacaccaattatgcgaagccaggcaaaagcagttaactttggaattgtatatggtatatctgattatggactttcacgggatataaagatttcaagaaaagaagcagccgagtttattaatcgttattttgaaaagtatcccagagtaaaagaatatttggacaatgtcgtcaagtttgcccgtgaaaacggatttgttttgacaatatttaacaggaaaaggtatatcaaggatataaagaaaactaataaaaacctgagaaactatgcagagagaatagcaatgaattcacctatccagggaagtgctgcagatattatgaaaatagcaatgataagagtttataaaaagctaaaagaaaacaatttaaaatcaagaattattctgcaggtccatgacgaacttttgattgaatcaccctatgaagagaaagagatagtaaaggaaatagtaaaatcggagatggaaaatgcggttttattgaaagttcctttggtagttgaagtgaaagaaggttcaaattggtatgaaacaaagtaaaggatcc

SEQ ID NO: 1608 - DNA, 2623 bp, Artificial Sequence
  Description of Artificial Sequence: Synthetic DNA sequence of Caldicellulosiruptor TOK13B DNA Polymerase S773M
atgaaatacctgctgccgaccgctgctgctggtctgctgctcctcgctgcccagccggcgatggccatggaatttgttatttttgatgggaatagtattctgtatagagctttttttgccttgccacagcttactacctcaacaggcatacctacaaatgctatatatggttttttgaatgtgctgttaaaatacttagattctgaaaaaccggattatgtagcagtagcttttgacaaaaaaggcagagctgtccgaaaaagtgaatatgaagaatacaaggctaacagaaaaccgatgccagattctcttcaggttcagataccttacgtaagagaaatacttgctgctctgaacattcctgtactgaaatgtgaagggtatgaagctgatgacgttataggcacacttgtaaatagatttaaagcccaggatttagagattgtgataataaccggagacagagatacacttcagttacttgataaaaatgtaattgtcaaaatagtcacaacaaggtttgacaggacaactgaagatttgtatgctgtagaaaatgtaaaagaaaaatatggtgtttttgcgcatcaggttgttgactataaagcattagtaggtgatgcgtcagacaatataccaggtgttaagggaattggagataaaactgccataaagctgttagaagagtaccagactctggagaatatatatcagaatctaaataacattaaaggagcgctaaaagagaagttggaatcaggaaaagacatggcatttttatcaaaaagactggctactatcatatgcgatttaccaattgaggtgaatcttgaagaattaaaaaccaaagaatgggacaaagaaagactttatcagattttacttcaacttgagtttaaaagctttattaaaagactgggcttttcagaagagattaactatgcaaggcagaactttcagctacctgaatttagtattaaagaacttcgtgatgtttcagcaatagggggcaaagaaatctatctattgtactcagatgaagaaggacttttttatatttatgaccatcaaacctcaaccatttttacaacttctgataaggaagctattaaagatcttttaacactccaaagcattcaaaaggttgtatatgatttaaaaaatatactccataaggtggactttgatgaagctaatcagataaaaaattgtaatgatgttatgttggcttcatatgttttggacagtacacgcagttcgtacgatttggaaacattgtttatttcttatctcaacactgatatagctgcaatcaaagagaatagatgggctggtgctacagttttattaagaaatctttgggatgaactttcaaaactcattgatttaaactcggcccaatacgtttatgagagcatagagatgcctcttgttcccattttatatgaaatggagaaaatcggttttaaggttgacaaaaacactttgcaggagtatacaaaagagattgagagcaagcttttaaagttggaatcacagatttatcaaatagccggtgaatggtttaacataaactcgccaaaacaactctcatatatattattcgaaaaactgaagcttccggttgttaaaaagaccaaaacaggatattcaacagatgccgaggtattagaagagctgtatgataaacatgacataataccgcttattctggattatagaatgtatacgaaaatactgacaacttactgtcagggactggttcaggcaataaatcctgcaactggaagaattcataccaactttattcagacaggtacggcaactggaagacttgcaagtgcagagcccaatctgcaaaatattcctgtaaaatatgatgagggaaagctaataagaaaggcatttgttccagatgaaggttatgtgttgatagatgctgattattctcagattgagcttagaatacttgcacatatctctgaggatgaacgactgataaatgcttttaaaaataaccttgatattcattcacagacggcggcagagatctttggtgtggatataagtcaggttacaccaattatgcgaagccaggcaaaagcagttaactttggaattgtatatggtatatctgattatggactttcacgggatataaagatttcaagaaaagaagcagccgagtttattaatcgttattttgaaaagtatcccagagtaaaagaatatttggacaatgtcgtcaagtttgcccgtgaaaacggatttgttttgacaatatttaacaggaaaaggtatatcaaggatataaagatgactaataaaaacctgagaaactatgcagagagaatagcaatgaattcacctatccagggaagtgctgcagatattatgaaaatagcaatgataagagtttataaaaagctaaaagaaaacaatttaaaatcaagaattattctgcaggtccatgacgaacttttgattgaatcaccctatgaagagaaagagatagtaaaggaaatagtaaaatcggagatggaaaatgcggttttattgaaagttcctttggtagttgaagtgaaagaaggttcaaattggtatgaaacaaagtaaaggatcc

SEQ ID NO: 1609 - DNA, 2623 bp, Artificial Sequence
  Description of Artificial Sequence: Synthetic DNA sequence of Caldicellulosiruptor TOK13B DNA Polymerase S773F
atgaaatacctgctgccgaccgctgctgctggtctgctgctcctcgctgcccagccggcgatggccatggaatttgttatttttgatgggaatagtattctgtatagagctttttttgccttgccacagcttactacctcaacaggcatacctacaaatgctatatatggttttttgaatgtgctgttaaaatacttagattctgaaaaaccggattatgtagcagtagcttttgacaaaaaaggcagagctgtccgaaaaagtgaatatgaagaatacaaggctaacagaaaaccgatgccagattctcttcaggttcagataccttacgtaagagaaatacttgctgctctgaacattcctgtactgaaatgtgaagggtatgaagctgatgacgttataggcacacttgtaaatagatttaaagcccaggatttagagattgtgataataaccggagacagagatacacttcagttacttgataaaaatgtaattgtcaaaatagtcacaacaaggtttgacaggacaactgaagatttgtatgctgtagaaaatgtaaaagaaaaatatggtgtttttgcgcatcaggttgttgactataaagcattagtaggtgatgcgtcagacaatataccaggtgttaagggaattggagataaaactgccataaagctgttagaagagtaccagactctggagaatatatatcagaatctaaataacattaaaggagcgctaaaagagaagttggaatcaggaaaagacatggcatttttatcaaaaagactggctactatcatatgcgatttaccaattgaggtgaatcttgaagaattaaaaaccaaagaatgggacaaagaaagactttatcagattttacttcaacttgagtttaaaagctttattaaaagactgggcttttcagaagagattaactatgcaaggcagaactttcagctacctgaatttagtattaaagaacttcgtgatgtttcagcaatagggggcaaagaaatctatctattgtactcagatgaagaaggacttttttatatttatgaccatcaaacctcaaccatttttacaacttctgataaggaagctattaaagatcttttaacactccaaagcattcaaaaggttgtatatgatttaaaaaatatactccataaggtggactttgatgaagctaatcagataaaaaattgtaatgatgttatgttggcttcatatgttttggacagtacacgcagttcgtacgatttggaaacattgtttatttcttatctcaacactgatatagctgcaatcaaagagaatagatgggctggtgctacagttttattaagaaatctttgggatgaactttcaaaactcattgatttaaactcggcccaatacgtttatgagagcatagagatgcctcttgttcccattttatatgaaatggagaaaatcggttttaaggttgacaaaaacactttgcaggagtatacaaaagagattgagagcaagcttttaaagttggaatcacagatttatcaaatagccggtgaatggtttaacataaactcgccaaaacaactctcatatatattattcgaaaaactgaagcttccggttgttaaaaagaccaaaacaggatattcaacagatgccgaggtattagaagagctgtatgataaacatgacataataccgcttattctggattatagaatgtatacgaaaatactgacaacttactgtcagggactggttcaggcaataaatcctgcaactggaagaattcataccaactttattcagacaggtacggcaactggaagacttgcaagtgcagagcccaatctgcaaaatattcctgtaaaatatgatgagggaaagctaataagaaaggcatttgttccagatgaaggttatgtgttgatagatgctgattattctcagattgagcttagaatacttgcacatatctctgaggatgaacgactgataaatgcttttaaaaataaccttgatattcattcacagacggcggcagagatctttggtgtggatataagtcaggttacaccaattatgcgaagccaggcaaaagcagttaactttggaattgtatatggtatatctgattatggactttcacgggatataaagatttcaagaaaagaagcagccgagtttattaatcgttattttgaaaagtatcccagagtaaaagaatatttggacaatgtcgtcaagtttgcccgtgaaaacggatttgttttgacaatatttaacaggaaaaggtatatcaaggatataaagtttactaataaaaacctgagaaactatgcagagagaatagcaatgaattcacctatccagggaagtgctgcagatattatgaaaatagcaatgataagagtttataaaaagctaaaagaaaacaatttaaaatcaagaattattctgcaggtccatgacgaacttttgattgaatcaccctatgaagagaaagagatagtaaaggaaatagtaaaatcggagatggaaaatgcggttttattgaaagttcctttggtagttgaagtgaaagaaggttcaaattggtatgaaacaaagtaaaggatcc

SEQ ID NO: 1610 - DNA, 2623 bp, Artificial Sequence
  Description of Artificial Sequence: Synthetic DNA sequence of Caldicellulosiruptor TOK13B DNA Polymerase S773P
atgaaatacctgctgccgaccgctgctgctggtctgctgctcctcgctgcccagccggcgatggccatggaatttgttatttttgatgggaatagtattctgtatagagctttttttgccttgccacagcttactacctcaacaggcatacctacaaatgctatatatggttttttgaatgtgctgttaaaatacttagattctgaaaaaccggattatgtagcagtagcttttgacaaaaaaggcagagctgtccgaaaaagtgaatatgaagaatacaaggctaacagaaaaccgatgccagattctcttcaggttcagataccttacgtaagagaaatacttgctgctctgaacattcctgtactgaaatgtgaagggtatgaagctgatgacgttataggcacacttgtaaatagatttaaagcccaggatttagagattgtgataataaccggagacagagatacacttcagttacttgataaaaatgtaattgtcaaaatagtcacaacaaggtttgacaggacaactgaagatttgtatgctgtagaaaatgtaaaagaaaaatatggtgtttttgcgcatcaggttgttgactataaagcattagtaggtgatgcgtcagacaatataccaggtgttaagggaattggagataaaactgccataaagctgttagaagagtaccagactctggagaatatatatcagaatctaaataacattaaaggagcgctaaaagagaagttggaatcaggaaaagacatggcatttttatcaaaaagactggctactatcatatgcgatttaccaattgaggtgaatcttgaagaattaaaaaccaaagaatgggacaaagaaagactttatcagattttacttcaacttgagtttaaaagctttattaaaagactgggcttttcagaagagattaactatgcaaggcagaactttcagctacctgaatttagtattaaagaacttcgtgatgtttcagcaatagggggcaaagaaatctatctattgtactcagatgaagaaggacttttttatatttatgaccatcaaacctcaaccatttttacaacttctgataaggaagctattaaagatcttttaacactccaaagcattcaaaaggttgtatatgatttaaaaaatatactccataaggtggactttgatgaagctaatcagataaaaaattgtaatgatgttatgttggcttcatatgttttggacagtacacgcagttcgtacgatttggaaacattgtttatttcttatctcaacactgatatagctgcaatcaaagagaatagatgggctggtgctacagttttattaagaaatctttgggatgaactttcaaaactcattgatttaaactcggcccaatacgtttatgagagcatagagatgcctcttgttcccattttatatgaaatggagaaaatcggttttaaggttgacaaaaacactttgcaggagtatacaaaagagattgagagcaagcttttaaagttggaatcacagatttatcaaatagccggtgaatggtttaacataaactcgccaaaacaactctcatatatattattcgaaaaactgaagcttccggttgttaaaaagaccaaaacaggatattcaacagatgccgaggtattagaagagctgtatgataaacatgacataataccgcttattctggattatagaatgtatacgaaaatactgacaacttactgtcagggactggttcaggcaataaatcctgcaactggaagaattcataccaactttattcagacaggtacggcaactggaagacttgcaagtgcagagcccaatctgcaaaatattcctgtaaaatatgatgagggaaagctaataagaaaggcatttgttccagatgaaggttatgtgttgatagatgctgattattctcagattgagcttagaatacttgcacatatctctgaggatgaacgactgataaatgcttttaaaaataaccttgatattcattcacagacggcggcagagatctttggtgtggatataagtcaggttacaccaattatgcgaagccaggcaaaagcagttaactttggaattgtatatggtatatctgattatggactttcacgggatataaagatttcaagaaaagaagcagccgagtttattaatcgttattttgaaaagtatcccagagtaaaagaatatttggacaatgtcgtcaagtttgcccgtgaaaacggatttgttttgacaatatttaacaggaaaaggtatatcaaggatataaagcctactaataaaaacctgagaaactatgcagagagaatagcaatgaattcacctatccagggaagtgctgcagatattatgaaaatagcaatgataagagtttataaaaagctaaaagaaaacaatttaaaatcaagaattattctgcaggtccatgacgaacttttgattgaatcaccctatgaagagaaagagatagtaaaggaaatagtaaaatcggagatggaaaatgcggttttattgaaagttcctttggtagttgaagtgaaagaaggttcaaattggtatgaaacaaagtaaaggatcc

SEQ ID NO: 1611 - DNA, 2623 bp, Artificial Sequence
  Description of Artificial Sequence: Synthetic DNA sequence of Caldicellulosiruptor TOK13B DNA Polymerase S773T
atgaaatacctgctgccgaccgctgctgctggtctgctgctcctcgctgcccagccggcgatggccatggaatttgttatttttgatgggaatagtattctgtatagagctttttttgccttgccacagcttactacctcaacaggcatacctacaaatgctatatatggttttttgaatgtgctgttaaaatacttagattctgaaaaaccggattatgtagcagtagcttttgacaaaaaaggcagagctgtccgaaaaagtgaatatgaagaatacaaggctaacagaaaaccgatgccagattctcttcaggttcagataccttacgtaagagaaatacttgctgctctgaacattcctgtactgaaatgtgaagggtatgaagctgatgacgttataggcacacttgtaaatagatttaaagcccaggatttagagattgtgataataaccggagacagagatacacttcagttacttgataaaaatgtaattgtcaaaatagtcacaacaaggtttgacaggacaactgaagatttgtatgctgtagaaaatgtaaaagaaaaatatggtgtttttgcgcatcaggttgttgactataaagcattagtaggtgatgcgtcagacaatataccaggtgttaagggaattggagataaaactgccataaagctgttagaagagtaccagactctggagaatatatatcagaatctaaataacattaaaggagcgctaaaagagaagttggaatcaggaaaagacatggcatttttatcaaaaagactggctactatcatatgcgatttaccaattgaggtgaatcttgaagaattaaaaaccaaagaatgggacaaagaaagactttatcagattttacttcaacttgagtttaaaagctttattaaaagactgggcttttcagaagagattaactatgcaaggcagaactttcagctacctgaatttagtattaaagaacttcgtgatgtttcagcaatagggggcaaagaaatctatctattgtactcagatgaagaaggacttttttatatttatgaccatcaaacctcaaccatttttacaacttctgataaggaagctattaaagatcttttaacactccaaagcattcaaaaggttgtatatgatttaaaaaatatactccataaggtggactttgatgaagctaatcagataaaaaattgtaatgatgttatgttggcttcatatgttttggacagtacacgcagttcgtacgatttggaaacattgtttatttcttatctcaacactgatatagctgcaatcaaagagaatagatgggctggtgctacagttttattaagaaatctttgggatgaactttcaaaactcattgatttaaactcggcccaatacgtttatgagagcatagagatgcctcttgttcccattttatatgaaatggagaaaatcggttttaaggttgacaaaaacactttgcaggagtatacaaaagagattgagagcaagcttttaaagttggaatcacagatttatcaaatagccggtgaatggtttaacataaactcgccaaaacaactctcatatatattattcgaaaaactgaagcttccggttgttaaaaagaccaaaacaggatattcaacagatgccgaggtattagaagagctgtatgataaacatgacataataccgcttattctggattatagaatgtatacgaaaatactgacaacttactgtcagggactggttcaggcaataaatcctgcaactggaagaattcataccaactttattcagacaggtacggcaactggaagacttgcaagtgcagagcccaatctgcaaaatattcctgtaaaatatgatgagggaaagctaataagaaaggcatttgttccagatgaaggttatgtgttgatagatgctgattattctcagattgagcttagaatacttgcacatatctctgaggatgaacgactgataaatgcttttaaaaataaccttgatattcattcacagacggcggcagagatctttggtgtggatataagtcaggttacaccaattatgcgaagccaggcaaaagcagttaactttggaattgtatatggtatatctgattatggactttcacgggatataaagatttcaagaaaagaagcagccgagtttattaatcgttattttgaaaagtatcccagagtaaaagaatatttggacaatgtcgtcaagtttgcccgtgaaaacggatttgttttgacaatatttaacaggaaaaggtatatcaaggatataaagactactaataaaaacctgagaaactatgcagagagaatagcaatgaattcacctatccagggaagtgctgcagatattatgaaaatagcaatgataagagtttataaaaagctaaaagaaaacaatttaaaatcaagaattattctgcaggtccatgacgaacttttgattgaatcaccctatgaagagaaagagatagtaaaggaaatagtaaaatcggagatggaaaatgcggttttattgaaagttcctttggtagttgaagtgaaagaaggttcaaattggtatgaaacaaagtaaaggatcc

SEQ ID NO: 1612 - DNA, 2623 bp, Artificial Sequence
  Description of Artificial Sequence: Synthetic DNA sequence of Caldicellulosiruptor TOK13B DNA Polymerase S773W
atgaaatacctgctgccgaccgctgctgctggtctgctgctcctcgctgcccagccggcgatggccatggaatttgttatttttgatgggaatagtattctgtatagagctttttttgccttgccacagcttactacctcaacaggcatacctacaaatgctatatatggttttttgaatgtgctgttaaaatacttagattctgaaaaaccggattatgtagcagtagcttttgacaaaaaaggcagagctgtccgaaaaagtgaatatgaagaatacaaggctaacagaaaaccgatgccagattctcttcaggttcagataccttacgtaagagaaatacttgctgctctgaacattcctgtactgaaatgtgaagggtatgaagctgatgacgttataggcacacttgtaaatagatttaaagcccaggatttagagattgtgataataaccggagacagagatacacttcagttacttgataaaaatgtaattgtcaaaatagtcacaacaaggtttgacaggacaactgaagatttgtatgctgtagaaaatgtaaaagaaaaatatggtgtttttgcgcatcaggttgttgactataaagcattagtaggtgatgcgtcagacaatataccaggtgttaagggaattggagataaaactgccataaagctgttagaagagtaccagactctggagaatatatatcagaatctaaataacattaaaggagcgctaaaagagaagttggaatcaggaaaagacatggcatttttatcaaaaagactggctactatcatatgcgatttaccaattgaggtgaatcttgaagaattaaaaaccaaagaatgggacaaagaaagactttatcagattttacttcaacttgagtttaaaagctttattaaaagactgggcttttcagaagagattaactatgcaaggcagaactttcagctacctgaatttagtattaaagaacttcgtgatgtttcagcaatagggggcaaagaaatctatctattgtactcagatgaagaaggacttttttatatttatgaccatcaaacctcaaccatttttacaacttctgataaggaagctattaaagatcttttaacactccaaagcattcaaaaggttgtatatgatttaaaaaatatactccataaggtggactttgatgaagctaatcagataaaaaattgtaatgatgttatgttggcttcatatgttttggacagtacacgcagttcgtacgatttggaaacattgtttatttcttatctcaacactgatatagctgcaatcaaagagaatagatgggctggtgctacagttttattaagaaatctttgggatgaactttcaaaactcattgatttaaactcggcccaatacgtttatgagagcatagagatgcctcttgttcccattttatatgaaatggagaaaatcggttttaaggttgacaaaaacactttgcaggagtatacaaaagagattgagagcaagcttttaaagttggaatcacagatttatcaaatagccggtgaatggtttaacataaactcgccaaaacaactctcatatatattattcgaaaaactgaagcttccggttgttaaaaagaccaaaacaggatattcaacagatgccgaggtattagaagagctgtatgataaacatgacataataccgcttattctggattatagaatgtatacgaaaatactgacaacttactgtcagggactggttcaggcaataaatcctgcaactggaagaattcataccaactttattcagacaggtacggcaactggaagacttgcaagtgcagagcccaatctgcaaaatattcctgtaaaatatgatgagggaaagctaataagaaaggcatttgttccagatgaaggttatgtgttgatagatgctgattattctcagattgagcttagaatacttgcacatatctctgaggatgaacgactgataaatgcttttaaaaataaccttgatattcattcacagacggcggcagagatctttggtgtggatataagtcaggttacaccaattatgcgaagccaggcaaaagcagttaactttggaattgtatatggtatatctgattatggactttcacgggatataaagatttcaagaaaagaagcagccgagtttattaatcgttattttgaaaagtatcccagagtaaaagaatatttggacaatgtcgtcaagtttgcccgtgaaaacggatttgttttgacaatatttaacaggaaaaggtatatcaaggatataaagtggactaataaaaacctgagaaactatgcagagagaatagcaatgaattcacctatccagggaagtgctgcagatattatgaaaatagcaatgataagagtttataaaaagctaaaagaaaacaatttaaaatcaagaattattctgcaggtccatgacgaacttttgattgaatcaccctatgaagagaaagagatagtaaaggaaatagtaaaatcggagatggaaaatgcggttttattgaaagttcctttggtagttgaagtgaaagaaggttcaaattggtatgaaacaaagtaaaggatcc

SEQ ID NO: 1613 - DNA, 2623 bp, Artificial Sequence
  Description of Artificial Sequence: Synthetic DNA sequence of Caldicellulosiruptor TOK13B DNA Polymerase S773Y
atgaaatacctgctgccgaccgctgctgctggtctgctgctcctcgctgcccagccggcgatggccatggaatttgttatttttgatgggaatagtattctgtatagagctttttttgccttgccacagcttactacctcaacaggcatacctacaaatgctatatatggttttttgaatgtgctgttaaaatacttagattctgaaaaaccggattatgtagcagtagcttttgacaaaaaaggcagagctgtccgaaaaagtgaatatgaagaatacaaggctaacagaaaaccgatgccagattctcttcaggttcagataccttacgtaagagaaatacttgctgctctgaacattcctgtactgaaatgtgaagggtatgaagctgatgacgttataggcacacttgtaaatagatttaaagcccaggatttagagattgtgataataaccggagacagagatacacttcagttacttgataaaaatgtaattgtcaaaatagtcacaacaaggtttgacaggacaactgaagatttgtatgctgtagaaaatgtaaaagaaaaatatggtgtttttgcgcatcaggttgttgactataaagcattagtaggtgatgcgtcagacaatataccaggtgttaagggaattggagataaaactgccataaagctgttagaagagtaccagactctggagaatatatatcagaatctaaataacattaaaggagcgctaaaagagaagttggaatcaggaaaagacatggcatttttatcaaaaagactggctactatcatatgcgatttaccaattgaggtgaatcttgaagaattaaaaaccaaagaatgggacaaagaaagactttatcagattttacttcaacttgagtttaaaagctttattaaaagactgggcttttcagaagagattaactatgcaaggcagaactttcagctacctgaatttagtattaaagaacttcgtgatgtttcagcaatagggggcaaagaaatctatctattgtactcagatgaagaaggacttttttatatttatgaccatcaaacctcaaccatttttacaacttctgataaggaagctattaaagatcttttaacactccaaagcattcaaaaggttgtatatgatttaaaaaatatactccataaggtggactttgatgaagctaatcagataaaaaattgtaatgatgttatgttggcttcatatgttttggacagtacacgcagttcgtacgatttggaaacattgtttatttcttatctcaacactgatatagctgcaatcaaagagaatagatgggctggtgctacagttttattaagaaatctttgggatgaactttcaaaactcattgatttaaactcggcccaatacgtttatgagagcatagagatgcctcttgttcccattttatatgaaatggagaaaatcggttttaaggttgacaaaaacactttgcaggagtatacaaaagagattgagagcaagcttttaaagttggaatcacagatttatcaaatagccggtgaatggtttaacataaactcgccaaaacaactctcatatatattattcgaaaaactgaagcttccggttgttaaaaagaccaaaacaggatattcaacagatgccgaggtattagaagagctgtatgataaacatgacataataccgcttattctggattatagaatgtatacgaaaatactgacaacttactgtcagggactggttcaggcaataaatcctgcaactggaagaattcataccaactttattcagacaggtacggcaactggaagacttgcaagtgcagagcccaatctgcaaaatattcctgtaaaatatgatgagggaaagctaataagaaaggcatttgttccagatgaaggttatgtgttgatagatgctgattattctcagattgagcttagaatacttgcacatatctctgaggatgaacgactgataaatgcttttaaaaataaccttgatattcattcacagacggcggcagagatctttggtgtggatataagtcaggttacaccaattatgcgaagccaggcaaaagcagttaactttggaattgtatatggtatatctgattatggactttcacgggatataaagatttcaagaaaagaagcagccgagtttattaatcgttattttgaaaagtatcccagagtaaaagaatatttggacaatgtcgtcaagtttgcccgtgaaaacggatttgttttgacaatatttaacaggaaaaggtatatcaaggatataaagtatactaataaaaacctgagaaactatgcagagagaatagcaatgaattcacctatccagggaagtgctgcagatattatgaaaatagcaatgataagagtttataaaaagctaaaagaaaacaatttaaaatcaagaattattctgcaggtccatgacgaacttttgattgaatcaccctatgaagagaaagagatagtaaaggaaatagtaaaatcggagatggaaaatgcggttttattgaaagttcctttggtagttgaagtgaaagaaggttcaaattggtatgaaacaaagtaaaggatcc

SEQ ID NO: 1614 - DNA, 2623 bp, Artificial Sequence
  Description of Artificial Sequence: Synthetic DNA sequence of Caldicellulosiruptor TOK13B DNA Polymerase S773V
atgaaatacctgctgccgaccgctgctgctggtctgctgctcctcgctgcccagccggcgatggccatggaatttgttatttttgatgggaatagtattctgtatagagctttttttgccttgccacagcttactacctcaacaggcatacctacaaatgctatatatggttttttgaatgtgctgttaaaatacttagattctgaaaaaccggattatgtagcagtagcttttgacaaaaaaggcagagctgtccgaaaaagtgaatatgaagaatacaaggctaacagaaaaccgatgccagattctcttcaggttcagataccttacgtaagagaaatacttgctgctctgaacattcctgtactgaaatgtgaagggtatgaagctgatgacgttataggcacacttgtaaatagatttaaagcccaggatttagagattgtgataataaccggagacagagatacacttcagttacttgataaaaatgtaattgtcaaaatagtcacaacaaggtttgacaggacaactgaagatttgtatgctgtagaaaatgtaaaagaaaaatatggtgtttttgcgcatcaggttgttgactataaagcattagtaggtgatgcgtcagacaatataccaggtgttaagggaattggagataaaactgccataaagctgttagaagagtaccagactctggagaatatatatcagaatctaaataacattaaaggagcgctaaaagagaagttggaatcaggaaaagacatggcatttttatcaaaaagactggctactatcatatgcgatttaccaattgaggtgaatcttgaagaattaaaaaccaaagaatgggacaaagaaagactttatcagattttacttcaacttgagtttaaaagctttattaaaagactgggcttttcagaagagattaactatgcaaggcagaactttcagctacctgaatttagtattaaagaacttcgtgatgtttcagcaatagggggcaaagaaatctatctattgtactcagatgaagaaggacttttttatatttatgaccatcaaacctcaaccatttttacaacttctgataaggaagctattaaagatcttttaacactccaaagcattcaaaaggttgtatatgatttaaaaaatatactccataaggtggactttgatgaagctaatcagataaaaaattgtaatgatgttatgttggcttcatatgttttggacagtacacgcagttcgtacgatttggaaacattgtttatttcttatctcaacactgatatagctgcaatcaaagagaatagatgggctggtgctacagttttattaagaaatctttgggatgaactttcaaaactcattgatttaaactcggcccaatacgtttatgagagcatagagatgcctcttgttcccattttatatgaaatggagaaaatcggttttaaggttgacaaaaacactttgcaggagtatacaaaagagattgagagcaagcttttaaagttggaatcacagatttatcaaatagccggtgaatggtttaacataaactcgccaaaacaactctcatatatattattcgaaaaactgaagcttccggttgttaaaaagaccaaaacaggatattcaacagatgccgaggtattagaagagctgtatgataaacatgacataataccgcttattctggattatagaatgtatacgaaaatactgacaacttactgtcagggactggttcaggcaataaatcctgcaactggaagaattcataccaactttattcagacaggtacggcaactggaagacttgcaagtgcagagcccaatctgcaaaatattcctgtaaaatatgatgagggaaagctaataagaaaggcatttgttccagatgaaggttatgtgttgatagatgctgattattctcagattgagcttagaatacttgcacatatctctgaggatgaacgactgataaatgcttttaaaaataaccttgatattcattcacagacggcggcagagatctttggtgtggatataagtcaggttacaccaattatgcgaagccaggcaaaagcagttaactttggaattgtatatggtatatctgattatggactttcacgggatataaagatttcaagaaaagaagcagccgagtttattaatcgttattttgaaaagtatcccagagtaaaagaatatttggacaatgtcgtcaagtttgcccgtgaaaacggatttgttttgacaatatttaacaggaaaaggtatatcaaggatataaaggttactaataaaaacctgagaaactatgcagagagaatagcaatgaattcacctatccagggaagtgctgcagatattatgaaaatagcaatgataagagtttataaaaagctaaaagaaaacaatttaaaatcaagaattattctgcaggtccatgacgaacttttgattgaatcaccctatgaagagaaagagatagtaaaggaaatagtaaaatcggagatggaaaatgcggttttattgaaagttcctttggtagttgaagtgaaagaaggttcaaattggtatgaaacaaagtaaaggatcc

SEQ ID NO: 1615 - DNA, 2623 bp, Artificial Sequence
  Description of Artificial Sequence: Synthetic DNA sequence of Caldicellulosiruptor TOK13B DNA Polymerase T774A
atgaaatacctgctgccgaccgctgctgctggtctgctgctcctcgctgcccagccggcgatggccatggaatttgttatttttgatgggaatagtattctgtatagagctttttttgccttgccacagcttactacctcaacaggcatacctacaaatgctatatatggttttttgaatgtgctgttaaaatacttagattctgaaaaaccggattatgtagcagtagcttttgacaaaaaaggcagagctgtccgaaaaagtgaatatgaagaatacaaggctaacagaaaaccgatgccagattctcttcaggttcagataccttacgtaagagaaatacttgctgctctgaacattcctgtactgaaatgtgaagggtatgaagctgatgacgttataggcacacttgtaaatagatttaaagcccaggatttagagattgtgataataaccggagacagagatacacttcagttacttgataaaaatgtaattgtcaaaatagtcacaacaaggtttgacaggacaactgaagatttgtatgctgtagaaaatgtaaaagaaaaatatggtgtttttgcgcatcaggttgttgactataaagcattagtaggtgatgcgtcagacaatataccaggtgttaagggaattggagataaaactgccataaagctgttagaagagtaccagactctggagaatatatatcagaatctaaataacattaaaggagcgctaaaagagaagttggaatcaggaaaagacatggcatttttatcaaaaagactggctactatcatatgcgatttaccaattgaggtgaatcttgaagaattaaaaaccaaagaatgggacaaagaaagactttatcagattttacttcaacttgagtttaaaagctttattaaaagactgggcttttcagaagagattaactatgcaaggcagaactttcagctacctgaatttagtattaaagaacttcgtgatgtttcagcaatagggggcaaagaaatctatctattgtactcagatgaagaaggacttttttatatttatgaccatcaaacctcaaccatttttacaacttctgataaggaagctattaaagatcttttaacactccaaagcattcaaaaggttgtatatgatttaaaaaatatactccataaggtggactttgatgaagctaatcagataaaaaattgtaatgatgttatgttggcttcatatgttttggacagtacacgcagttcgtacgatttggaaacattgtttatttcttatctcaacactgatatagctgcaatcaaagagaatagatgggctggtgctacagttttattaagaaatctttgggatgaactttcaaaactcattgatttaaactcggcccaatacgtttatgagagcatagagatgcctcttgttcccattttatatgaaatggagaaaatcggttttaaggttgacaaaaacactttgcaggagtatacaaaagagattgagagcaagcttttaaagttggaatcacagatttatcaaatagccggtgaatggtttaacataaactcgccaaaacaactctcatatatattattcgaaaaactgaagcttccggttgttaaaaagaccaaaacaggatattcaacagatgccgaggtattagaagagctgtatgataaacatgacataataccgcttattctggattatagaatgtatacgaaaatactgacaacttactgtcagggactggttcaggcaataaatcctgcaactggaagaattcataccaactttattcagacaggtacggcaactggaagacttgcaagtgcagagcccaatctgcaaaatattcctgtaaaatatgatgagggaaagctaataagaaaggcatttgttccagatgaaggttatgtgttgatagatgctgattattctcagattgagcttagaatacttgcacatatctctgaggatgaacgactgataaatgcttttaaaaataaccttgatattcattcacagacggcggcagagatctttggtgtggatataagtcaggttacaccaattatgcgaagccaggcaaaagcagttaactttggaattgtatatggtatatctgattatggactttcacgggatataaagatttcaagaaaagaagcagccgagtttattaatcgttattttgaaaagtatcccagagtaaaagaatatttggacaatgtcgtcaagtttgcccgtgaaaacggatttgttttgacaatatttaacaggaaaaggtatatcaaggatataaagtctgctaataaaaacctgagaaactatgcagagagaatagcaatgaattcacctatccagggaagtgctgcagatattatgaaaatagcaatgataagagtttataaaaagctaaaagaaaacaatttaaaatcaagaattattctgcaggtccatgacgaacttttgattgaatcaccctatgaagagaaagagatagtaaaggaaatagtaaaatcggagatggaaaatgcggttttattgaaagttcctttggtagttgaagtgaaagaaggttcaaattggtatgaaacaaagtaaaggatcc

SEQ ID NO: 1616 - DNA, 2623 bp, Artificial Sequence
  Description of Artificial Sequence: Synthetic DNA sequence of Caldicellulosiruptor TOK13B DNA Polymerase T774R
atgaaatacctgctgccgaccgctgctgctggtctgctgctcctcgctgcccagccggcgatggccatggaatttgttatttttgatgggaatagtattctgtatagagctttttttgccttgccacagcttactacctcaacaggcatacctacaaatgctatatatggttttttgaatgtgctgttaaaatacttagattctgaaaaaccggattatgtagcagtagcttttgacaaaaaaggcagagctgtccgaaaaagtgaatatgaagaatacaaggctaacagaaaaccgatgccagattctcttcaggttcagataccttacgtaagagaaatacttgctgctctgaacattcctgtactgaaatgtgaagggtatgaagctgatgacgttataggcacacttgtaaatagatttaaagcccaggatttagagattgtgataataaccggagacagagatacacttcagttacttgataaaaatgtaattgtcaaaatagtcacaacaaggtttgacaggacaactgaagatttgtatgctgtagaaaatgtaaaagaaaaatatggtgtttttgcgcatcaggttgttgactataaagcattagtaggtgatgcgtcagacaatataccaggtgttaagggaattggagataaaactgccataaagctgttagaagagtaccagactctggagaatatatatcagaatctaaataacattaaaggagcgctaaaagagaagttggaatcaggaaaagacatggcatttttatcaaaaagactggctactatcatatgcgatttaccaattgaggtgaatcttgaagaattaaaaaccaaagaatgggacaaagaaagactttatcagattttacttcaacttgagtttaaaagctttattaaaagactgggcttttcagaagagattaactatgcaaggcagaactttcagctacctgaatttagtattaaagaacttcgtgatgtttcagcaatagggggcaaagaaatctatctattgtactcagatgaagaaggacttttttatatttatgaccatcaaacctcaaccatttttacaacttctgataaggaagctattaaagatcttttaacactccaaagcattcaaaaggttgtatatgatttaaaaaatatactccataaggtggactttgatgaagctaatcagataaaaaattgtaatgatgttatgttggcttcatatgttttggacagtacacgcagttcgtacgatttggaaacattgtttatttcttatctcaacactgatatagctgcaatcaaagagaatagatgggctggtgctacagttttattaagaaatctttgggatgaactttcaaaactcattgatttaaactcggcccaatacgtttatgagagcatagagatgcctcttgttcccattttatatgaaatggagaaaatcggttttaaggttgacaaaaacactttgcaggagtatacaaaagagattgagagcaagcttttaaagttggaatcacagatttatcaaatagccggtgaatggtttaacataaactcgccaaaacaactctcatatatattattcgaaaaactgaagcttccggttgttaaaaagaccaaaacaggatattcaacagatgccgaggtattagaagagctgtatgataaacatgacataataccgcttattctggattatagaatgtatacgaaaatactgacaacttactgtcagggactggttcaggcaataaatcctgcaactggaagaattcataccaactttattcagacaggtacggcaactggaagacttgcaagtgcagagcccaatctgcaaaatattcctgtaaaatatgatgagggaaagctaataagaaaggcatttgttccagatgaaggttatgtgttgatagatgctgattattctcagattgagcttagaatacttgcacatatctctgaggatgaacgactgataaatgcttttaaaaataaccttgatattcattcacagacggcggcagagatctttggtgtggatataagtcaggttacaccaattatgcgaagccaggcaaaagcagttaactttggaattgtatatggtatatctgattatggactttcacgggatataaagatttcaagaaaagaagcagccgagtttattaatcgttattttgaaaagtatcccagagtaaaagaatatttggacaatgtcgtcaagtttgcccgtgaaaacggatttgttttgacaatatttaacaggaaaaggtatatcaaggatataaagtctcgtaataaaaacctgagaaactatgcagagagaatagcaatgaattcacctatccagggaagtgctgcagatattatgaaaatagcaatgataagagtttataaaaagctaaaagaaaacaatttaaaatcaagaattattctgcaggtccatgacgaacttttgattgaatcaccctatgaagagaaagagatagtaaaggaaatagtaaaatcggagatggaaaatgcggttttattgaaagttcctttggtagttgaagtgaaagaaggttcaaattggtatgaaacaaagtaaaggatcc

SEQ ID NO: 1617 - DNA, 2623 bp, Artificial Sequence
  Description of Artificial Sequence: Synthetic DNA sequence of Caldicellulosiruptor TOK13B DNA Polymerase T774N
atgaaatacctgctgccgaccgctgctgctggtctgctgctcctcgctgcccagccggcgatggccatggaatttgttatttttgatgggaatagtattctgtatagagctttttttgccttgccacagcttactacctcaacaggcatacctacaaatgctatatatggttttttgaatgtgctgttaaaatacttagattctgaaaaaccggattatgtagcagtagcttttgacaaaaaaggcagagctgtccgaaaaagtgaatatgaagaatacaaggctaacagaaaaccgatgccagattctcttcaggttcagataccttacgtaagagaaatacttgctgctctgaacattcctgtactgaaatgtgaagggtatgaagctgatgacgttataggcacacttgtaaatagatttaaagcccaggatttagagattgtgataataaccggagacagagatacacttcagttacttgataaaaatgtaattgtcaaaatagtcacaacaaggtttgacaggacaactgaagatttgtatgctgtagaaaatgtaaaagaaaaatatggtgtttttgcgcatcaggttgttgactataaagcattagtaggtgatgcgtcagacaatataccaggtgttaagggaattggagataaaactgccataaagctgttagaagagtaccagactctggagaatatatatcagaatctaaataacattaaaggagcgctaaaagagaagttggaatcaggaaaagacatggcatttttatcaaaaagactggctactatcatatgcgatttaccaattgaggtgaatcttgaagaattaaaaaccaaagaatgggacaaagaaagactttatcagattttacttcaacttgagtttaaaagctttattaaaagactgggcttttcagaagagattaactatgcaaggcagaactttcagctacctgaatttagtattaaagaacttcgtgatgtttcagcaatagggggcaaagaaatctatctattgtactcagatgaagaaggacttttttatatttatgaccatcaaacctcaaccatttttacaacttctgataaggaagctattaaagatcttttaacactccaaagcattcaaaaggttgtatatgatttaaaaaatatactccataaggtggactttgatgaagctaatcagataaaaaattgtaatgatgttatgttggcttcatatgttttggacagtacacgcagttcgtacgatttggaaacattgtttatttcttatctcaacactgatatagctgcaatcaaagagaatagatgggctggtgctacagttttattaagaaatctttgggatgaactttcaaaactcattgatttaaactcggcccaatacgtttatgagagcatagagatgcctcttgttcccattttatatgaaatggagaaaatcggttttaaggttgacaaaaacactttgcaggagtatacaaaagagattgagagcaagcttttaaagttggaatcacagatttatcaaatagccggtgaatggtttaacataaactcgccaaaacaactctcatatatattattcgaaaaactgaagcttccggttgttaaaaagaccaaaacaggatattcaacagatgccgaggtattagaagagctgtatgataaacatgacataataccgcttattctggattatagaatgtatacgaaaatactgacaacttactgtcagggactggttcaggcaataaatcctgcaactggaagaattcataccaactttattcagacaggtacggcaactggaagacttgcaagtgcagagcccaatctgcaaaatattcctgtaaaatatgatgagggaaagctaataagaaaggcatttgttccagatgaaggttatgtgttgatagatgctgattattctcagattgagcttagaatacttgcacatatctctgaggatgaacgactgataaatgcttttaaaaataaccttgatattcattcacagacggcggcagagatctttggtgtggatataagtcaggttacaccaattatgcgaagccaggcaaaagcagttaactttggaattgtatatggtatatctgattatggactttcacgggatataaagatttcaagaaaagaagcagccgagtttattaatcgttattttgaaaagtatcccagagtaaaagaatatttggacaatgtcgtcaagtttgcccgtgaaaacggatttgttttgacaatatttaacaggaaaaggtatatcaaggatataaagtctaataataaaaacctgagaaactatgcagagagaatagcaatgaattcacctatccagggaagtgctgcagatattatgaaaatagcaatgataagagtttataaaaagctaaaagaaaacaatttaaaatcaagaattattctgcaggtccatgacgaacttttgattgaatcaccctatgaagagaaagagatagtaaaggaaatagtaaaatcggagatggaaaatgcggttttattgaaagttcctttggtagttgaagtgaaagaaggttcaaattggtatgaaacaaagtaaaggatcc

SEQ ID NO: 1618 - DNA, 2623 bp, Artificial Sequence
  Description of Artificial Sequence: Synthetic DNA sequence of Caldicellulosiruptor TOK13B DNA Polymerase T774D
atgaaatacctgctgccgaccgctgctgctggtctgctgctcctcgctgcccagccggcgatggccatggaatttgttatttttgatgggaatagtattctgtatagagctttttttgccttgccacagcttactacctcaacaggcatacctacaaatgctatatatggttttttgaatgtgctgttaaaatacttagattctgaaaaaccggattatgtagcagtagcttttgacaaaaaaggcagagctgtccgaaaaagtgaatatgaagaatacaaggctaacagaaaaccgatgccagattctcttcaggttcagataccttacgtaagagaaatacttgctgctctgaacattcctgtactgaaatgtgaagggtatgaagctgatgacgttataggcacacttgtaaatagatttaaagcccaggatttagagattgtgataataaccggagacagagatacacttcagttacttgataaaaatgtaattgtcaaaatagtcacaacaaggtttgacaggacaactgaagatttgtatgctgtagaaaatgtaaaagaaaaatatggtgtttttgcgcatcaggttgttgactataaagcattagtaggtgatgcgtcagacaatataccaggtgttaagggaattggagataaaactgccataaagctgttagaagagtaccagactctggagaatatatatcagaatctaaataacattaaaggagcgctaaaagagaagttggaatcaggaaaagacatggcatttttatcaaaaagactggctactatcatatgcgatttaccaattgaggtgaatcttgaagaattaaaaaccaaagaatgggacaaagaaagactttatcagattttacttcaacttgagtttaaaagctttattaaaagactgggcttttcagaagagattaactatgcaaggcagaactttcagctacctgaatttagtattaaagaacttcgtgatgtttcagcaatagggggcaaagaaatctatctattgtactcagatgaagaaggacttttttatatttatgaccatcaaacctcaaccatttttacaacttctgataaggaagctattaaagatcttttaacactccaaagcattcaaaaggttgtatatgatttaaaaaatatactccataaggtggactttgatgaagctaatcagataaaaaattgtaatgatgttatgttggcttcatatgttttggacagtacacgcagttcgtacgatttggaaacattgtttatttcttatctcaacactgatatagctgcaatcaaagagaatagatgggctggtgctacagttttattaagaaatctttgggatgaactttcaaaactcattgatttaaactcggcccaatacgtttatgagagcatagagatgcctcttgttcccattttatatgaaatggagaaaatcggttttaaggttgacaaaaacactttgcaggagtatacaaaagagattgagagcaagcttttaaagttggaatcacagatttatcaaatagccggtgaatggtttaacataaactcgccaaaacaactctcatatatattattcgaaaaactgaagcttccggttgttaaaaagaccaaaacaggatattcaacagatgccgaggtattagaagagctgtatgataaacatgacataataccgcttattctggattatagaatgtatacgaaaatactgacaacttactgtcagggactggttcaggcaataaatcctgcaactggaagaattcataccaactttattcagacaggtacggcaactggaagacttgcaagtgcagagcccaatctgcaaaatattcctgtaaaatatgatgagggaaagctaataagaaaggcatttgttccagatgaaggttatgtgttgatagatgctgattattctcagattgagcttagaatacttgcacatatctctgaggatgaacgactgataaatgcttttaaaaataaccttgatattcattcacagacggcggcagagatctttggtgtggatataagtcaggttacaccaattatgcgaagccaggcaaaagcagttaactttggaattgtatatggtatatctgattatggactttcacgggatataaagatttcaagaaaagaagcagccgagtttattaatcgttattttgaaaagtatcccagagtaaaagaatatttggacaatgtcgtcaagtttgcccgtgaaaacggatttgttttgacaatatttaacaggaaaaggtatatcaaggatataaagtctgataataaaaacctgagaaactatgcagagagaatagcaatgaattcacctatccagggaagtgctgcagatattatgaaaatagcaatgataagagtttataaaaagctaaaagaaaacaatttaaaatcaagaattattctgcaggtccatgacgaacttttgattgaatcaccctatgaagagaaagagatagtaaaggaaatagtaaaatcggagatggaaaatgcggttttattgaaagttcctttggtagttgaagtgaaagaaggttcaaattggtatgaaacaaagtaaaggatcc

SEQ ID NO: 1619 - DNA, 2623 bp, Artificial Sequence
  Description of Artificial Sequence: Synthetic DNA sequence of Caldicellulosiruptor TOK13B DNA Polymerase T774C
atgaaatacctgctgccgaccgctgctgctggtctgctgctcctcgctgcccagccggcgatggccatggaatttgttatttttgatgggaatagtattctgtatagagctttttttgccttgccacagcttactacctcaacaggcatacctacaaatgctatatatggttttttgaatgtgctgttaaaatacttagattctgaaaaaccggattatgtagcagtagcttttgacaaaaaaggcagagctgtccgaaaaagtgaatatgaagaatacaaggctaacagaaaaccgatgccagattctcttcaggttcagataccttacgtaagagaaatacttgctgctctgaacattcctgtactgaaatgtgaagggtatgaagctgatgacgttataggcacacttgtaaatagatttaaagcccaggatttagagattgtgataataaccggagacagagatacacttcagttacttgataaaaatgtaattgtcaaaatagtcacaacaaggtttgacaggacaactgaagatttgtatgctgtagaaaatgtaaaagaaaaatatggtgtttttgcgcatcaggttgttgactataaagcattagtaggtgatgcgtcagacaatataccaggtgttaagggaattggagataaaactgccataaagctgttagaagagtaccagactctggagaatatatatcagaatctaaataacattaaaggagcgctaaaagagaagttggaatcaggaaaagacatggcatttttatcaaaaagactggctactatcatatgcgatttaccaattgaggtgaatcttgaagaattaaaaaccaaagaatgggacaaagaaagactttatcagattttacttcaacttgagtttaaaagctttattaaaagactgggcttttcagaagagattaactatgcaaggcagaactttcagctacctgaatttagtattaaagaacttcgtgatgtttcagcaatagggggcaaagaaatctatctattgtactcagatgaagaaggacttttttatatttatgaccatcaaacctcaaccatttttacaacttctgataaggaagctattaaagatcttttaacactccaaagcattcaaaaggttgtatatgatttaaaaaatatactccataaggtggactttgatgaagctaatcagataaaaaattgtaatgatgttatgttggcttcatatgttttggacagtacacgcagttcgtacgatttggaaacattgtttatttcttatctcaacactgatatagctgcaatcaaagagaatagatgggctggtgctacagttttattaagaaatctttgggatgaactttcaaaactcattgatttaaactcggcccaatacgtttatgagagcatagagatgcctcttgttcccattttatatgaaatggagaaaatcggttttaaggttgacaaaaacactttgcaggagtatacaaaagagattgagagcaagcttttaaagttggaatcacagatttatcaaatagccggtgaatggtttaacataaactcgccaaaacaactctcatatatattattcgaaaaactgaagcttccggttgttaaaaagaccaaaacaggatattcaacagatgccgaggtattagaagagctgtatgataaacatgacataataccgcttattctggattatagaatgtatacgaaaatactgacaacttactgtcagggactggttcaggcaataaatcctgcaactggaagaattcataccaactttattcagacaggtacggcaactggaagacttgcaagtgcagagcccaatctgcaaaatattcctgtaaaatatgatgagggaaagctaataagaaaggcatttgttccagatgaaggttatgtgttgatagatgctgattattctcagattgagcttagaatacttgcacatatctctgaggatgaacgactgataaatgcttttaaaaataaccttgatattcattcacagacggcggcagagatctttggtgtggatataagtcaggttacaccaattatgcgaagccaggcaaaagcagttaactttggaattgtatatggtatatctgattatggactttcacgggatataaagatttcaagaaaagaagcagccgagtttattaatcgttattttgaaaagtatcccagagtaaaagaatatttggacaatgtcgtcaagtttgcccgtgaaaacggatttgttttgacaatatttaacaggaaaaggtatatcaaggatataaagtcttgtaataaaaacctgagaaactatgcagagagaatagcaatgaattcacctatccagggaagtgctgcagatattatgaaaatagcaatgataagagtttataaaaagctaaaagaaaacaatttaaaatcaagaattattctgcaggtccatgacgaacttttgattgaatcaccctatgaagagaaagagatagtaaaggaaatagtaaaatcggagatggaaaatgcggttttattgaaagttcctttggtagttgaagtgaaagaaggttcaaattggtatgaaacaaagtaaaggatcc

SEQ ID NO: 1620 - DNA, 2623 bp, Artificial Sequence
  Description of Artificial Sequence: Synthetic DNA sequence of Caldicellulosiruptor TOK13B DNA Polymerase T774E
atgaaatacctgctgccgaccgctgctgctggtctgctgctcctcgctgcccagccggcgatggccatggaatttgttatttttgatgggaatagtattctgtatagagctttttttgccttgccacagcttactacctcaacaggcatacctacaaatgctatatatggttttttgaatgtgctgttaaaatacttagattctgaaaaaccggattatgtagcagtagcttttgacaaaaaaggcagagctgtccgaaaaagtgaatatgaagaatacaaggctaacagaaaaccgatgccagattctcttcaggttcagataccttacgtaagagaaatacttgctgctctgaacattcctgtactgaaatgtgaagggtatgaagctgatgacgttataggcacacttgtaaatagatttaaagcccaggatttagagattgtgataataaccggagacagagatacacttcagttacttgataaaaatgtaattgtcaaaatagtcacaacaaggtttgacaggacaactgaagatttgtatgctgtagaaaatgtaaaagaaaaatatggtgtttttgcgcatcaggttgttgactataaagcattagtaggtgatgcgtcagacaatataccaggtgttaagggaattggagataaaactgccataaagctgttagaagagtaccagactctggagaatatatatcagaatctaaataacattaaaggagcgctaaaagagaagttggaatcaggaaaagacatggcatttttatcaaaaagactggctactatcatatgcgatttaccaattgaggtgaatcttgaagaattaaaaaccaaagaatgggacaaagaaagactttatcagattttacttcaacttgagtttaaaagctttattaaaagactgggcttttcagaagagattaactatgcaaggcagaactttcagctacctgaatttagtattaaagaacttcgtgatgtttcagcaatagggggcaaagaaatctatctattgtactcagatgaagaaggacttttttatatttatgaccatcaaacctcaaccatttttacaacttctgataaggaagctattaaagatcttttaacactccaaagcattcaaaaggttgtatatgatttaaaaaatatactccataaggtggactttgatgaagctaatcagataaaaaattgtaatgatgttatgttggcttcatatgttttggacagtacacgcagttcgtacgatttggaaacattgtttatttcttatctcaacactgatatagctgcaatcaaagagaatagatgggctggtgctacagttttattaagaaatctttgggatgaactttcaaaactcattgatttaaactcggcccaatacgtttatgagagcatagagatgcctcttgttcccattttatatgaaatggagaaaatcggttttaaggttgacaaaaacactttgcaggagtatacaaaagagattgagagcaagcttttaaagttggaatcacagatttatcaaatagccggtgaatggtttaacataaactcgccaaaacaactctcatatatattattcgaaaaactgaagcttccggttgttaaaaagaccaaaacaggatattcaacagatgccgaggtattagaagagctgtatgataaacatgacataataccgcttattctggattatagaatgtatacgaaaatactgacaacttactgtcagggactggttcaggcaataaatcctgcaactggaagaattcataccaactttattcagacaggtacggcaactggaagacttgcaagtgcagagcccaatctgcaaaatattcctgtaaaatatgatgagggaaagctaataagaaaggcatttgttccagatgaaggttatgtgttgatagatgctgattattctcagattgagcttagaatacttgcacatatctctgaggatgaacgactgataaatgcttttaaaaataaccttgatattcattcacagacggcggcagagatctttggtgtggatataagtcaggttacaccaattatgcgaagccaggcaaaagcagttaactttggaattgtatatggtatatctgattatggactttcacgggatataaagatttcaagaaaagaagcagccgagtttattaatcgttattttgaaaagtatcccagagtaaaagaatatttggacaatgtcgtcaagtttgcccgtgaaaacggatttgttttgacaatatttaacaggaaaaggtatatcaaggatataaagtctgaaaataaaaacctgagaaactatgcagagagaatagcaatgaattcacctatccagggaagtgctgcagatattatgaaaatagcaatgataagagtttataaaaagctaaaagaaaacaatttaaaatcaagaattattctgcaggtccatgacgaacttttgattgaatcaccctatgaagagaaagagatagtaaaggaaatagtaaaatcggagatggaaaatgcggttttattgaaagttcctttggtagttgaagtgaaagaaggttcaaattggtatgaaacaaagtaaaggatcc

SEQ ID NO: 1621 - DNA, 2623 bp, Artificial Sequence
  Description of Artificial Sequence: Synthetic DNA sequence of Caldicellulosiruptor TOK13B DNA Polymerase T774Q
atgaaatacctgctgccgaccgctgctgctggtctgctgctcctcgctgcccagccggcgatggccatggaatttgttatttttgatgggaatagtattctgtatagagctttttttgccttgccacagcttactacctcaacaggcatacctacaaatgctatatatggttttttgaatgtgctgttaaaatacttagattctgaaaaaccggattatgtagcagtagcttttgacaaaaaaggcagagctgtccgaaaaagtgaatatgaagaatacaaggctaacagaaaaccgatgccagattctcttcaggttcagataccttacgtaagagaaatacttgctgctctgaacattcctgtactgaaatgtgaagggtatgaagctgatgacgttataggcacacttgtaaatagatttaaagcccaggatttagagattgtgataataaccggagacagagatacacttcagttacttgataaaaatgtaattgtcaaaatagtcacaacaaggtttgacaggacaactgaagatttgtatgctgtagaaaatgtaaaagaaaaatatggtgtttttgcgcatcaggttgttgactataaagcattagtaggtgatgcgtcagacaatataccaggtgttaagggaattggagataaaactgccataaagctgttagaagagtaccagactctggagaatatatatcagaatctaaataacattaaaggagcgctaaaagagaagttggaatcaggaaaagacatggcatttttatcaaaaagactggctactatcatatgcgatttaccaattgaggtgaatcttgaagaattaaaaaccaaagaatgggacaaagaaagactttatcagattttacttcaacttgagtttaaaagctttattaaaagactgggcttttcagaagagattaactatgcaaggcagaactttcagctacctgaatttagtattaaagaacttcgtgatgtttcagcaatagggggcaaagaaatctatctattgtactcagatgaagaaggacttttttatatttatgaccatcaaacctcaaccatttttacaacttctgataaggaagctattaaagatcttttaacactccaaagcattcaaaaggttgtatatgatttaaaaaatatactccataaggtggactttgatgaagctaatcagataaaaaattgtaatgatgttatgttggcttcatatgttttggacagtacacgcagttcgtacgatttggaaacattgtttatttcttatctcaacactgatatagctgcaatcaaagagaatagatgggctggtgctacagttttattaagaaatctttgggatgaactttcaaaactcattgatttaaactcggcccaatacgtttatgagagcatagagatgcctcttgttcccattttatatgaaatggagaaaatcggttttaaggttgacaaaaacactttgcaggagtatacaaaagagattgagagcaagcttttaaagttggaatcacagatttatcaaatagccggtgaatggtttaacataaactcgccaaaacaactctcatatatattattcgaaaaactgaagcttccggttgttaaaaagaccaaaacaggatattcaacagatgccgaggtattagaagagctgtatgataaacatgacataataccgcttattctggattatagaatgtatacgaaaatactgacaacttactgtcagggactggttcaggcaataaatcctgcaactggaagaattcataccaactttattcagacaggtacggcaactggaagacttgcaagtgcagagcccaatctgcaaaatattcctgtaaaatatgatgagggaaagctaataagaaaggcatttgttccagatgaaggttatgtgttgatagatgctgattattctcagattgagcttagaatacttgcacatatctctgaggatgaacgactgataaatgcttttaaaaataaccttgatattcattcacagacggcggcagagatctttggtgtggatataagtcaggttacaccaattatgcgaagccaggcaaaagcagttaactttggaattgtatatggtatatctgattatggactttcacgggatataaagatttcaagaaaagaagcagccgagtttattaatcgttattttgaaaagtatcccagagtaaaagaatatttggacaatgtcgtcaagtttgcccgtgaaaacggatttgttttgacaatatttaacaggaaaaggtatatcaaggatataaagtctcaaaataaaaacctgagaaactatgcagagagaatagcaatgaattcacctatccagggaagtgctgcagatattatgaaaatagcaatgataagagtttataaaaagctaaaagaaaacaatttaaaatcaagaattattctgcaggtccatgacgaacttttgattgaatcaccctatgaagagaaagagatagtaaaggaaatagtaaaatcggagatggaaaatgcggttttattgaaagttcctttggtagttgaagtgaaagaaggttcaaattggtatgaaacaaagtaaaggatcc

SEQ ID NO: 1622 - DNA, 2623 bp, Artificial Sequence
  Description of Artificial Sequence: Synthetic DNA sequence of Caldicellulosiruptor TOK13B DNA Polymerase T774G
atgaaatacctgctgccgaccgctgctgctggtctgctgctcctcgctgcccagccggcgatggccatggaatttgttatttttgatgggaatagtattctgtatagagctttttttgccttgccacagcttactacctcaacaggcatacctacaaatgctatatatggttttttgaatgtgctgttaaaatacttagattctgaaaaaccggattatgtagcagtagcttttgacaaaaaaggcagagctgtccgaaaaagtgaatatgaagaatacaaggctaacagaaaaccgatgccagattctcttcaggttcagataccttacgtaagagaaatacttgctgctctgaacattcctgtactgaaatgtgaagggtatgaagctgatgacgttataggcacacttgtaaatagatttaaagcccaggatttagagattgtgataataaccggagacagagatacacttcagttacttgataaaaatgtaattgtcaaaatagtcacaacaaggtttgacaggacaactgaagatttgtatgctgtagaaaatgtaaaagaaaaatatggtgtttttgcgcatcaggttgttgactataaagcattagtaggtgatgcgtcagacaatataccaggtgttaagggaattggagataaaactgccataaagctgttagaagagtaccagactctggagaatatatatcagaatctaaataacattaaaggagcgctaaaagagaagttggaatcaggaaaagacatggcatttttatcaaaaagactggctactatcatatgcgatttaccaattgaggtgaatcttgaagaattaaaaaccaaagaatgggacaaagaaagactttatcagattttacttcaacttgagtttaaaagctttattaaaagactgggcttttcagaagagattaactatgcaaggcagaactttcagctacctgaatttagtattaaagaacttcgtgatgtttcagcaatagggggcaaagaaatctatctattgtactcagatgaagaaggacttttttatatttatgaccatcaaacctcaaccatttttacaacttctgataaggaagctattaaagatcttttaacactccaaagcattcaaaaggttgtatatgatttaaaaaatatactccataaggtggactttgatgaagctaatcagataaaaaattgtaatgatgttatgttggcttcatatgttttggacagtacacgcagttcgtacgatttggaaacattgtttatttcttatctcaacactgatatagctgcaatcaaagagaatagatgggctggtgctacagttttattaagaaatctttgggatgaactttcaaaactcattgatttaaactcggcccaatacgtttatgagagcatagagatgcctcttgttcccattttatatgaaatggagaaaatcggttttaaggttgacaaaaacactttgcaggagtatacaaaagagattgagagcaagcttttaaagttggaatcacagatttatcaaatagccggtgaatggtttaacataaactcgccaaaacaactctcatatatattattcgaaaaactgaagcttccggttgttaaaaagaccaaaacaggatattcaacagatgccgaggtattagaagagctgtatgataaacatgacataataccgcttattctggattatagaatgtatacgaaaatactgacaacttactgtcagggactggttcaggcaataaatcctgcaactggaagaattcataccaactttattcagacaggtacggcaactggaagacttgcaagtgcagagcccaatctgcaaaatattcctgtaaaatatgatgagggaaagctaataagaaaggcatttgttccagatgaaggttatgtgttgatagatgctgattattctcagattgagcttagaatacttgcacatatctctgaggatgaacgactgataaatgcttttaaaaataaccttgatattcattcacagacggcggcagagatctttggtgtggatataagtcaggttacaccaattatgcgaagccaggcaaaagcagttaactttggaattgtatatggtatatctgattatggactttcacgggatataaagatttcaagaaaagaagcagccgagtttattaatcgttattttgaaaagtatcccagagtaaaagaatatttggacaatgtcgtcaagtttgcccgtgaaaacggatttgttttgacaatatttaacaggaaaaggtatatcaaggatataaagtctggtaataaaaacctgagaaactatgcagagagaatagcaatgaattcacctatccagggaagtgctgcagatattatgaaaatagcaatgataagagtttataaaaagctaaaagaaaacaatttaaaatcaagaattattctgcaggtccatgacgaacttttgattgaatcaccctatgaagagaaagagatagtaaaggaaatagtaaaatcggagatggaaaatgcggttttattgaaagttcctttggtagttgaagtgaaagaaggttcaaattggtatgaaacaaagtaaaggatcc

SEQ ID NO: 1623 - DNA, 2623 bp, Artificial Sequence
  Description of Artificial Sequence: Synthetic DNA sequence of Caldicellulosiruptor TOK13B DNA Polymerase T774H
atgaaatacctgctgccgaccgctgctgctggtctgctgctcctcgctgcccagccggcgatggccatggaatttgttatttttgatgggaatagtattctgtatagagctttttttgccttgccacagcttactacctcaacaggcatacctacaaatgctatatatggttttttgaatgtgctgttaaaatacttagattctgaaaaaccggattatgtagcagtagcttttgacaaaaaaggcagagctgtccgaaaaagtgaatatgaagaatacaaggctaacagaaaaccgatgccagattctcttcaggttcagataccttacgtaagagaaatacttgctgctctgaacattcctgtactgaaatgtgaagggtatgaagctgatgacgttataggcacacttgtaaatagatttaaagcccaggatttagagattgtgataataaccggagacagagatacacttcagttacttgataaaaatgtaattgtcaaaatagtcacaacaaggtttgacaggacaactgaagatttgtatgctgtagaaaatgtaaaagaaaaatatggtgtttttgcgcatcaggttgttgactataaagcattagtaggtgatgcgtcagacaatataccaggtgttaagggaattggagataaaactgccataaagctgttagaagagtaccagactctggagaatatatatcagaatctaaataacattaaaggagcgctaaaagagaagttggaatcaggaaaagacatggcatttttatcaaaaagactggctactatcatatgcgatttaccaattgaggtgaatcttgaagaattaaaaaccaaagaatgggacaaagaaagactttatcagattttacttcaacttgagtttaaaagctttattaaaagactgggcttttcagaagagattaactatgcaaggcagaactttcagctacctgaatttagtattaaagaacttcgtgatgtttcagcaatagggggcaaagaaatctatctattgtactcagatgaagaaggacttttttatatttatgaccatcaaacctcaaccatttttacaacttctgataaggaagctattaaagatcttttaacactccaaagcattcaaaaggttgtatatgatttaaaaaatatactccataaggtggactttgatgaagctaatcagataaaaaattgtaatgatgttatgttggcttcatatgttttggacagtacacgcagttcgtacgatttggaaacattgtttatttcttatctcaacactgatatagctgcaatcaaagagaatagatgggctggtgctacagttttattaagaaatctttgggatgaactttcaaaactcattgatttaaactcggcccaatacgtttatgagagcatagagatgcctcttgttcccattttatatgaaatggagaaaatcggttttaaggttgacaaaaacactttgcaggagtatacaaaagagattgagagcaagcttttaaagttggaatcacagatttatcaaatagccggtgaatggtttaacataaactcgccaaaacaactctcatatatattattcgaaaaactgaagcttccggttgttaaaaagaccaaaacaggatattcaacagatgccgaggtattagaagagctgtatgataaacatgacataataccgcttattctggattatagaatgtatacgaaaatactgacaacttactgtcagggactggttcaggcaataaatcctgcaactggaagaattcataccaactttattcagacaggtacggcaactggaagacttgcaagtgcagagcccaatctgcaaaatattcctgtaaaatatgatgagggaaagctaataagaaaggcatttgttccagatgaaggttatgtgttgatagatgctgattattctcagattgagcttagaatacttgcacatatctctgaggatgaacgactgataaatgcttttaaaaataaccttgatattcattcacagacggcggcagagatctttggtgtggatataagtcaggttacaccaattatgcgaagccaggcaaaagcagttaactttggaattgtatatggtatatctgattatggactttcacgggatataaagatttcaagaaaagaagcagccgagtttattaatcgttattttgaaaagtatcccagagtaaaagaatatttggacaatgtcgtcaagtttgcccgtgaaaacggatttgttttgacaatatttaacaggaaaaggtatatcaaggatataaagtctcataataaaaacctgagaaactatgcagagagaatagcaatgaattcacctatccagggaagtgctgcagatattatgaaaatagcaatgataagagtttataaaaagctaaaagaaaacaatttaaaatcaagaattattctgcaggtccatgacgaacttttgattgaatcaccctatgaagagaaagagatagtaaaggaaatagtaaaatcggagatggaaaatgcggttttattgaaagttcctttggtagttgaagtgaaagaaggttcaaattggtatgaaacaaagtaaaggatcc

SEQ ID NO: 1624 - DNA, 2623 bp, Artificial Sequence
  Description of Artificial Sequence: Synthetic DNA sequence of Caldicellulosiruptor TOK13B DNA Polymerase T774I
atgaaatacctgctgccgaccgctgctgctggtctgctgctcctcgctgcccagccggcgatggccatggaatttgttatttttgatgggaatagtattctgtatagagctttttttgccttgccacagcttactacctcaacaggcatacctacaaatgctatatatggttttttgaatgtgctgttaaaatacttagattctgaaaaaccggattatgtagcagtagcttttgacaaaaaaggcagagctgtccgaaaaagtgaatatgaagaatacaaggctaacagaaaaccgatgccagattctcttcaggttcagataccttacgtaagagaaatacttgctgctctgaacattcctgtactgaaatgtgaagggtatgaagctgatgacgttataggcacacttgtaaatagatttaaagcccaggatttagagattgtgataataaccggagacagagatacacttcagttacttgataaaaatgtaattgtcaaaatagtcacaacaaggtttgacaggacaactgaagatttgtatgctgtagaaaatgtaaaagaaaaatatggtgtttttgcgcatcaggttgttgactataaagcattagtaggtgatgcgtcagacaatataccaggtgttaagggaattggagataaaactgccataaagctgttagaagagtaccagactctggagaatatatatcagaatctaaataacattaaaggagcgctaaaagagaagttggaatcaggaaaagacatggcatttttatcaaaaagactggctactatcatatgcgatttaccaattgaggtgaatcttgaagaattaaaaaccaaagaatgggacaaagaaagactttatcagattttacttcaacttgagtttaaaagctttattaaaagactgggcttttcagaagagattaactatgcaaggcagaactttcagctacctgaatttagtattaaagaacttcgtgatgtttcagcaatagggggcaaagaaatctatctattgtactcagatgaagaaggacttttttatatttatgaccatcaaacctcaaccatttttacaacttctgataaggaagctattaaagatcttttaacactccaaagcattcaaaaggttgtatatgatttaaaaaatatactccataaggtggactttgatgaagctaatcagataaaaaattgtaatgatgttatgttggcttcatatgttttggacagtacacgcagttcgtacgatttggaaacattgtttatttcttatctcaacactgatatagctgcaatcaaagagaatagatgggctggtgctacagttttattaagaaatctttgggatgaactttcaaaactcattgatttaaactcggcccaatacgtttatgagagcatagagatgcctcttgttcccattttatatgaaatggagaaaatcggttttaaggttgacaaaaacactttgcaggagtatacaaaagagattgagagcaagcttttaaagttggaatcacagatttatcaaatagccggtgaatggtttaacataaactcgccaaaacaactctcatatatattattcgaaaaactgaagcttccggttgttaaaaagaccaaaacaggatattcaacagatgccgaggtattagaagagctgtatgataaacatgacataataccgcttattctggattatagaatgtatacgaaaatactgacaacttactgtcagggactggttcaggcaataaatcctgcaactggaagaattcataccaactttattcagacaggtacggcaactggaagacttgcaagtgcagagcccaatctgcaaaatattcctgtaaaatatgatgagggaaagctaataagaaaggcatttgttccagatgaaggttatgtgttgatagatgctgattattctcagattgagcttagaatacttgcacatatctctgaggatgaacgactgataaatgcttttaaaaataaccttgatattcattcacagacggcggcagagatctttggtgtggatataagtcaggttacaccaattatgcgaagccaggcaaaagcagttaactttggaattgtatatggtatatctgattatggactttcacgggatataaagatttcaagaaaagaagcagccgagtttattaatcgttattttgaaaagtatcccagagtaaaagaatatttggacaatgtcgtcaagtttgcccgtgaaaacggatttgttttgacaatatttaacaggaaaaggtatatcaaggatataaagtctattaataaaaacctgagaaactatgcagagagaatagcaatgaattcacctatccagggaagtgctgcagatattatgaaaatagcaatgataagagtttataaaaagctaaaagaaaacaatttaaaatcaagaattattctgcaggtccatgacgaacttttgattgaatcaccctatgaagagaaagagatagtaaaggaaatagtaaaatcggagatggaaaatgcggttttattgaaagttcctttggtagttgaagtgaaagaaggttcaaattggtatgaaacaaagtaaaggatcc

SEQ ID NO: 1625 - DNA, 2623 bp, Artificial Sequence
  Description of Artificial Sequence: Synthetic DNA sequence of Caldicellulosiruptor TOK13B DNA Polymerase T774L
atgaaatacctgctgccgaccgctgctgctggtctgctgctcctcgctgcccagccggcgatggccatggaatttgttatttttgatgggaatagtattctgtatagagctttttttgccttgccacagcttactacctcaacaggcatacctacaaatgctatatatggttttttgaatgtgctgttaaaatacttagattctgaaaaaccggattatgtagcagtagcttttgacaaaaaaggcagagctgtccgaaaaagtgaatatgaagaatacaaggctaacagaaaaccgatgccagattctcttcaggttcagataccttacgtaagagaaatacttgctgctctgaacattcctgtactgaaatgtgaagggtatgaagctgatgacgttataggcacacttgtaaatagatttaaagcccaggatttagagattgtgataataaccggagacagagatacacttcagttacttgataaaaatgtaattgtcaaaatagtcacaacaaggtttgacaggacaactgaagatttgtatgctgtagaaaatgtaaaagaaaaatatggtgtttttgcgcatcaggttgttgactataaagcattagtaggtgatgcgtcagacaatataccaggtgttaagggaattggagataaaactgccataaagctgttagaagagtaccagactctggagaatatatatcagaatctaaataacattaaaggagcgctaaaagagaagttggaatcaggaaaagacatggcatttttatcaaaaagactggctactatcatatgcgatttaccaattgaggtgaatcttgaagaattaaaaaccaaagaatgggacaaagaaagactttatcagattttacttcaacttgagtttaaaagctttattaaaagactgggcttttcagaagagattaactatgcaaggcagaactttcagctacctgaatttagtattaaagaacttcgtgatgtttcagcaatagggggcaaagaaatctatctattgtactcagatgaagaaggacttttttatatttatgaccatcaaacctcaaccatttttacaacttctgataaggaagctattaaagatcttttaacactccaaagcattcaaaaggttgtatatgatttaaaaaatatactccataaggtggactttgatgaagctaatcagataaaaaattgtaatgatgttatgttggcttcatatgttttggacagtacacgcagttcgtacgatttggaaacattgtttatttcttatctcaacactgatatagctgcaatcaaagagaatagatgggctggtgctacagttttattaagaaatctttgggatgaactttcaaaactcattgatttaaactcggcccaatacgtttatgagagcatagagatgcctcttgttcccattttatatgaaatggagaaaatcggttttaaggttgacaaaaacactttgcaggagtatacaaaagagattgagagcaagcttttaaagttggaatcacagatttatcaaatagccggtgaatggtttaacataaactcgccaaaacaactctcatatatattattcgaaaaactgaagcttccggttgttaaaaagaccaaaacaggatattcaacagatgccgaggtattagaagagctgtatgataaacatgacataataccgcttattctggattatagaatgtatacgaaaatactgacaacttactgtcagggactggttcaggcaataaatcctgcaactggaagaattcataccaactttattcagacaggtacggcaactggaagacttgcaagtgcagagcccaatctgcaaaatattcctgtaaaatatgatgagggaaagctaataagaaaggcatttgttccagatgaaggttatgtgttgatagatgctgattattctcagattgagcttagaatacttgcacatatctctgaggatgaacgactgataaatgcttttaaaaataaccttgatattcattcacagacggcggcagagatctttggtgtggatataagtcaggttacaccaattatgcgaagccaggcaaaagcagttaactttggaattgtatatggtatatctgattatggactttcacgggatataaagatttcaagaaaagaagcagccgagtttattaatcgttattttgaaaagtatcccagagtaaaagaatatttggacaatgtcgtcaagtttgcccgtgaaaacggatttgttttgacaatatttaacaggaaaaggtatatcaaggatataaagtctcttaataaaaacctgagaaactatgcagagagaatagcaatgaattcacctatccagggaagtgctgcagatattatgaaaatagcaatgataagagtttataaaaagctaaaagaaaacaatttaaaatcaagaattattctgcaggtccatgacgaacttttgattgaatcaccctatgaagagaaagagatagtaaaggaaatagtaaaatcggagatggaaaatgcggttttattgaaagttcctttggtagttgaagtgaaagaaggttcaaattggtatgaaacaaagtaaaggatcc

SEQ ID NO: 1626 - DNA, 2623 bp, Artificial Sequence
  Description of Artificial Sequence: Synthetic DNA sequence of Caldicellulosiruptor TOK13B DNA Polymerase T774K
atgaaatacctgctgccgaccgctgctgctggtctgctgctcctcgctgcccagccggcgatggccatggaatttgttatttttgatgggaatagtattctgtatagagctttttttgccttgccacagcttactacctcaacaggcatacctacaaatgctatatatggttttttgaatgtgctgttaaaatacttagattctgaaaaaccggattatgtagcagtagcttttgacaaaaaaggcagagctgtccgaaaaagtgaatatgaagaatacaaggctaacagaaaaccgatgccagattctcttcaggttcagataccttacgtaagagaaatacttgctgctctgaacattcctgtactgaaatgtgaagggtatgaagctgatgacgttataggcacacttgtaaatagatttaaagcccaggatttagagattgtgataataaccggagacagagatacacttcagttacttgataaaaatgtaattgtcaaaatagtcacaacaaggtttgacaggacaactgaagatttgtatgctgtagaaaatgtaaaagaaaaatatggtgtttttgcgcatcaggttgttgactataaagcattagtaggtgatgcgtcagacaatataccaggtgttaagggaattggagataaaactgccataaagctgttagaagagtaccagactctggagaatatatatcagaatctaaataacattaaaggagcgctaaaagagaagttggaatcaggaaaagacatggcatttttatcaaaaagactggctactatcatatgcgatttaccaattgaggtgaatcttgaagaattaaaaaccaaagaatgggacaaagaaagactttatcagattttacttcaacttgagtttaaaagctttattaaaagactgggcttttcagaagagattaactatgcaaggcagaactttcagctacctgaatttagtattaaagaacttcgtgatgtttcagcaatagggggcaaagaaatctatctattgtactcagatgaagaaggacttttttatatttatgaccatcaaacctcaaccatttttacaacttctgataaggaagctattaaagatcttttaacactccaaagcattcaaaaggttgtatatgatttaaaaaatatactccataaggtggactttgatgaagctaatcagataaaaaattgtaatgatgttatgttggcttcatatgttttggacagtacacgcagttcgtacgatttggaaacattgtttatttcttatctcaacactgatatagctgcaatcaaagagaatagatgggctggtgctacagttttattaagaaatctttgggatgaactttcaaaactcattgatttaaactcggcccaatacgtttatgagagcatagagatgcctcttgttcccattttatatgaaatggagaaaatcggttttaaggttgacaaaaacactttgcaggagtatacaaaagagattgagagcaagcttttaaagttggaatcacagatttatcaaatagccggtgaatggtttaacataaactcgccaaaacaactctcatatatattattcgaaaaactgaagcttccggttgttaaaaagaccaaaacaggatattcaacagatgccgaggtattagaagagctgtatgataaacatgacataataccgcttattctggattatagaatgtatacgaaaatactgacaacttactgtcagggactggttcaggcaataaatcctgcaactggaagaattcataccaactttattcagacaggtacggcaactggaagacttgcaagtgcagagcccaatctgcaaaatattcctgtaaaatatgatgagggaaagctaataagaaaggcatttgttccagatgaaggttatgtgttgatagatgctgattattctcagattgagcttagaatacttgcacatatctctgaggatgaacgactgataaatgcttttaaaaataaccttgatattcattcacagacggcggcagagatctttggtgtggatataagtcaggttacaccaattatgcgaagccaggcaaaagcagttaactttggaattgtatatggtatatctgattatggactttcacgggatataaagatttcaagaaaagaagcagccgagtttattaatcgttattttgaaaagtatcccagagtaaaagaatatttggacaatgtcgtcaagtttgcccgtgaaaacggatttgttttgacaatatttaacaggaaaaggtatatcaaggatataaagtctaaaaataaaaacctgagaaactatgcagagagaatagcaatgaattcacctatccagggaagtgctgcagatattatgaaaatagcaatgataagagtttataaaaagctaaaagaaaacaatttaaaatcaagaattattctgcaggtccatgacgaacttttgattgaatcaccctatgaagagaaagagatagtaaaggaaatagtaaaatcggagatggaaaatgcggttttattgaaagttcctttggtagttgaagtgaaagaaggttcaaattggtatgaaacaaagtaaaggatcc

SEQ ID NO: 1627 - DNA, 2623 bp, Artificial Sequence
  Description of Artificial Sequence: Synthetic DNA sequence of Caldicellulosiruptor TOK13B DNA Polymerase T774M
atgaaatacctgctgccgaccgctgctgctggtctgctgctcctcgctgcccagccggcgatggccatggaatttgttatttttgatgggaatagtattctgtatagagctttttttgccttgccacagcttactacctcaacaggcatacctacaaatgctatatatggttttttgaatgtgctgttaaaatacttagattctgaaaaaccggattatgtagcagtagcttttgacaaaaaaggcagagctgtccgaaaaagtgaatatgaagaatacaaggctaacagaaaaccgatgccagattctcttcaggttcagataccttacgtaagagaaatacttgctgctctgaacattcctgtactgaaatgtgaagggtatgaagctgatgacgttataggcacacttgtaaatagatttaaagcccaggatttagagattgtgataataaccggagacagagatacacttcagttacttgataaaaatgtaattgtcaaaatagtcacaacaaggtttgacaggacaactgaagatttgtatgctgtagaaaatgtaaaagaaaaatatggtgtttttgcgcatcaggttgttgactataaagcattagtaggtgatgcgtcagacaatataccaggtgttaagggaattggagataaaactgccataaagctgttagaagagtaccagactctggagaatatatatcagaatctaaataacattaaaggagcgctaaaagagaagttggaatcaggaaaagacatggcatttttatcaaaaagactggctactatcatatgcgatttaccaattgaggtgaatcttgaagaattaaaaaccaaagaatgggacaaagaaagactttatcagattttacttcaacttgagtttaaaagctttattaaaagactgggcttttcagaagagattaactatgcaaggcagaactttcagctacctgaatttagtattaaagaacttcgtgatgtttcagcaatagggggcaaagaaatctatctattgtactcagatgaagaaggacttttttatatttatgaccatcaaacctcaaccatttttacaacttctgataaggaagctattaaagatcttttaacactccaaagcattcaaaaggttgtatatgatttaaaaaatatactccataaggtggactttgatgaagctaatcagataaaaaattgtaatgatgttatgttggcttcatatgttttggacagtacacgcagttcgtacgatttggaaacattgtttatttcttatctcaacactgatatagctgcaatcaaagagaatagatgggctggtgctacagttttattaagaaatctttgggatgaactttcaaaactcattgatttaaactcggcccaatacgtttatgagagcatagagatgcctcttgttcccattttatatgaaatggagaaaatcggttttaaggttgacaaaaacactttgcaggagtatacaaaagagattgagagcaagcttttaaagttggaatcacagatttatcaaatagccggtgaatggtttaacataaactcgccaaaacaactctcatatatattattcgaaaaactgaagcttccggttgttaaaaagaccaaaacaggatattcaacagatgccgaggtattagaagagctgtatgataaacatgacataataccgcttattctggattatagaatgtatacgaaaatactgacaacttactgtcagggactggttcaggcaataaatcctgcaactggaagaattcataccaactttattcagacaggtacggcaactggaagacttgcaagtgcagagcccaatctgcaaaatattcctgtaaaatatgatgagggaaagctaataagaaaggcatttgttccagatgaaggttatgtgttgatagatgctgattattctcagattgagcttagaatacttgcacatatctctgaggatgaacgactgataaatgcttttaaaaataaccttgatattcattcacagacggcggcagagatctttggtgtggatataagtcaggttacaccaattatgcgaagccaggcaaaagcagttaactttggaattgtatatggtatatctgattatggactttcacgggatataaagatttcaagaaaagaagcagccgagtttattaatcgttattttgaaaagtatcccagagtaaaagaatatttggacaatgtcgtcaagtttgcccgtgaaaacggatttgttttgacaatatttaacaggaaaaggtatatcaaggatataaagtctatgaataaaaacctgagaaactatgcagagagaatagcaatgaattcacctatccagggaagtgctgcagatattatgaaaatagcaatgataagagtttataaaaagctaaaagaaaacaatttaaaatcaagaattattctgcaggtccatgacgaacttttgattgaatcaccctatgaagagaaagagatagtaaaggaaatagtaaaatcggagatggaaaatgcggttttattgaaagttcctttggtagttgaagtgaaagaaggttcaaattggtatgaaacaaagtaaaggatcc

SEQ ID NO: 1628 - DNA, 2623 bp, Artificial Sequence
  Description of Artificial Sequence: Synthetic DNA sequence of Caldicellulosiruptor TOK13B DNA Polymerase T774F
atgaaatacctgctgccgaccgctgctgctggtctgctgctcctcgctgcccagccggcgatggccatggaatttgttatttttgatgggaatagtattctgtatagagctttttttgccttgccacagcttactacctcaacaggcatacctacaaatgctatatatggttttttgaatgtgctgttaaaatacttagattctgaaaaaccggattatgtagcagtagcttttgacaaaaaaggcagagctgtccgaaaaagtgaatatgaagaatacaaggctaacagaaaaccgatgccagattctcttcaggttcagataccttacgtaagagaaatacttgctgctctgaacattcctgtactgaaatgtgaagggtatgaagctgatgacgttataggcacacttgtaaatagatttaaagcccaggatttagagattgtgataataaccggagacagagatacacttcagttacttgataaaaatgtaattgtcaaaatagtcacaacaaggtttgacaggacaactgaagatttgtatgctgtagaaaatgtaaaagaaaaatatggtgtttttgcgcatcaggttgttgactataaagcattagtaggtgatgcgtcagacaatataccaggtgttaagggaattggagataaaactgccataaagctgttagaagagtaccagactctggagaatatatatcagaatctaaataacattaaaggagcgctaaaagagaagttggaatcaggaaaagacatggcatttttatcaaaaagactggctactatcatatgcgatttaccaattgaggtgaatcttgaagaattaaaaaccaaagaatgggacaaagaaagactttatcagattttacttcaacttgagtttaaaagctttattaaaagactgggcttttcagaagagattaactatgcaaggcagaactttcagctacctgaatttagtattaaagaacttcgtgatgtttcagcaatagggggcaaagaaatctatctattgtactcagatgaagaaggacttttttatatttatgaccatcaaacctcaaccatttttacaacttctgataaggaagctattaaagatcttttaacactccaaagcattcaaaaggttgtatatgatttaaaaaatatactccataaggtggactttgatgaagctaatcagataaaaaattgtaatgatgttatgttggcttcatatgttttggacagtacacgcagttcgtacgatttggaaacattgtttatttcttatctcaacactgatatagctgcaatcaaagagaatagatgggctggtgctacagttttattaagaaatctttgggatgaactttcaaaactcattgatttaaactcggcccaatacgtttatgagagcatagagatgcctcttgttcccattttatatgaaatggagaaaatcggttttaaggttgacaaaaacactttgcaggagtatacaaaagagattgagagcaagcttttaaagttggaatcacagatttatcaaatagccggtgaatggtttaacataaactcgccaaaacaactctcatatatattattcgaaaaactgaagcttccggttgttaaaaagaccaaaacaggatattcaacagatgccgaggtattagaagagctgtatgataaacatgacataataccgcttattctggattatagaatgtatacgaaaatactgacaacttactgtcagggactggttcaggcaataaatcctgcaactggaagaattcataccaactttattcagacaggtacggcaactggaagacttgcaagtgcagagcccaatctgcaaaatattcctgtaaaatatgatgagggaaagctaataagaaaggcatttgttccagatgaaggttatgtgttgatagatgctgattattctcagattgagcttagaatacttgcacatatctctgaggatgaacgactgataaatgcttttaaaaataaccttgatattcattcacagacggcggcagagatctttggtgtggatataagtcaggttacaccaattatgcgaagccaggcaaaagcagttaactttggaattgtatatggtatatctgattatggactttcacgggatataaagatttcaagaaaagaagcagccgagtttattaatcgttattttgaaaagtatcccagagtaaaagaatatttggacaatgtcgtcaagtttgcccgtgaaaacggatttgttttgacaatatttaacaggaaaaggtatatcaaggatataaagtcttttaataaaaacctgagaaactatgcagagagaatagcaatgaattcacctatccagggaagtgctgcagatattatgaaaatagcaatgataagagtttataaaaagctaaaagaaaacaatttaaaatcaagaattattctgcaggtccatgacgaacttttgattgaatcaccctatgaagagaaagagatagtaaaggaaatagtaaaatcggagatggaaaatgcggttttattgaaagttcctttggtagttgaagtgaaagaaggttcaaattggtatgaaacaaagtaaaggatcc

SEQ ID NO: 1629 - DNA, 2623 bp, Artificial Sequence
  Description of Artificial Sequence: Synthetic DNA sequence of Caldicellulosiruptor TOK13B DNA Polymerase T774P
atgaaatacctgctgccgaccgctgctgctggtctgctgctcctcgctgcccagccggcgatggccatggaatttgttatttttgatgggaatagtattctgtatagagctttttttgccttgccacagcttactacctcaacaggcatacctacaaatgctatatatggttttttgaatgtgctgttaaaatacttagattctgaaaaaccggattatgtagcagtagcttttgacaaaaaaggcagagctgtccgaaaaagtgaatatgaagaatacaaggctaacagaaaaccgatgccagattctcttcaggttcagataccttacgtaagagaaatacttgctgctctgaacattcctgtactgaaatgtgaagggtatgaagctgatgacgttataggcacacttgtaaatagatttaaagcccaggatttagagattgtgataataaccggagacagagatacacttcagttacttgataaaaatgtaattgtcaaaatagtcacaacaaggtttgacaggacaactgaagatttgtatgctgtagaaaatgtaaaagaaaaatatggtgtttttgcgcatcaggttgttgactataaagcattagtaggtgatgcgtcagacaatataccaggtgttaagggaattggagataaaactgccataaagctgttagaagagtaccagactctggagaatatatatcagaatctaaataacattaaaggagcgctaaaagagaagttggaatcaggaaaagacatggcatttttatcaaaaagactggctactatcatatgcgatttaccaattgaggtgaatcttgaagaattaaaaaccaaagaatgggacaaagaaagactttatcagattttacttcaacttgagtttaaaagctttattaaaagactgggcttttcagaagagattaactatgcaaggcagaactttcagctacctgaatttagtattaaagaacttcgtgatgtttcagcaatagggggcaaagaaatctatctattgtactcagatgaagaaggacttttttatatttatgaccatcaaacctcaaccatttttacaacttctgataaggaagctattaaagatcttttaacactccaaagcattcaaaaggttgtatatgatttaaaaaatatactccataaggtggactttgatgaagctaatcagataaaaaattgtaatgatgttatgttggcttcatatgttttggacagtacacgcagttcgtacgatttggaaacattgtttatttcttatctcaacactgatatagctgcaatcaaagagaatagatgggctggtgctacagttttattaagaaatctttgggatgaactttcaaaactcattgatttaaactcggcccaatacgtttatgagagcatagagatgcctcttgttcccattttatatgaaatggagaaaatcggttttaaggttgacaaaaacactttgcaggagtatacaaaagagattgagagcaagcttttaaagttggaatcacagatttatcaaatagccggtgaatggtttaacataaactcgccaaaacaactctcatatatattattcgaaaaactgaagcttccggttgttaaaaagaccaaaacaggatattcaacagatgccgaggtattagaagagctgtatgataaacatgacataataccgcttattctggattatagaatgtatacgaaaatactgacaacttactgtcagggactggttcaggcaataaatcctgcaactggaagaattcataccaactttattcagacaggtacggcaactggaagacttgcaagtgcagagcccaatctgcaaaatattcctgtaaaatatgatgagggaaagctaataagaaaggcatttgttccagatgaaggttatgtgttgatagatgctgattattctcagattgagcttagaatacttgcacatatctctgaggatgaacgactgataaatgcttttaaaaataaccttgatattcattcacagacggcggcagagatctttggtgtggatataagtcaggttacaccaattatgcgaagccaggcaaaagcagttaactttggaattgtatatggtatatctgattatggactttcacgggatataaagatttcaagaaaagaagcagccgagtttattaatcgttattttgaaaagtatcccagagtaaaagaatatttggacaatgtcgtcaagtttgcccgtgaaaacggatttgttttgacaatatttaacaggaaaaggtatatcaaggatataaagtctcctaataaaaacctgagaaactatgcagagagaatagcaatgaattcacctatccagggaagtgctgcagatattatgaaaatagcaatgataagagtttataaaaagctaaaagaaaacaatttaaaatcaagaattattctgcaggtccatgacgaacttttgattgaatcaccctatgaagagaaagagatagtaaaggaaatagtaaaatcggagatggaaaatgcggttttattgaaagttcctttggtagttgaagtgaaagaaggttcaaattggtatgaaacaaagtaaaggatcc

SEQ ID NO: 1630 - DNA, 2623 bp, Artificial Sequence
  Description of Artificial Sequence: Synthetic DNA sequence of Caldicellulosiruptor TOK13B DNA Polymerase T774S
atgaaatacctgctgccgaccgctgctgctggtctgctgctcctcgctgcccagccggcgatggccatggaatttgttatttttgatgggaatagtattctgtatagagctttttttgccttgccacagcttactacctcaacaggcatacctacaaatgctatatatggttttttgaatgtgctgttaaaatacttagattctgaaaaaccggattatgtagcagtagcttttgacaaaaaaggcagagctgtccgaaaaagtgaatatgaagaatacaaggctaacagaaaaccgatgccagattctcttcaggttcagataccttacgtaagagaaatacttgctgctctgaacattcctgtactgaaatgtgaagggtatgaagctgatgacgttataggcacacttgtaaatagatttaaagcccaggatttagagattgtgataataaccggagacagagatacacttcagttacttgataaaaatgtaattgtcaaaatagtcacaacaaggtttgacaggacaactgaagatttgtatgctgtagaaaatgtaaaagaaaaatatggtgtttttgcgcatcaggttgttgactataaagcattagtaggtgatgcgtcagacaatataccaggtgttaagggaattggagataaaactgccataaagctgttagaagagtaccagactctggagaatatatatcagaatctaaataacattaaaggagcgctaaaagagaagttggaatcaggaaaagacatggcatttttatcaaaaagactggctactatcatatgcgatttaccaattgaggtgaatcttgaagaattaaaaaccaaagaatgggacaaagaaagactttatcagattttacttcaacttgagtttaaaagctttattaaaagactgggcttttcagaagagattaactatgcaaggcagaactttcagctacctgaatttagtattaaagaacttcgtgatgtttcagcaatagggggcaaagaaatctatctattgtactcagatgaagaaggacttttttatatttatgaccatcaaacctcaaccatttttacaacttctgataaggaagctattaaagatcttttaacactccaaagcattcaaaaggttgtatatgatttaaaaaatatactccataaggtggactttgatgaagctaatcagataaaaaattgtaatgatgttatgttggcttcatatgttttggacagtacacgcagttcgtacgatttggaaacattgtttatttcttatctcaacactgatatagctgcaatcaaagagaatagatgggctggtgctacagttttattaagaaatctttgggatgaactttcaaaactcattgatttaaactcggcccaatacgtttatgagagcatagagatgcctcttgttcccattttatatgaaatggagaaaatcggttttaaggttgacaaaaacactttgcaggagtatacaaaagagattgagagcaagcttttaaagttggaatcacagatttatcaaatagccggtgaatggtttaacataaactcgccaaaacaactctcatatatattattcgaaaaactgaagcttccggttgttaaaaagaccaaaacaggatattcaacagatgccgaggtattagaagagctgtatgataaacatgacataataccgcttattctggattatagaatgtatacgaaaatactgacaacttactgtcagggactggttcaggcaataaatcctgcaactggaagaattcataccaactttattcagacaggtacggcaactggaagacttgcaagtgcagagcccaatctgcaaaatattcctgtaaaatatgatgagggaaagctaataagaaaggcatttgttccagatgaaggttatgtgttgatagatgctgattattctcagattgagcttagaatacttgcacatatctctgaggatgaacgactgataaatgcttttaaaaataaccttgatattcattcacagacggcggcagagatctttggtgtggatataagtcaggttacaccaattatgcgaagccaggcaaaagcagttaactttggaattgtatatggtatatctgattatggactttcacgggatataaagatttcaagaaaagaagcagccgagtttattaatcgttattttgaaaagtatcccagagtaaaagaatatttggacaatgtcgtcaagtttgcccgtgaaaacggatttgttttgacaatatttaacaggaaaaggtatatcaaggatataaagtcttctaataaaaacctgagaaactatgcagagagaatagcaatgaattcacctatccagggaagtgctgcagatattatgaaaatagcaatgataagagtttataaaaagctaaaagaaaacaatttaaaatcaagaattattctgcaggtccatgacgaacttttgattgaatcaccctatgaagagaaagagatagtaaaggaaatagtaaaatcggagatggaaaatgcggttttattgaaagttcctttggtagttgaagtgaaagaaggttcaaattggtatgaaacaaagtaaaggatcc

SEQ ID NO: 1631 - DNA, 2623 bp, Artificial Sequence
  Description of Artificial Sequence: Synthetic DNA sequence of Caldicellulosiruptor TOK13B DNA Polymerase T774W
atgaaatacctgctgccgaccgctgctgctggtctgctgctcctcgctgcccagccggcgatggccatggaatttgttatttttgatgggaatagtattctgtatagagctttttttgccttgccacagcttactacctcaacaggcatacctacaaatgctatatatggttttttgaatgtgctgttaaaatacttagattctgaaaaaccggattatgtagcagtagcttttgacaaaaaaggcagagctgtccgaaaaagtgaatatgaagaatacaaggctaacagaaaaccgatgccagattctcttcaggttcagataccttacgtaagagaaatacttgctgctctgaacattcctgtactgaaatgtgaagggtatgaagctgatgacgttataggcacacttgtaaatagatttaaagcccaggatttagagattgtgataataaccggagacagagatacacttcagttacttgataaaaatgtaattgtcaaaatagtcacaacaaggtttgacaggacaactgaagatttgtatgctgtagaaaatgtaaaagaaaaatatggtgtttttgcgcatcaggttgttgactataaagcattagtaggtgatgcgtcagacaatataccaggtgttaagggaattggagataaaactgccataaagctgttagaagagtaccagactctggagaatatatatcagaatctaaataacattaaaggagcgctaaaagagaagttggaatcaggaaaagacatggcatttttatcaaaaagactggctactatcatatgcgatttaccaattgaggtgaatcttgaagaattaaaaaccaaagaatgggacaaagaaagactttatcagattttacttcaacttgagtttaaaagctttattaaaagactgggcttttcagaagagattaactatgcaaggcagaactttcagctacctgaatttagtattaaagaacttcgtgatgtttcagcaatagggggcaaagaaatctatctattgtactcagatgaagaaggacttttttatatttatgaccatcaaacctcaaccatttttacaacttctgataaggaagctattaaagatcttttaacactccaaagcattcaaaaggttgtatatgatttaaaaaatatactccataaggtggactttgatgaagctaatcagataaaaaattgtaatgatgttatgttggcttcatatgttttggacagtacacgcagttcgtacgatttggaaacattgtttatttcttatctcaacactgatatagctgcaatcaaagagaatagatgggctggtgctacagttttattaagaaatctttgggatgaactttcaaaactcattgatttaaactcggcccaatacgtttatgagagcatagagatgcctcttgttcccattttatatgaaatggagaaaatcggttttaaggttgacaaaaacactttgcaggagtatacaaaagagattgagagcaagcttttaaagttggaatcacagatttatcaaatagccggtgaatggtttaacataaactcgccaaaacaactctcatatatattattcgaaaaactgaagcttccggttgttaaaaagaccaaaacaggatattcaacagatgccgaggtattagaagagctgtatgataaacatgacataataccgcttattctggattatagaatgtatacgaaaatactgacaacttactgtcagggactggttcaggcaataaatcctgcaactggaagaattcataccaactttattcagacaggtacggcaactggaagacttgcaagtgcagagcccaatctgcaaaatattcctgtaaaatatgatgagggaaagctaataagaaaggcatttgttccagatgaaggttatgtgttgatagatgctgattattctcagattgagcttagaatacttgcacatatctctgaggatgaacgactgataaatgcttttaaaaataaccttgatattcattcacagacggcggcagagatctttggtgtggatataagtcaggttacaccaattatgcgaagccaggcaaaagcagttaactttggaattgtatatggtatatctgattatggactttcacgggatataaagatttcaagaaaagaagcagccgagtttattaatcgttattttgaaaagtatcccagagtaaaagaatatttggacaatgtcgtcaagtttgcccgtgaaaacggatttgttttgacaatatttaacaggaaaaggtatatcaaggatataaagtcttggaataaaaacctgagaaactatgcagagagaatagcaatgaattcacctatccagggaagtgctgcagatattatgaaaatagcaatgataagagtttataaaaagctaaaagaaaacaatttaaaatcaagaattattctgcaggtccatgacgaacttttgattgaatcaccctatgaagagaaagagatagtaaaggaaatagtaaaatcggagatggaaaatgcggttttattgaaagttcctttggtagttgaagtgaaagaaggttcaaattggtatgaaacaaagtaaaggatcc

SEQ ID NO: 1632 - DNA, 2623 bp, Artificial Sequence
  Description of Artificial Sequence: Synthetic DNA sequence of Caldicellulosiruptor TOK13B DNA Polymerase T774Y
atgaaatacctgctgccgaccgctgctgctggtctgctgctcctcgctgcccagccggcgatggccatggaatttgttatttttgatgggaatagtattctgtatagagctttttttgccttgccacagcttactacctcaacaggcatacctacaaatgctatatatggttttttgaatgtgctgttaaaatacttagattctgaaaaaccggattatgtagcagtagcttttgacaaaaaaggcagagctgtccgaaaaagtgaatatgaagaatacaaggctaacagaaaaccgatgccagattctcttcaggttcagataccttacgtaagagaaatacttgctgctctgaacattcctgtactgaaatgtgaagggtatgaagctgatgacgttataggcacacttgtaaatagatttaaagcccaggatttagagattgtgataataaccggagacagagatacacttcagttacttgataaaaatgtaattgtcaaaatagtcacaacaaggtttgacaggacaactgaagatttgtatgctgtagaaaatgtaaaagaaaaatatggtgtttttgcgcatcaggttgttgactataaagcattagtaggtgatgcgtcagacaatataccaggtgttaagggaattggagataaaactgccataaagctgttagaagagtaccagactctggagaatatatatcagaatctaaataacattaaaggagcgctaaaagagaagttggaatcaggaaaagacatggcatttttatcaaaaagactggctactatcatatgcgatttaccaattgaggtgaatcttgaagaattaaaaaccaaagaatgggacaaagaaagactttatcagattttacttcaacttgagtttaaaagctttattaaaagactgggcttttcagaagagattaactatgcaaggcagaactttcagctacctgaatttagtattaaagaacttcgtgatgtttcagcaatagggggcaaagaaatctatctattgtactcagatgaagaaggacttttttatatttatgaccatcaaacctcaaccatttttacaacttctgataaggaagctattaaagatcttttaacactccaaagcattcaaaaggttgtatatgatttaaaaaatatactccataaggtggactttgatgaagctaatcagataaaaaattgtaatgatgttatgttggcttcatatgttttggacagtacacgcagttcgtacgatttggaaacattgtttatttcttatctcaacactgatatagctgcaatcaaagagaatagatgggctggtgctacagttttattaagaaatctttgggatgaactttcaaaactcattgatttaaactcggcccaatacgtttatgagagcatagagatgcctcttgttcccattttatatgaaatggagaaaatcggttttaaggttgacaaaaacactttgcaggagtatacaaaagagattgagagcaagcttttaaagttggaatcacagatttatcaaatagccggtgaatggtttaacataaactcgccaaaacaactctcatatatattattcgaaaaactgaagcttccggttgttaaaaagaccaaaacaggatattcaacagatgccgaggtattagaagagctgtatgataaacatgacataataccgcttattctggattatagaatgtatacgaaaatactgacaacttactgtcagggactggttcaggcaataaatcctgcaactggaagaattcataccaactttattcagacaggtacggcaactggaagacttgcaagtgcagagcccaatctgcaaaatattcctgtaaaatatgatgagggaaagctaataagaaaggcatttgttccagatgaaggttatgtgttgatagatgctgattattctcagattgagcttagaatacttgcacatatctctgaggatgaacgactgataaatgcttttaaaaataaccttgatattcattcacagacggcggcagagatctttggtgtggatataagtcaggttacaccaattatgcgaagccaggcaaaagcagttaactttggaattgtatatggtatatctgattatggactttcacgggatataaagatttcaagaaaagaagcagccgagtttattaatcgttattttgaaaagtatcccagagtaaaagaatatttggacaatgtcgtcaagtttgcccgtgaaaacggatttgttttgacaatatttaacaggaaaaggtatatcaaggatataaagtcttataataaaaacctgagaaactatgcagagagaatagcaatgaattcacctatccagggaagtgctgcagatattatgaaaatagcaatgataagagtttataaaaagctaaaagaaaacaatttaaaatcaagaattattctgcaggtccatgacgaacttttgattgaatcaccctatgaagagaaagagatagtaaaggaaatagtaaaatcggagatggaaaatgcggttttattgaaagttcctttggtagttgaagtgaaagaaggttcaaattggtatgaaacaaagtaaaggatcc

SEQ ID NO: 1633 - DNA, 2623 bp, Artificial Sequence
  Description of Artificial Sequence: Synthetic DNA sequence of Caldicellulosiruptor TOK13B DNA Polymerase T774V
atgaaatacctgctgccgaccgctgctgctggtctgctgctcctcgctgcccagccggcgatggccatggaatttgttatttttgatgggaatagtattctgtatagagctttttttgccttgccacagcttactacctcaacaggcatacctacaaatgctatatatggttttttgaatgtgctgttaaaatacttagattctgaaaaaccggattatgtagcagtagcttttgacaaaaaaggcagagctgtccgaaaaagtgaatatgaagaatacaaggctaacagaaaaccgatgccagattctcttcaggttcagataccttacgtaagagaaatacttgctgctctgaacattcctgtactgaaatgtgaagggtatgaagctgatgacgttataggcacacttgtaaatagatttaaagcccaggatttagagattgtgataataaccggagacagagatacacttcagttacttgataaaaatgtaattgtcaaaatagtcacaacaaggtttgacaggacaactgaagatttgtatgctgtagaaaatgtaaaagaaaaatatggtgtttttgcgcatcaggttgttgactataaagcattagtaggtgatgcgtcagacaatataccaggtgttaagggaattggagataaaactgccataaagctgttagaagagtaccagactctggagaatatatatcagaatctaaataacattaaaggagcgctaaaagagaagttggaatcaggaaaagacatggcatttttatcaaaaagactggctactatcatatgcgatttaccaattgaggtgaatcttgaagaattaaaaaccaaagaatgggacaaagaaagactttatcagattttacttcaacttgagtttaaaagctttattaaaagactgggcttttcagaagagattaactatgcaaggcagaactttcagctacctgaatttagtattaaagaacttcgtgatgtttcagcaatagggggcaaagaaatctatctattgtactcagatgaagaaggacttttttatatttatgaccatcaaacctcaaccatttttacaacttctgataaggaagctattaaagatcttttaacactccaaagcattcaaaaggttgtatatgatttaaaaaatatactccataaggtggactttgatgaagctaatcagataaaaaattgtaatgatgttatgttggcttcatatgttttggacagtacacgcagttcgtacgatttggaaacattgtttatttcttatctcaacactgatatagctgcaatcaaagagaatagatgggctggtgctacagttttattaagaaatctttgggatgaactttcaaaactcattgatttaaactcggcccaatacgtttatgagagcatagagatgcctcttgttcccattttatatgaaatggagaaaatcggttttaaggttgacaaaaacactttgcaggagtatacaaaagagattgagagcaagcttttaaagttggaatcacagatttatcaaatagccggtgaatggtttaacataaactcgccaaaacaactctcatatatattattcgaaaaactgaagcttccggttgttaaaaagaccaaaacaggatattcaacagatgccgaggtattagaagagctgtatgataaacatgacataataccgcttattctggattatagaatgtatacgaaaatactgacaacttactgtcagggactggttcaggcaataaatcctgcaactggaagaattcataccaactttattcagacaggtacggcaactggaagacttgcaagtgcagagcccaatctgcaaaatattcctgtaaaatatgatgagggaaagctaataagaaaggcatttgttccagatgaaggttatgtgttgatagatgctgattattctcagattgagcttagaatacttgcacatatctctgaggatgaacgactgataaatgcttttaaaaataaccttgatattcattcacagacggcggcagagatctttggtgtggatataagtcaggttacaccaattatgcgaagccaggcaaaagcagttaactttggaattgtatatggtatatctgattatggactttcacgggatataaagatttcaagaaaagaagcagccgagtttattaatcgttattttgaaaagtatcccagagtaaaagaatatttggacaatgtcgtcaagtttgcccgtgaaaacggatttgttttgacaatatttaacaggaaaaggtatatcaaggatataaagtctgttaataaaaacctgagaaactatgcagagagaatagcaatgaattcacctatccagggaagtgctgcagatattatgaaaatagcaatgataagagtttataaaaagctaaaagaaaacaatttaaaatcaagaattattctgcaggtccatgacgaacttttgattgaatcaccctatgaagagaaagagatagtaaaggaaatagtaaaatcggagatggaaaatgcggttttattgaaagttcctttggtagttgaagtgaaagaaggttcaaattggtatgaaacaaagtaaaggatcc

SEQ ID NO: 1634 - DNA, 2623 bp, Artificial Sequence
  Description of Artificial Sequence: Synthetic DNA sequence of Caldicellulosiruptor TOK13B DNA Polymerase N775A
atgaaatacctgctgccgaccgctgctgctggtctgctgctcctcgctgcccagccggcgatggccatggaatttgttatttttgatgggaatagtattctgtatagagctttttttgccttgccacagcttactacctcaacaggcatacctacaaatgctatatatggttttttgaatgtgctgttaaaatacttagattctgaaaaaccggattatgtagcagtagcttttgacaaaaaaggcagagctgtccgaaaaagtgaatatgaagaatacaaggctaacagaaaaccgatgccagattctcttcaggttcagataccttacgtaagagaaatacttgctgctctgaacattcctgtactgaaatgtgaagggtatgaagctgatgacgttataggcacacttgtaaatagatttaaagcccaggatttagagattgtgataataaccggagacagagatacacttcagttacttgataaaaatgtaattgtcaaaatagtcacaacaaggtttgacaggacaactgaagatttgtatgctgtagaaaatgtaaaagaaaaatatggtgtttttgcgcatcaggttgttgactataaagcattagtaggtgatgcgtcagacaatataccaggtgttaagggaattggagataaaactgccataaagctgttagaagagtaccagactctggagaatatatatcagaatctaaataacattaaaggagcgctaaaagagaagttggaatcaggaaaagacatggcatttttatcaaaaagactggctactatcatatgcgatttaccaattgaggtgaatcttgaagaattaaaaaccaaagaatgggacaaagaaagactttatcagattttacttcaacttgagtttaaaagctttattaaaagactgggcttttcagaagagattaactatgcaaggcagaactttcagctacctgaatttagtattaaagaacttcgtgatgtttcagcaatagggggcaaagaaatctatctattgtactcagatgaagaaggacttttttatatttatgaccatcaaacctcaaccatttttacaacttctgataaggaagctattaaagatcttttaacactccaaagcattcaaaaggttgtatatgatttaaaaaatatactccataaggtggactttgatgaagctaatcagataaaaaattgtaatgatgttatgttggcttcatatgttttggacagtacacgcagttcgtacgatttggaaacattgtttatttcttatctcaacactgatatagctgcaatcaaagagaatagatgggctggtgctacagttttattaagaaatctttgggatgaactttcaaaactcattgatttaaactcggcccaatacgtttatgagagcatagagatgcctcttgttcccattttatatgaaatggagaaaatcggttttaaggttgacaaaaacactttgcaggagtatacaaaagagattgagagcaagcttttaaagttggaatcacagatttatcaaatagccggtgaatggtttaacataaactcgccaaaacaactctcatatatattattcgaaaaactgaagcttccggttgttaaaaagaccaaaacaggatattcaacagatgccgaggtattagaagagctgtatgataaacatgacataataccgcttattctggattatagaatgtatacgaaaatactgacaacttactgtcagggactggttcaggcaataaatcctgcaactggaagaattcataccaactttattcagacaggtacggcaactggaagacttgcaagtgcagagcccaatctgcaaaatattcctgtaaaatatgatgagggaaagctaataagaaaggcatttgttccagatgaaggttatgtgttgatagatgctgattattctcagattgagcttagaatacttgcacatatctctgaggatgaacgactgataaatgcttttaaaaataaccttgatattcattcacagacggcggcagagatctttggtgtggatataagtcaggttacaccaattatgcgaagccaggcaaaagcagttaactttggaattgtatatggtatatctgattatggactttcacgggatataaagatttcaagaaaagaagcagccgagtttattaatcgttattttgaaaagtatcccagagtaaaagaatatttggacaatgtcgtcaagtttgcccgtgaaaacggatttgttttgacaatatttaacaggaaaaggtatatcaaggatataaagtctactgctaaaaacctgagaaactatgcagagagaatagcaatgaattcacctatccagggaagtgctgcagatattatgaaaatagcaatgataagagtttataaaaagctaaaagaaaacaatttaaaatcaagaattattctgcaggtccatgacgaacttttgattgaatcaccctatgaagagaaagagatagtaaaggaaatagtaaaatcggagatggaaaatgcggttttattgaaagttcctttggtagttgaagtgaaagaaggttcaaattggtatgaaacaaagtaaaggatcc

SEQ ID NO: 1635 - DNA, 2623 bp, Artificial Sequence
  Description of Artificial Sequence: Synthetic DNA sequence of Caldicellulosiruptor TOK13B DNA Polymerase N775R
atgaaatacctgctgccgaccgctgctgctggtctgctgctcctcgctgcccagccggcgatggccatggaatttgttatttttgatgggaatagtattctgtatagagctttttttgccttgccacagcttactacctcaacaggcatacctacaaatgctatatatggttttttgaatgtgctgttaaaatacttagattctgaaaaaccggattatgtagcagtagcttttgacaaaaaaggcagagctgtccgaaaaagtgaatatgaagaatacaaggctaacagaaaaccgatgccagattctcttcaggttcagataccttacgtaagagaaatacttgctgctctgaacattcctgtactgaaatgtgaagggtatgaagctgatgacgttataggcacacttgtaaatagatttaaagcccaggatttagagattgtgataataaccggagacagagatacacttcagttacttgataaaaatgtaattgtcaaaatagtcacaacaaggtttgacaggacaactgaagatttgtatgctgtagaaaatgtaaaagaaaaatatggtgtttttgcgcatcaggttgttgactataaagcattagtaggtgatgcgtcagacaatataccaggtgttaagggaattggagataaaactgccataaagctgttagaagagtaccagactctggagaatatatatcagaatctaaataacattaaaggagcgctaaaagagaagttggaatcaggaaaagacatggcatttttatcaaaaagactggctactatcatatgcgatttaccaattgaggtgaatcttgaagaattaaaaaccaaagaatgggacaaagaaagactttatcagattttacttcaacttgagtttaaaagctttattaaaagactgggcttttcagaagagattaactatgcaaggcagaactttcagctacctgaatttagtattaaagaacttcgtgatgtttcagcaatagggggcaaagaaatctatctattgtactcagatgaagaaggacttttttatatttatgaccatcaaacctcaaccatttttacaacttctgataaggaagctattaaagatcttttaacactccaaagcattcaaaaggttgtatatgatttaaaaaatatactccataaggtggactttgatgaagctaatcagataaaaaattgtaatgatgttatgttggcttcatatgttttggacagtacacgcagttcgtacgatttggaaacattgtttatttcttatctcaacactgatatagctgcaatcaaagagaatagatgggctggtgctacagttttattaagaaatctttgggatgaactttcaaaactcattgatttaaactcggcccaatacgtttatgagagcatagagatgcctcttgttcccattttatatgaaatggagaaaatcggttttaaggttgacaaaaacactttgcaggagtatacaaaagagattgagagcaagcttttaaagttggaatcacagatttatcaaatagccggtgaatggtttaacataaactcgccaaaacaactctcatatatattattcgaaaaactgaagcttccggttgttaaaaagaccaaaacaggatattcaacagatgccgaggtattagaagagctgtatgataaacatgacataataccgcttattctggattatagaatgtatacgaaaatactgacaacttactgtcagggactggttcaggcaataaatcctgcaactggaagaattcataccaactttattcagacaggtacggcaactggaagacttgcaagtgcagagcccaatctgcaaaatattcctgtaaaatatgatgagggaaagctaataagaaaggcatttgttccagatgaaggttatgtgttgatagatgctgattattctcagattgagcttagaatacttgcacatatctctgaggatgaacgactgataaatgcttttaaaaataaccttgatattcattcacagacggcggcagagatctttggtgtggatataagtcaggttacaccaattatgcgaagccaggcaaaagcagttaactttggaattgtatatggtatatctgattatggactttcacgggatataaagatttcaagaaaagaagcagccgagtttattaatcgttattttgaaaagtatcccagagtaaaagaatatttggacaatgtcgtcaagtttgcccgtgaaaacggatttgttttgacaatatttaacaggaaaaggtatatcaaggatataaagtctactcgtaaaaacctgagaaactatgcagagagaatagcaatgaattcacctatccagggaagtgctgcagatattatgaaaatagcaatgataagagtttataaaaagctaaaagaaaacaatttaaaatcaagaattattctgcaggtccatgacgaacttttgattgaatcaccctatgaagagaaagagatagtaaaggaaatagtaaaatcggagatggaaaatgcggttttattgaaagttcctttggtagttgaagtgaaagaaggttcaaattggtatgaaacaaagtaaaggatcc

SEQ ID NO: 1636 - DNA, 2623 bp, Artificial Sequence
  Description of Artificial Sequence: Synthetic DNA sequence of Caldicellulosiruptor TOK13B DNA Polymerase N775D
atgaaatacctgctgccgaccgctgctgctggtctgctgctcctcgctgcccagccggcgatggccatggaatttgttatttttgatgggaatagtattctgtatagagctttttttgccttgccacagcttactacctcaacaggcatacctacaaatgctatatatggttttttgaatgtgctgttaaaatacttagattctgaaaaaccggattatgtagcagtagcttttgacaaaaaaggcagagctgtccgaaaaagtgaatatgaagaatacaaggctaacagaaaaccgatgccagattctcttcaggttcagataccttacgtaagagaaatacttgctgctctgaacattcctgtactgaaatgtgaagggtatgaagctgatgacgttataggcacacttgtaaatagatttaaagcccaggatttagagattgtgataataaccggagacagagatacacttcagttacttgataaaaatgtaattgtcaaaatagtcacaacaaggtttgacaggacaactgaagatttgtatgctgtagaaaatgtaaaagaaaaatatggtgtttttgcgcatcaggttgttgactataaagcattagtaggtgatgcgtcagacaatataccaggtgttaagggaattggagataaaactgccataaagctgttagaagagtaccagactctggagaatatatatcagaatctaaataacattaaaggagcgctaaaagagaagttggaatcaggaaaagacatggcatttttatcaaaaagactggctactatcatatgcgatttaccaattgaggtgaatcttgaagaattaaaaaccaaagaatgggacaaagaaagactttatcagattttacttcaacttgagtttaaaagctttattaaaagactgggcttttcagaagagattaactatgcaaggcagaactttcagctacctgaatttagtattaaagaacttcgtgatgtttcagcaatagggggcaaagaaatctatctattgtactcagatgaagaaggacttttttatatttatgaccatcaaacctcaaccatttttacaacttctgataaggaagctattaaagatcttttaacactccaaagcattcaaaaggttgtatatgatttaaaaaatatactccataaggtggactttgatgaagctaatcagataaaaaattgtaatgatgttatgttggcttcatatgttttggacagtacacgcagttcgtacgatttggaaacattgtttatttcttatctcaacactgatatagctgcaatcaaagagaatagatgggctggtgctacagttttattaagaaatctttgggatgaactttcaaaactcattgatttaaactcggcccaatacgtttatgagagcatagagatgcctcttgttcccattttatatgaaatggagaaaatcggttttaaggttgacaaaaacactttgcaggagtatacaaaagagattgagagcaagcttttaaagttggaatcacagatttatcaaatagccggtgaatggtttaacataaactcgccaaaacaactctcatatatattattcgaaaaactgaagcttccggttgttaaaaagaccaaaacaggatattcaacagatgccgaggtattagaagagctgtatgataaacatgacataataccgcttattctggattatagaatgtatacgaaaatactgacaacttactgtcagggactggttcaggcaataaatcctgcaactggaagaattcataccaactttattcagacaggtacggcaactggaagacttgcaagtgcagagcccaatctgcaaaatattcctgtaaaatatgatgagggaaagctaataagaaaggcatttgttccagatgaaggttatgtgttgatagatgctgattattctcagattgagcttagaatacttgcacatatctctgaggatgaacgactgataaatgcttttaaaaataaccttgatattcattcacagacggcggcagagatctttggtgtggatataagtcaggttacaccaattatgcgaagccaggcaaaagcagttaactttggaattgtatatggtatatctgattatggactttcacgggatataaagatttcaagaaaagaagcagccgagtttattaatcgttattttgaaaagtatcccagagtaaaagaatatttggacaatgtcgtcaagtttgcccgtgaaaacggatttgttttgacaatatttaacaggaaaaggtatatcaaggatataaagtctactgataaaaacctgagaaactatgcagagagaatagcaatgaattcacctatccagggaagtgctgcagatattatgaaaatagcaatgataagagtttataaaaagctaaaagaaaacaatttaaaatcaagaattattctgcaggtccatgacgaacttttgattgaatcaccctatgaagagaaagagatagtaaaggaaatagtaaaatcggagatggaaaatgcggttttattgaaagttcctttggtagttgaagtgaaagaaggttcaaattggtatgaaacaaagtaaaggatcc

SEQ ID NO: 1637 - DNA, 2623 bp, Artificial Sequence
  Description of Artificial Sequence: Synthetic DNA sequence of Caldicellulosiruptor TOK13B DNA Polymerase N775C
atgaaatacctgctgccgaccgctgctgctggtctgctgctcctcgctgcccagccggcgatggccatggaatttgttatttttgatgggaatagtattctgtatagagctttttttgccttgccacagcttactacctcaacaggcatacctacaaatgctatatatggttttttgaatgtgctgttaaaatacttagattctgaaaaaccggattatgtagcagtagcttttgacaaaaaaggcagagctgtccgaaaaagtgaatatgaagaatacaaggctaacagaaaaccgatgccagattctcttcaggttcagataccttacgtaagagaaatacttgctgctctgaacattcctgtactgaaatgtgaagggtatgaagctgatgacgttataggcacacttgtaaatagatttaaagcccaggatttagagattgtgataataaccggagacagagatacacttcagttacttgataaaaatgtaattgtcaaaatagtcacaacaaggtttgacaggacaactgaagatttgtatgctgtagaaaatgtaaaagaaaaatatggtgtttttgcgcatcaggttgttgactataaagcattagtaggtgatgcgtcagacaatataccaggtgttaagggaattggagataaaactgccataaagctgttagaagagtaccagactctggagaatatatatcagaatctaaataacattaaaggagcgctaaaagagaagttggaatcaggaaaagacatggcatttttatcaaaaagactggctactatcatatgcgatttaccaattgaggtgaatcttgaagaattaaaaaccaaagaatgggacaaagaaagactttatcagattttacttcaacttgagtttaaaagctttattaaaagactgggcttttcagaagagattaactatgcaaggcagaactttcagctacctgaatttagtattaaagaacttcgtgatgtttcagcaatagggggcaaagaaatctatctattgtactcagatgaagaaggacttttttatatttatgaccatcaaacctcaaccatttttacaacttctgataaggaagctattaaagatcttttaacactccaaagcattcaaaaggttgtatatgatttaaaaaatatactccataaggtggactttgatgaagctaatcagataaaaaattgtaatgatgttatgttggcttcatatgttttggacagtacacgcagttcgtacgatttggaaacattgtttatttcttatctcaacactgatatagctgcaatcaaagagaatagatgggctggtgctacagttttattaagaaatctttgggatgaactttcaaaactcattgatttaaactcggcccaatacgtttatgagagcatagagatgcctcttgttcccattttatatgaaatggagaaaatcggttttaaggttgacaaaaacactttgcaggagtatacaaaagagattgagagcaagcttttaaagttggaatcacagatttatcaaatagccggtgaatggtttaacataaactcgccaaaacaactctcatatatattattcgaaaaactgaagcttccggttgttaaaaagaccaaaacaggatattcaacagatgccgaggtattagaagagctgtatgataaacatgacataataccgcttattctggattatagaatgtatacgaaaatactgacaacttactgtcagggactggttcaggcaataaatcctgcaactggaagaattcataccaactttattcagacaggtacggcaactggaagacttgcaagtgcagagcccaatctgcaaaatattcctgtaaaatatgatgagggaaagctaataagaaaggcatttgttccagatgaaggttatgtgttgatagatgctgattattctcagattgagcttagaatacttgcacatatctctgaggatgaacgactgataaatgcttttaaaaataaccttgatattcattcacagacggcggcagagatctttggtgtggatataagtcaggttacaccaattatgcgaagccaggcaaaagcagttaactttggaattgtatatggtatatctgattatggactttcacgggatataaagatttcaagaaaagaagcagccgagtttattaatcgttattttgaaaagtatcccagagtaaaagaatatttggacaatgtcgtcaagtttgcccgtgaaaacggatttgttttgacaatatttaacaggaaaaggtatatcaaggatataaagtctacttgtaaaaacctgagaaactatgcagagagaatagcaatgaattcacctatccagggaagtgctgcagatattatgaaaatagcaatgataagagtttataaaaagctaaaagaaaacaatttaaaatcaagaattattctgcaggtccatgacgaacttttgattgaatcaccctatgaagagaaagagatagtaaaggaaatagtaaaatcggagatggaaaatgcggttttattgaaagttcctttggtagttgaagtgaaagaaggttcaaattggtatgaaacaaagtaaaggatcc

SEQ ID NO: 1638 - DNA, 2623 bp, Artificial Sequence
  Description of Artificial Sequence: Synthetic DNA sequence of Caldicellulosiruptor TOK13B DNA Polymerase N775E
atgaaatacctgctgccgaccgctgctgctggtctgctgctcctcgctgcccagccggcgatggccatggaatttgttatttttgatgggaatagtattctgtatagagctttttttgccttgccacagcttactacctcaacaggcatacctacaaatgctatatatggttttttgaatgtgctgttaaaatacttagattctgaaaaaccggattatgtagcagtagcttttgacaaaaaaggcagagctgtccgaaaaagtgaatatgaagaatacaaggctaacagaaaaccgatgccagattctcttcaggttcagataccttacgtaagagaaatacttgctgctctgaacattcctgtactgaaatgtgaagggtatgaagctgatgacgttataggcacacttgtaaatagatttaaagcccaggatttagagattgtgataataaccggagacagagatacacttcagttacttgataaaaatgtaattgtcaaaatagtcacaacaaggtttgacaggacaactgaagatttgtatgctgtagaaaatgtaaaagaaaaatatggtgtttttgcgcatcaggttgttgactataaagcattagtaggtgatgcgtcagacaatataccaggtgttaagggaattggagataaaactgccataaagctgttagaagagtaccagactctggagaatatatatcagaatctaaataacattaaaggagcgctaaaagagaagttggaatcaggaaaagacatggcatttttatcaaaaagactggctactatcatatgcgatttaccaattgaggtgaatcttgaagaattaaaaaccaaagaatgggacaaagaaagactttatcagattttacttcaacttgagtttaaaagctttattaaaagactgggcttttcagaagagattaactatgcaaggcagaactttcagctacctgaatttagtattaaagaacttcgtgatgtttcagcaatagggggcaaagaaatctatctattgtactcagatgaagaaggacttttttatatttatgaccatcaaacctcaaccatttttacaacttctgataaggaagctattaaagatcttttaacactccaaagcattcaaaaggttgtatatgatttaaaaaatatactccataaggtggactttgatgaagctaatcagataaaaaattgtaatgatgttatgttggcttcatatgttttggacagtacacgcagttcgtacgatttggaaacattgtttatttcttatctcaacactgatatagctgcaatcaaagagaatagatgggctggtgctacagttttattaagaaatctttgggatgaactttcaaaactcattgatttaaactcggcccaatacgtttatgagagcatagagatgcctcttgttcccattttatatgaaatggagaaaatcggttttaaggttgacaaaaacactttgcaggagtatacaaaagagattgagagcaagcttttaaagttggaatcacagatttatcaaatagccggtgaatggtttaacataaactcgccaaaacaactctcatatatattattcgaaaaactgaagcttccggttgttaaaaagaccaaaacaggatattcaacagatgccgaggtattagaagagctgtatgataaacatgacataataccgcttattctggattatagaatgtatacgaaaatactgacaacttactgtcagggactggttcaggcaataaatcctgcaactggaagaattcataccaactttattcagacaggtacggcaactggaagacttgcaagtgcagagcccaatctgcaaaatattcctgtaaaatatgatgagggaaagctaataagaaaggcatttgttccagatgaaggttatgtgttgatagatgctgattattctcagattgagcttagaatacttgcacatatctctgaggatgaacgactgataaatgcttttaaaaataaccttgatattcattcacagacggcggcagagatctttggtgtggatataagtcaggttacaccaattatgcgaagccaggcaaaagcagttaactttggaattgtatatggtatatctgattatggactttcacgggatataaagatttcaagaaaagaagcagccgagtttattaatcgttattttgaaaagtatcccagagtaaaagaatatttggacaatgtcgtcaagtttgcccgtgaaaacggatttgttttgacaatatttaacaggaaaaggtatatcaaggatataaagtctactgaaaaaaacctgagaaactatgcagagagaatagcaatgaattcacctatccagggaagtgctgcagatattatgaaaatagcaatgataagagtttataaaaagctaaaagaaaacaatttaaaatcaagaattattctgcaggtccatgacgaacttttgattgaatcaccctatgaagagaaagagatagtaaaggaaatagtaaaatcggagatggaaaatgcggttttattgaaagttcctttggtagttgaagtgaaagaaggttcaaattggtatgaaacaaagtaaaggatcc

SEQ ID NO: 1639 - DNA, 2623 bp, Artificial Sequence
  Description of Artificial Sequence: Synthetic DNA sequence of Caldicellulosiruptor TOK13B DNA Polymerase N775Q
atgaaatacctgctgccgaccgctgctgctggtctgctgctcctcgctgcccagccggcgatggccatggaatttgttatttttgatgggaatagtattctgtatagagctttttttgccttgccacagcttactacctcaacaggcatacctacaaatgctatatatggttttttgaatgtgctgttaaaatacttagattctgaaaaaccggattatgtagcagtagcttttgacaaaaaaggcagagctgtccgaaaaagtgaatatgaagaatacaaggctaacagaaaaccgatgccagattctcttcaggttcagataccttacgtaagagaaatacttgctgctctgaacattcctgtactgaaatgtgaagggtatgaagctgatgacgttataggcacacttgtaaatagatttaaagcccaggatttagagattgtgataataaccggagacagagatacacttcagttacttgataaaaatgtaattgtcaaaatagtcacaacaaggtttgacaggacaactgaagatttgtatgctgtagaaaatgtaaaagaaaaatatggtgtttttgcgcatcaggttgttgactataaagcattagtaggtgatgcgtcagacaatataccaggtgttaagggaattggagataaaactgccataaagctgttagaagagtaccagactctggagaatatatatcagaatctaaataacattaaaggagcgctaaaagagaagttggaatcaggaaaagacatggcatttttatcaaaaagactggctactatcatatgcgatttaccaattgaggtgaatcttgaagaattaaaaaccaaagaatgggacaaagaaagactttatcagattttacttcaacttgagtttaaaagctttattaaaagactgggcttttcagaagagattaactatgcaaggcagaactttcagctacctgaatttagtattaaagaacttcgtgatgtttcagcaatagggggcaaagaaatctatctattgtactcagatgaagaaggacttttttatatttatgaccatcaaacctcaaccatttttacaacttctgataaggaagctattaaagatcttttaacactccaaagcattcaaaaggttgtatatgatttaaaaaatatactccataaggtggactttgatgaagctaatcagataaaaaattgtaatgatgttatgttggcttcatatgttttggacagtacacgcagttcgtacgatttggaaacattgtttatttcttatctcaacactgatatagctgcaatcaaagagaatagatgggctggtgctacagttttattaagaaatctttgggatgaactttcaaaactcattgatttaaactcggcccaatacgtttatgagagcatagagatgcctcttgttcccattttatatgaaatggagaaaatcggttttaaggttgacaaaaacactttgcaggagtatacaaaagagattgagagcaagcttttaaagttggaatcacagatttatcaaatagccggtgaatggtttaacataaactcgccaaaacaactctcatatatattattcgaaaaactgaagcttccggttgttaaaaagaccaaaacaggatattcaacagatgccgaggtattagaagagctgtatgataaacatgacataataccgcttattctggattatagaatgtatacgaaaatactgacaacttactgtcagggactggttcaggcaataaatcctgcaactggaagaattcataccaactttattcagacaggtacggcaactggaagacttgcaagtgcagagcccaatctgcaaaatattcctgtaaaatatgatgagggaaagctaataagaaaggcatttgttccagatgaaggttatgtgttgatagatgctgattattctcagattgagcttagaatacttgcacatatctctgaggatgaacgactgataaatgcttttaaaaataaccttgatattcattcacagacggcggcagagatctttggtgtggatataagtcaggttacaccaattatgcgaagccaggcaaaagcagttaactttggaattgtatatggtatatctgattatggactttcacgggatataaagatttcaagaaaagaagcagccgagtttattaatcgttattttgaaaagtatcccagagtaaaagaatatttggacaatgtcgtcaagtttgcccgtgaaaacggatttgttttgacaatatttaacaggaaaaggtatatcaaggatataaagtctactcaaaaaaacctgagaaactatgcagagagaatagcaatgaattcacctatccagggaagtgctgcagatattatgaaaatagcaatgataagagtttataaaaagctaaaagaaaacaatttaaaatcaagaattattctgcaggtccatgacgaacttttgattgaatcaccctatgaagagaaagagatagtaaaggaaatagtaaaatcggagatggaaaatgcggttttattgaaagttcctttggtagttgaagtgaaagaaggttcaaattggtatgaaacaaagtaaaggatcc

SEQ ID NO: 1640 - DNA, 2623 bp, Artificial Sequence
  Description of Artificial Sequence: Synthetic DNA sequence of Caldicellulosiruptor TOK13B DNA Polymerase N775G
atgaaatacctgctgccgaccgctgctgctggtctgctgctcctcgctgcccagccggcgatggccatggaatttgttatttttgatgggaatagtattctgtatagagctttttttgccttgccacagcttactacctcaacaggcatacctacaaatgctatatatggttttttgaatgtgctgttaaaatacttagattctgaaaaaccggattatgtagcagtagcttttgacaaaaaaggcagagctgtccgaaaaagtgaatatgaagaatacaaggctaacagaaaaccgatgccagattctcttcaggttcagataccttacgtaagagaaatacttgctgctctgaacattcctgtactgaaatgtgaagggtatgaagctgatgacgttataggcacacttgtaaatagatttaaagcccaggatttagagattgtgataataaccggagacagagatacacttcagttacttgataaaaatgtaattgtcaaaatagtcacaacaaggtttgacaggacaactgaagatttgtatgctgtagaaaatgtaaaagaaaaatatggtgtttttgcgcatcaggttgttgactataaagcattagtaggtgatgcgtcagacaatataccaggtgttaagggaattggagataaaactgccataaagctgttagaagagtaccagactctggagaatatatatcagaatctaaataacattaaaggagcgctaaaagagaagttggaatcaggaaaagacatggcatttttatcaaaaagactggctactatcatatgcgatttaccaattgaggtgaatcttgaagaattaaaaaccaaagaatgggacaaagaaagactttatcagattttacttcaacttgagtttaaaagctttattaaaagactgggcttttcagaagagattaactatgcaaggcagaactttcagctacctgaatttagtattaaagaacttcgtgatgtttcagcaatagggggcaaagaaatctatctattgtactcagatgaagaaggacttttttatatttatgaccatcaaacctcaaccatttttacaacttctgataaggaagctattaaagatcttttaacactccaaagcattcaaaaggttgtatatgatttaaaaaatatactccataaggtggactttgatgaagctaatcagataaaaaattgtaatgatgttatgttggcttcatatgttttggacagtacacgcagttcgtacgatttggaaacattgtttatttcttatctcaacactgatatagctgcaatcaaagagaatagatgggctggtgctacagttttattaagaaatctttgggatgaactttcaaaactcattgatttaaactcggcccaatacgtttatgagagcatagagatgcctcttgttcccattttatatgaaatggagaaaatcggttttaaggttgacaaaaacactttgcaggagtatacaaaagagattgagagcaagcttttaaagttggaatcacagatttatcaaatagccggtgaatggtttaacataaactcgccaaaacaactctcatatatattattcgaaaaactgaagcttccggttgttaaaaagaccaaaacaggatattcaacagatgccgaggtattagaagagctgtatgataaacatgacataataccgcttattctggattatagaatgtatacgaaaatactgacaacttactgtcagggactggttcaggcaataaatcctgcaactggaagaattcataccaactttattcagacaggtacggcaactggaagacttgcaagtgcagagcccaatctgcaaaatattcctgtaaaatatgatgagggaaagctaataagaaaggcatttgttccagatgaaggttatgtgttgatagatgctgattattctcagattgagcttagaatacttgcacatatctctgaggatgaacgactgataaatgcttttaaaaataaccttgatattcattcacagacggcggcagagatctttggtgtggatataagtcaggttacaccaattatgcgaagccaggcaaaagcagttaactttggaattgtatatggtatatctgattatggactttcacgggatataaagatttcaagaaaagaagcagccgagtttattaatcgttattttgaaaagtatcccagagtaaaagaatatttggacaatgtcgtcaagtttgcccgtgaaaacggatttgttttgacaatatttaacaggaaaaggtatatcaaggatataaagtctactggtaaaaacctgagaaactatgcagagagaatagcaatgaattcacctatccagggaagtgctgcagatattatgaaaatagcaatgataagagtttataaaaagctaaaagaaaacaatttaaaatcaagaattattctgcaggtccatgacgaacttttgattgaatcaccctatgaagagaaagagatagtaaaggaaatagtaaaatcggagatggaaaatgcggttttattgaaagttcctttggtagttgaagtgaaagaaggttcaaattggtatgaaacaaagtaaaggatcc

SEQ ID NO: 1641 - DNA, 2623 bp, Artificial Sequence
  Description of Artificial Sequence: Synthetic DNA sequence of Caldicellulosiruptor TOK13B DNA Polymerase N775H
atgaaatacctgctgccgaccgctgctgctggtctgctgctcctcgctgcccagccggcgatggccatggaatttgttatttttgatgggaatagtattctgtatagagctttttttgccttgccacagcttactacctcaacaggcatacctacaaatgctatatatggttttttgaatgtgctgttaaaatacttagattctgaaaaaccggattatgtagcagtagcttttgacaaaaaaggcagagctgtccgaaaaagtgaatatgaagaatacaaggctaacagaaaaccgatgccagattctcttcaggttcagataccttacgtaagagaaatacttgctgctctgaacattcctgtactgaaatgtgaagggtatgaagctgatgacgttataggcacacttgtaaatagatttaaagcccaggatttagagattgtgataataaccggagacagagatacacttcagttacttgataaaaatgtaattgtcaaaatagtcacaacaaggtttgacaggacaactgaagatttgtatgctgtagaaaatgtaaaagaaaaatatggtgtttttgcgcatcaggttgttgactataaagcattagtaggtgatgcgtcagacaatataccaggtgttaagggaattggagataaaactgccataaagctgttagaagagtaccagactctggagaatatatatcagaatctaaataacattaaaggagcgctaaaagagaagttggaatcaggaaaagacatggcatttttatcaaaaagactggctactatcatatgcgatttaccaattgaggtgaatcttgaagaattaaaaaccaaagaatgggacaaagaaagactttatcagattttacttcaacttgagtttaaaagctttattaaaagactgggcttttcagaagagattaactatgcaaggcagaactttcagctacctgaatttagtattaaagaacttcgtgatgtttcagcaatagggggcaaagaaatctatctattgtactcagatgaagaaggacttttttatatttatgaccatcaaacctcaaccatttttacaacttctgataaggaagctattaaagatcttttaacactccaaagcattcaaaaggttgtatatgatttaaaaaatatactccataaggtggactttgatgaagctaatcagataaaaaattgtaatgatgttatgttggcttcatatgttttggacagtacacgcagttcgtacgatttggaaacattgtttatttcttatctcaacactgatatagctgcaatcaaagagaatagatgggctggtgctacagttttattaagaaatctttgggatgaactttcaaaactcattgatttaaactcggcccaatacgtttatgagagcatagagatgcctcttgttcccattttatatgaaatggagaaaatcggttttaaggttgacaaaaacactttgcaggagtatacaaaagagattgagagcaagcttttaaagttggaatcacagatttatcaaatagccggtgaatggtttaacataaactcgccaaaacaactctcatatatattattcgaaaaactgaagcttccggttgttaaaaagaccaaaacaggatattcaacagatgccgaggtattagaagagctgtatgataaacatgacataataccgcttattctggattatagaatgtatacgaaaatactgacaacttactgtcagggactggttcaggcaataaatcctgcaactggaagaattcataccaactttattcagacaggtacggcaactggaagacttgcaagtgcagagcccaatctgcaaaatattcctgtaaaatatgatgagggaaagctaataagaaaggcatttgttccagatgaaggttatgtgttgatagatgctgattattctcagattgagcttagaatacttgcacatatctctgaggatgaacgactgataaatgcttttaaaaataaccttgatattcattcacagacggcggcagagatctttggtgtggatataagtcaggttacaccaattatgcgaagccaggcaaaagcagttaactttggaattgtatatggtatatctgattatggactttcacgggatataaagatttcaagaaaagaagcagccgagtttattaatcgttattttgaaaagtatcccagagtaaaagaatatttggacaatgtcgtcaagtttgcccgtgaaaacggatttgttttgacaatatttaacaggaaaaggtatatcaaggatataaagtctactcataaaaacctgagaaactatgcagagagaatagcaatgaattcacctatccagggaagtgctgcagatattatgaaaatagcaatgataagagtttataaaaagctaaaagaaaacaatttaaaatcaagaattattctgcaggtccatgacgaacttttgattgaatcaccctatgaagagaaagagatagtaaaggaaatagtaaaatcggagatggaaaatgcggttttattgaaagttcctttggtagttgaagtgaaagaaggttcaaattggtatgaaacaaagtaaaggatcc

SEQ ID NO: 1642 - DNA, 2623 bp, Artificial Sequence
  Description of Artificial Sequence: Synthetic DNA sequence of Caldicellulosiruptor TOK13B DNA Polymerase N775I
atgaaatacctgctgccgaccgctgctgctggtctgctgctcctcgctgcccagccggcgatggccatggaatttgttatttttgatgggaatagtattctgtatagagctttttttgccttgccacagcttactacctcaacaggcatacctacaaatgctatatatggttttttgaatgtgctgttaaaatacttagattctgaaaaaccggattatgtagcagtagcttttgacaaaaaaggcagagctgtccgaaaaagtgaatatgaagaatacaaggctaacagaaaaccgatgccagattctcttcaggttcagataccttacgtaagagaaatacttgctgctctgaacattcctgtactgaaatgtgaagggtatgaagctgatgacgttataggcacacttgtaaatagatttaaagcccaggatttagagattgtgataataaccggagacagagatacacttcagttacttgataaaaatgtaattgtcaaaatagtcacaacaaggtttgacaggacaactgaagatttgtatgctgtagaaaatgtaaaagaaaaatatggtgtttttgcgcatcaggttgttgactataaagcattagtaggtgatgcgtcagacaatataccaggtgttaagggaattggagataaaactgccataaagctgttagaagagtaccagactctggagaatatatatcagaatctaaataacattaaaggagcgctaaaagagaagttggaatcaggaaaagacatggcatttttatcaaaaagactggctactatcatatgcgatttaccaattgaggtgaatcttgaagaattaaaaaccaaagaatgggacaaagaaagactttatcagattttacttcaacttgagtttaaaagctttattaaaagactgggcttttcagaagagattaactatgcaaggcagaactttcagctacctgaatttagtattaaagaacttcgtgatgtttcagcaatagggggcaaagaaatctatctattgtactcagatgaagaaggacttttttatatttatgaccatcaaacctcaaccatttttacaacttctgataaggaagctattaaagatcttttaacactccaaagcattcaaaaggttgtatatgatttaaaaaatatactccataaggtggactttgatgaagctaatcagataaaaaattgtaatgatgttatgttggcttcatatgttttggacagtacacgcagttcgtacgatttggaaacattgtttatttcttatctcaacactgatatagctgcaatcaaagagaatagatgggctggtgctacagttttattaagaaatctttgggatgaactttcaaaactcattgatttaaactcggcccaatacgtttatgagagcatagagatgcctcttgttcccattttatatgaaatggagaaaatcggttttaaggttgacaaaaacactttgcaggagtatacaaaagagattgagagcaagcttttaaagttggaatcacagatttatcaaatagccggtgaatggtttaacataaactcgccaaaacaactctcatatatattattcgaaaaactgaagcttccggttgttaaaaagaccaaaacaggatattcaacagatgccgaggtattagaagagctgtatgataaacatgacataataccgcttattctggattatagaatgtatacgaaaatactgacaacttactgtcagggactggttcaggcaataaatcctgcaactggaagaattcataccaactttattcagacaggtacggcaactggaagacttgcaagtgcagagcccaatctgcaaaatattcctgtaaaatatgatgagggaaagctaataagaaaggcatttgttccagatgaaggttatgtgttgatagatgctgattattctcagattgagcttagaatacttgcacatatctctgaggatgaacgactgataaatgcttttaaaaataaccttgatattcattcacagacggcggcagagatctttggtgtggatataagtcaggttacaccaattatgcgaagccaggcaaaagcagttaactttggaattgtatatggtatatctgattatggactttcacgggatataaagatttcaagaaaagaagcagccgagtttattaatcgttattttgaaaagtatcccagagtaaaagaatatttggacaatgtcgtcaagtttgcccgtgaaaacggatttgttttgacaatatttaacaggaaaaggtatatcaaggatataaagtctactattaaaaacctgagaaactatgcagagagaatagcaatgaattcacctatccagggaagtgctgcagatattatgaaaatagcaatgataagagtttataaaaagctaaaagaaaacaatttaaaatcaagaattattctgcaggtccatgacgaacttttgattgaatcaccctatgaagagaaagagatagtaaaggaaatagtaaaatcggagatggaaaatgcggttttattgaaagttcctttggtagttgaagtgaaagaaggttcaaattggtatgaaacaaagtaaaggatcc

SEQ ID NO: 1643 - DNA, 2623 bp, Artificial Sequence
  Description of Artificial Sequence: Synthetic DNA sequence of Caldicellulosiruptor TOK13B DNA Polymerase N775L
atgaaatacctgctgccgaccgctgctgctggtctgctgctcctcgctgcccagccggcgatggccatggaatttgttatttttgatgggaatagtattctgtatagagctttttttgccttgccacagcttactacctcaacaggcatacctacaaatgctatatatggttttttgaatgtgctgttaaaatacttagattctgaaaaaccggattatgtagcagtagcttttgacaaaaaaggcagagctgtccgaaaaagtgaatatgaagaatacaaggctaacagaaaaccgatgccagattctcttcaggttcagataccttacgtaagagaaatacttgctgctctgaacattcctgtactgaaatgtgaagggtatgaagctgatgacgttataggcacacttgtaaatagatttaaagcccaggatttagagattgtgataataaccggagacagagatacacttcagttacttgataaaaatgtaattgtcaaaatagtcacaacaaggtttgacaggacaactgaagatttgtatgctgtagaaaatgtaaaagaaaaatatggtgtttttgcgcatcaggttgttgactataaagcattagtaggtgatgcgtcagacaatataccaggtgttaagggaattggagataaaactgccataaagctgttagaagagtaccagactctggagaatatatatcagaatctaaataacattaaaggagcgctaaaagagaagttggaatcaggaaaagacatggcatttttatcaaaaagactggctactatcatatgcgatttaccaattgaggtgaatcttgaagaattaaaaaccaaagaatgggacaaagaaagactttatcagattttacttcaacttgagtttaaaagctttattaaaagactgggcttttcagaagagattaactatgcaaggcagaactttcagctacctgaatttagtattaaagaacttcgtgatgtttcagcaatagggggcaaagaaatctatctattgtactcagatgaagaaggacttttttatatttatgaccatcaaacctcaaccatttttacaacttctgataaggaagctattaaagatcttttaacactccaaagcattcaaaaggttgtatatgatttaaaaaatatactccataaggtggactttgatgaagctaatcagataaaaaattgtaatgatgttatgttggcttcatatgttttggacagtacacgcagttcgtacgatttggaaacattgtttatttcttatctcaacactgatatagctgcaatcaaagagaatagatgggctggtgctacagttttattaagaaatctttgggatgaactttcaaaactcattgatttaaactcggcccaatacgtttatgagagcatagagatgcctcttgttcccattttatatgaaatggagaaaatcggttttaaggttgacaaaaacactttgcaggagtatacaaaagagattgagagcaagcttttaaagttggaatcacagatttatcaaatagccggtgaatggtttaacataaactcgccaaaacaactctcatatatattattcgaaaaactgaagcttccggttgttaaaaagaccaaaacaggatattcaacagatgccgaggtattagaagagctgtatgataaacatgacataataccgcttattctggattatagaatgtatacgaaaatactgacaacttactgtcagggactggttcaggcaataaatcctgcaactggaagaattcataccaactttattcagacaggtacggcaactggaagacttgcaagtgcagagcccaatctgcaaaatattcctgtaaaatatgatgagggaaagctaataagaaaggcatttgttccagatgaaggttatgtgttgatagatgctgattattctcagattgagcttagaatacttgcacatatctctgaggatgaacgactgataaatgcttttaaaaataaccttgatattcattcacagacggcggcagagatctttggtgtggatataagtcaggttacaccaattatgcgaagccaggcaaaagcagttaactttggaattgtatatggtatatctgattatggactttcacgggatataaagatttcaagaaaagaagcagccgagtttattaatcgttattttgaaaagtatcccagagtaaaagaatatttggacaatgtcgtcaagtttgcccgtgaaaacggatttgttttgacaatatttaacaggaaaaggtatatcaaggatataaagtctactcttaaaaacctgagaaactatgcagagagaatagcaatgaattcacctatccagggaagtgctgcagatattatgaaaatagcaatgataagagtttataaaaagctaaaagaaaacaatttaaaatcaagaattattctgcaggtccatgacgaacttttgattgaatcaccctatgaagagaaagagatagtaaaggaaatagtaaaatcggagatggaaaatgcggttttattgaaagttcctttggtagttgaagtgaaagaaggttcaaattggtatgaaacaaagtaaaggatcc

SEQ ID NO: 1644 - DNA, 2623 bp, Artificial Sequence
  Description of Artificial Sequence: Synthetic DNA sequence of Caldicellulosiruptor TOK13B DNA Polymerase N775K
atgaaatacctgctgccgaccgctgctgctggtctgctgctcctcgctgcccagccggcgatggccatggaatttgttatttttgatgggaatagtattctgtatagagctttttttgccttgccacagcttactacctcaacaggcatacctacaaatgctatatatggttttttgaatgtgctgttaaaatacttagattctgaaaaaccggattatgtagcagtagcttttgacaaaaaaggcagagctgtccgaaaaagtgaatatgaagaatacaaggctaacagaaaaccgatgccagattctcttcaggttcagataccttacgtaagagaaatacttgctgctctgaacattcctgtactgaaatgtgaagggtatgaagctgatgacgttataggcacacttgtaaatagatttaaagcccaggatttagagattgtgataataaccggagacagagatacacttcagttacttgataaaaatgtaattgtcaaaatagtcacaacaaggtttgacaggacaactgaagatttgtatgctgtagaaaatgtaaaagaaaaatatggtgtttttgcgcatcaggttgttgactataaagcattagtaggtgatgcgtcagacaatataccaggtgttaagggaattggagataaaactgccataaagctgttagaagagtaccagactctggagaatatatatcagaatctaaataacattaaaggagcgctaaaagagaagttggaatcaggaaaagacatggcatttttatcaaaaagactggctactatcatatgcgatttaccaattgaggtgaatcttgaagaattaaaaaccaaagaatgggacaaagaaagactttatcagattttacttcaacttgagtttaaaagctttattaaaagactgggcttttcagaagagattaactatgcaaggcagaactttcagctacctgaatttagtattaaagaacttcgtgatgtttcagcaatagggggcaaagaaatctatctattgtactcagatgaagaaggacttttttatatttatgaccatcaaacctcaaccatttttacaacttctgataaggaagctattaaagatcttttaacactccaaagcattcaaaaggttgtatatgatttaaaaaatatactccataaggtggactttgatgaagctaatcagataaaaaattgtaatgatgttatgttggcttcatatgttttggacagtacacgcagttcgtacgatttggaaacattgtttatttcttatctcaacactgatatagctgcaatcaaagagaatagatgggctggtgctacagttttattaagaaatctttgggatgaactttcaaaactcattgatttaaactcggcccaatacgtttatgagagcatagagatgcctcttgttcccattttatatgaaatggagaaaatcggttttaaggttgacaaaaacactttgcaggagtatacaaaagagattgagagcaagcttttaaagttggaatcacagatttatcaaatagccggtgaatggtttaacataaactcgccaaaacaactctcatatatattattcgaaaaactgaagcttccggttgttaaaaagaccaaaacaggatattcaacagatgccgaggtattagaagagctgtatgataaacatgacataataccgcttattctggattatagaatgtatacgaaaatactgacaacttactgtcagggactggttcaggcaataaatcctgcaactggaagaattcataccaactttattcagacaggtacggcaactggaagacttgcaagtgcagagcccaatctgcaaaatattcctgtaaaatatgatgagggaaagctaataagaaaggcatttgttccagatgaaggttatgtgttgatagatgctgattattctcagattgagcttagaatacttgcacatatctctgaggatgaacgactgataaatgcttttaaaaataaccttgatattcattcacagacggcggcagagatctttggtgtggatataagtcaggttacaccaattatgcgaagccaggcaaaagcagttaactttggaattgtatatggtatatctgattatggactttcacgggatataaagatttcaagaaaagaagcagccgagtttattaatcgttattttgaaaagtatcccagagtaaaagaatatttggacaatgtcgtcaagtttgcccgtgaaaacggatttgttttgacaatatttaacaggaaaaggtatatcaaggatataaagtctactaaaaaaaacctgagaaactatgcagagagaatagcaatgaattcacctatccagggaagtgctgcagatattatgaaaatagcaatgataagagtttataaaaagctaaaagaaaacaatttaaaatcaagaattattctgcaggtccatgacgaacttttgattgaatcaccctatgaagagaaagagatagtaaaggaaatagtaaaatcggagatggaaaatgcggttttattgaaagttcctttggtagttgaagtgaaagaaggttcaaattggtatgaaacaaagtaaaggatcc

SEQ ID NO: 1645 - DNA, 2623 bp, Artificial Sequence
  Description of Artificial Sequence: Synthetic DNA sequence of Caldicellulosiruptor TOK13B DNA Polymerase N775M
atgaaatacctgctgccgaccgctgctgctggtctgctgctcctcgctgcccagccggcgatggccatggaatttgttatttttgatgggaatagtattctgtatagagctttttttgccttgccacagcttactacctcaacaggcatacctacaaatgctatatatggttttttgaatgtgctgttaaaatacttagattctgaaaaaccggattatgtagcagtagcttttgacaaaaaaggcagagctgtccgaaaaagtgaatatgaagaatacaaggctaacagaaaaccgatgccagattctcttcaggttcagataccttacgtaagagaaatacttgctgctctgaacattcctgtactgaaatgtgaagggtatgaagctgatgacgttataggcacacttgtaaatagatttaaagcccaggatttagagattgtgataataaccggagacagagatacacttcagttacttgataaaaatgtaattgtcaaaatagtcacaacaaggtttgacaggacaactgaagatttgtatgctgtagaaaatgtaaaagaaaaatatggtgtttttgcgcatcaggttgttgactataaagcattagtaggtgatgcgtcagacaatataccaggtgttaagggaattggagataaaactgccataaagctgttagaagagtaccagactctggagaatatatatcagaatctaaataacattaaaggagcgctaaaagagaagttggaatcaggaaaagacatggcatttttatcaaaaagactggctactatcatatgcgatttaccaattgaggtgaatcttgaagaattaaaaaccaaagaatgggacaaagaaagactttatcagattttacttcaacttgagtttaaaagctttattaaaagactgggcttttcagaagagattaactatgcaaggcagaactttcagctacctgaatttagtattaaagaacttcgtgatgtttcagcaatagggggcaaagaaatctatctattgtactcagatgaagaaggacttttttatatttatgaccatcaaacctcaaccatttttacaacttctgataaggaagctattaaagatcttttaacactccaaagcattcaaaaggttgtatatgatttaaaaaatatactccataaggtggactttgatgaagctaatcagataaaaaattgtaatgatgttatgttggcttcatatgttttggacagtacacgcagttcgtacgatttggaaacattgtttatttcttatctcaacactgatatagctgcaatcaaagagaatagatgggctggtgctacagttttattaagaaatctttgggatgaactttcaaaactcattgatttaaactcggcccaatacgtttatgagagcatagagatgcctcttgttcccattttatatgaaatggagaaaatcggttttaaggttgacaaaaacactttgcaggagtatacaaaagagattgagagcaagcttttaaagttggaatcacagatttatcaaatagccggtgaatggtttaacataaactcgccaaaacaactctcatatatattattcgaaaaactgaagcttccggttgttaaaaagaccaaaacaggatattcaacagatgccgaggtattagaagagctgtatgataaacatgacataataccgcttattctggattatagaatgtatacgaaaatactgacaacttactgtcagggactggttcaggcaataaatcctgcaactggaagaattcataccaactttattcagacaggtacggcaactggaagacttgcaagtgcagagcccaatctgcaaaatattcctgtaaaatatgatgagggaaagctaataagaaaggcatttgttccagatgaaggttatgtgttgatagatgctgattattctcagattgagcttagaatacttgcacatatctctgaggatgaacgactgataaatgcttttaaaaataaccttgatattcattcacagacggcggcagagatctttggtgtggatataagtcaggttacaccaattatgcgaagccaggcaaaagcagttaactttggaattgtatatggtatatctgattatggactttcacgggatataaagatttcaagaaaagaagcagccgagtttattaatcgttattttgaaaagtatcccagagtaaaagaatatttggacaatgtcgtcaagtttgcccgtgaaaacggatttgttttgacaatatttaacaggaaaaggtatatcaaggatataaagtctactatgaaaaacctgagaaactatgcagagagaatagcaatgaattcacctatccagggaagtgctgcagatattatgaaaatagcaatgataagagtttataaaaagctaaaagaaaacaatttaaaatcaagaattattctgcaggtccatgacgaacttttgattgaatcaccctatgaagagaaagagatagtaaaggaaatagtaaaatcggagatggaaaatgcggttttattgaaagttcctttggtagttgaagtgaaagaaggttcaaattggtatgaaacaaagtaaaggatcc

SEQ ID NO: 1646 - DNA, 2623 bp, Artificial Sequence
  Description of Artificial Sequence: Synthetic DNA sequence of Caldicellulosiruptor TOK13B DNA Polymerase N775F
atgaaatacctgctgccgaccgctgctgctggtctgctgctcctcgctgcccagccggcgatggccatggaatttgttatttttgatgggaatagtattctgtatagagctttttttgccttgccacagcttactacctcaacaggcatacctacaaatgctatatatggttttttgaatgtgctgttaaaatacttagattctgaaaaaccggattatgtagcagtagcttttgacaaaaaaggcagagctgtccgaaaaagtgaatatgaagaatacaaggctaacagaaaaccgatgccagattctcttcaggttcagataccttacgtaagagaaatacttgctgctctgaacattcctgtactgaaatgtgaagggtatgaagctgatgacgttataggcacacttgtaaatagatttaaagcccaggatttagagattgtgataataaccggagacagagatacacttcagttacttgataaaaatgtaattgtcaaaatagtcacaacaaggtttgacaggacaactgaagatttgtatgctgtagaaaatgtaaaagaaaaatatggtgtttttgcgcatcaggttgttgactataaagcattagtaggtgatgcgtcagacaatataccaggtgttaagggaattggagataaaactgccataaagctgttagaagagtaccagactctggagaatatatatcagaatctaaataacattaaaggagcgctaaaagagaagttggaatcaggaaaagacatggcatttttatcaaaaagactggctactatcatatgcgatttaccaattgaggtgaatcttgaagaattaaaaaccaaagaatgggacaaagaaagactttatcagattttacttcaacttgagtttaaaagctttattaaaagactgggcttttcagaagagattaactatgcaaggcagaactttcagctacctgaatttagtattaaagaacttcgtgatgtttcagcaatagggggcaaagaaatctatctattgtactcagatgaagaaggacttttttatatttatgaccatcaaacctcaaccatttttacaacttctgataaggaagctattaaagatcttttaacactccaaagcattcaaaaggttgtatatgatttaaaaaatatactccataaggtggactttgatgaagctaatcagataaaaaattgtaatgatgttatgttggcttcatatgttttggacagtacacgcagttcgtacgatttggaaacattgtttatttcttatctcaacactgatatagctgcaatcaaagagaatagatgggctggtgctacagttttattaagaaatctttgggatgaactttcaaaactcattgatttaaactcggcccaatacgtttatgagagcatagagatgcctcttgttcccattttatatgaaatggagaaaatcggttttaaggttgacaaaaacactttgcaggagtatacaaaagagattgagagcaagcttttaaagttggaatcacagatttatcaaatagccggtgaatggtttaacataaactcgccaaaacaactctcatatatattattcgaaaaactgaagcttccggttgttaaaaagaccaaaacaggatattcaacagatgccgaggtattagaagagctgtatgataaacatgacataataccgcttattctggattatagaatgtatacgaaaatactgacaacttactgtcagggactggttcaggcaataaatcctgcaactggaagaattcataccaactttattcagacaggtacggcaactggaagacttgcaagtgcagagcccaatctgcaaaatattcctgtaaaatatgatgagggaaagctaataagaaaggcatttgttccagatgaaggttatgtgttgatagatgctgattattctcagattgagcttagaatacttgcacatatctctgaggatgaacgactgataaatgcttttaaaaataaccttgatattcattcacagacggcggcagagatctttggtgtggatataagtcaggttacaccaattatgcgaagccaggcaaaagcagttaactttggaattgtatatggtatatctgattatggactttcacgggatataaagatttcaagaaaagaagcagccgagtttattaatcgttattttgaaaagtatcccagagtaaaagaatatttggacaatgtcgtcaagtttgcccgtgaaaacggatttgttttgacaatatttaacaggaaaaggtatatcaaggatataaagtctacttttaaaaacctgagaaactatgcagagagaatagcaatgaattcacctatccagggaagtgctgcagatattatgaaaatagcaatgataagagtttataaaaagctaaaagaaaacaatttaaaatcaagaattattctgcaggtccatgacgaacttttgattgaatcaccctatgaagagaaagagatagtaaaggaaatagtaaaatcggagatggaaaatgcggttttattgaaagttcctttggtagttgaagtgaaagaaggttcaaattggtatgaaacaaagtaaaggatcc

SEQ ID NO: 1647 - DNA, 2623 bp, Artificial Sequence
  Description of Artificial Sequence: Synthetic DNA sequence of Caldicellulosiruptor TOK13B DNA Polymerase N775P
atgaaatacctgctgccgaccgctgctgctggtctgctgctcctcgctgcccagccggcgatggccatggaatttgttatttttgatgggaatagtattctgtatagagctttttttgccttgccacagcttactacctcaacaggcatacctacaaatgctatatatggttttttgaatgtgctgttaaaatacttagattctgaaaaaccggattatgtagcagtagcttttgacaaaaaaggcagagctgtccgaaaaagtgaatatgaagaatacaaggctaacagaaaaccgatgccagattctcttcaggttcagataccttacgtaagagaaatacttgctgctctgaacattcctgtactgaaatgtgaagggtatgaagctgatgacgttataggcacacttgtaaatagatttaaagcccaggatttagagattgtgataataaccggagacagagatacacttcagttacttgataaaaatgtaattgtcaaaatagtcacaacaaggtttgacaggacaactgaagatttgtatgctgtagaaaatgtaaaagaaaaatatggtgtttttgcgcatcaggttgttgactataaagcattagtaggtgatgcgtcagacaatataccaggtgttaagggaattggagataaaactgccataaagctgttagaagagtaccagactctggagaatatatatcagaatctaaataacattaaaggagcgctaaaagagaagttggaatcaggaaaagacatggcatttttatcaaaaagactggctactatcatatgcgatttaccaattgaggtgaatcttgaagaattaaaaaccaaagaatgggacaaagaaagactttatcagattttacttcaacttgagtttaaaagctttattaaaagactgggcttttcagaagagattaactatgcaaggcagaactttcagctacctgaatttagtattaaagaacttcgtgatgtttcagcaatagggggcaaagaaatctatctattgtactcagatgaagaaggacttttttatatttatgaccatcaaacctcaaccatttttacaacttctgataaggaagctattaaagatcttttaacactccaaagcattcaaaaggttgtatatgatttaaaaaatatactccataaggtggactttgatgaagctaatcagataaaaaattgtaatgatgttatgttggcttcatatgttttggacagtacacgcagttcgtacgatttggaaacattgtttatttcttatctcaacactgatatagctgcaatcaaagagaatagatgggctggtgctacagttttattaagaaatctttgggatgaactttcaaaactcattgatttaaactcggcccaatacgtttatgagagcatagagatgcctcttgttcccattttatatgaaatggagaaaatcggttttaaggttgacaaaaacactttgcaggagtatacaaaagagattgagagcaagcttttaaagttggaatcacagatttatcaaatagccggtgaatggtttaacataaactcgccaaaacaactctcatatatattattcgaaaaactgaagcttccggttgttaaaaagaccaaaacaggatattcaacagatgccgaggtattagaagagctgtatgataaacatgacataataccgcttattctggattatagaatgtatacgaaaatactgacaacttactgtcagggactggttcaggcaataaatcctgcaactggaagaattcataccaactttattcagacaggtacggcaactggaagacttgcaagtgcagagcccaatctgcaaaatattcctgtaaaatatgatgagggaaagctaataagaaaggcatttgttccagatgaaggttatgtgttgatagatgctgattattctcagattgagcttagaatacttgcacatatctctgaggatgaacgactgataaatgcttttaaaaataaccttgatattcattcacagacggcggcagagatctttggtgtggatataagtcaggttacaccaattatgcgaagccaggcaaaagcagttaactttggaattgtatatggtatatctgattatggactttcacgggatataaagatttcaagaaaagaagcagccgagtttattaatcgttattttgaaaagtatcccagagtaaaagaatatttggacaatgtcgtcaagtttgcccgtgaaaacggatttgttttgacaatatttaacaggaaaaggtatatcaaggatataaagtctactcctaaaaacctgagaaactatgcagagagaatagcaatgaattcacctatccagggaagtgctgcagatattatgaaaatagcaatgataagagtttataaaaagctaaaagaaaacaatttaaaatcaagaattattctgcaggtccatgacgaacttttgattgaatcaccctatgaagagaaagagatagtaaaggaaatagtaaaatcggagatggaaaatgcggttttattgaaagttcctttggtagttgaagtgaaagaaggttcaaattggtatgaaacaaagtaaaggatcc

SEQ ID NO: 1648 - DNA, 2623 bp, Artificial Sequence
  Description of Artificial Sequence: Synthetic DNA sequence of Caldicellulosiruptor TOK13B DNA Polymerase N775S
atgaaatacctgctgccgaccgctgctgctggtctgctgctcctcgctgcccagccggcgatggccatggaatttgttatttttgatgggaatagtattctgtatagagctttttttgccttgccacagcttactacctcaacaggcatacctacaaatgctatatatggttttttgaatgtgctgttaaaatacttagattctgaaaaaccggattatgtagcagtagcttttgacaaaaaaggcagagctgtccgaaaaagtgaatatgaagaatacaaggctaacagaaaaccgatgccagattctcttcaggttcagataccttacgtaagagaaatacttgctgctctgaacattcctgtactgaaatgtgaagggtatgaagctgatgacgttataggcacacttgtaaatagatttaaagcccaggatttagagattgtgataataaccggagacagagatacacttcagttacttgataaaaatgtaattgtcaaaatagtcacaacaaggtttgacaggacaactgaagatttgtatgctgtagaaaatgtaaaagaaaaatatggtgtttttgcgcatcaggttgttgactataaagcattagtaggtgatgcgtcagacaatataccaggtgttaagggaattggagataaaactgccataaagctgttagaagagtaccagactctggagaatatatatcagaatctaaataacattaaaggagcgctaaaagagaagttggaatcaggaaaagacatggcatttttatcaaaaagactggctactatcatatgcgatttaccaattgaggtgaatcttgaagaattaaaaaccaaagaatgggacaaagaaagactttatcagattttacttcaacttgagtttaaaagctttattaaaagactgggcttttcagaagagattaactatgcaaggcagaactttcagctacctgaatttagtattaaagaacttcgtgatgtttcagcaatagggggcaaagaaatctatctattgtactcagatgaagaaggacttttttatatttatgaccatcaaacctcaaccatttttacaacttctgataaggaagctattaaagatcttttaacactccaaagcattcaaaaggttgtatatgatttaaaaaatatactccataaggtggactttgatgaagctaatcagataaaaaattgtaatgatgttatgttggcttcatatgttttggacagtacacgcagttcgtacgatttggaaacattgtttatttcttatctcaacactgatatagctgcaatcaaagagaatagatgggctggtgctacagttttattaagaaatctttgggatgaactttcaaaactcattgatttaaactcggcccaatacgtttatgagagcatagagatgcctcttgttcccattttatatgaaatggagaaaatcggttttaaggttgacaaaaacactttgcaggagtatacaaaagagattgagagcaagcttttaaagttggaatcacagatttatcaaatagccggtgaatggtttaacataaactcgccaaaacaactctcatatatattattcgaaaaactgaagcttccggttgttaaaaagaccaaaacaggatattcaacagatgccgaggtattagaagagctgtatgataaacatgacataataccgcttattctggattatagaatgtatacgaaaatactgacaacttactgtcagggactggttcaggcaataaatcctgcaactggaagaattcataccaactttattcagacaggtacggcaactggaagacttgcaagtgcagagcccaatctgcaaaatattcctgtaaaatatgatgagggaaagctaataagaaaggcatttgttccagatgaaggttatgtgttgatagatgctgattattctcagattgagcttagaatacttgcacatatctctgaggatgaacgactgataaatgcttttaaaaataaccttgatattcattcacagacggcggcagagatctttggtgtggatataagtcaggttacaccaattatgcgaagccaggcaaaagcagttaactttggaattgtatatggtatatctgattatggactttcacgggatataaagatttcaagaaaagaagcagccgagtttattaatcgttattttgaaaagtatcccagagtaaaagaatatttggacaatgtcgtcaagtttgcccgtgaaaacggatttgttttgacaatatttaacaggaaaaggtatatcaaggatataaagtctacttctaaaaacctgagaaactatgcagagagaatagcaatgaattcacctatccagggaagtgctgcagatattatgaaaatagcaatgataagagtttataaaaagctaaaagaaaacaatttaaaatcaagaattattctgcaggtccatgacgaacttttgattgaatcaccctatgaagagaaagagatagtaaaggaaatagtaaaatcggagatggaaaatgcggttttattgaaagttcctttggtagttgaagtgaaagaaggttcaaattggtatgaaacaaagtaaaggatcc

SEQ ID NO: 1649 - DNA, 2623 bp, Artificial Sequence
  Description of Artificial Sequence: Synthetic DNA sequence of Caldicellulosiruptor TOK13B DNA Polymerase N775T
atgaaatacctgctgccgaccgctgctgctggtctgctgctcctcgctgcccagccggcgatggccatggaatttgttatttttgatgggaatagtattctgtatagagctttttttgccttgccacagcttactacctcaacaggcatacctacaaatgctatatatggttttttgaatgtgctgttaaaatacttagattctgaaaaaccggattatgtagcagtagcttttgacaaaaaaggcagagctgtccgaaaaagtgaatatgaagaatacaaggctaacagaaaaccgatgccagattctcttcaggttcagataccttacgtaagagaaatacttgctgctctgaacattcctgtactgaaatgtgaagggtatgaagctgatgacgttataggcacacttgtaaatagatttaaagcccaggatttagagattgtgataataaccggagacagagatacacttcagttacttgataaaaatgtaattgtcaaaatagtcacaacaaggtttgacaggacaactgaagatttgtatgctgtagaaaatgtaaaagaaaaatatggtgtttttgcgcatcaggttgttgactataaagcattagtaggtgatgcgtcagacaatataccaggtgttaagggaattggagataaaactgccataaagctgttagaagagtaccagactctggagaatatatatcagaatctaaataacattaaaggagcgctaaaagagaagttggaatcaggaaaagacatggcatttttatcaaaaagactggctactatcatatgcgatttaccaattgaggtgaatcttgaagaattaaaaaccaaagaatgggacaaagaaagactttatcagattttacttcaacttgagtttaaaagctttattaaaagactgggcttttcagaagagattaactatgcaaggcagaactttcagctacctgaatttagtattaaagaacttcgtgatgtttcagcaatagggggcaaagaaatctatctattgtactcagatgaagaaggacttttttatatttatgaccatcaaacctcaaccatttttacaacttctgataaggaagctattaaagatcttttaacactccaaagcattcaaaaggttgtatatgatttaaaaaatatactccataaggtggactttgatgaagctaatcagataaaaaattgtaatgatgttatgttggcttcatatgttttggacagtacacgcagttcgtacgatttggaaacattgtttatttcttatctcaacactgatatagctgcaatcaaagagaatagatgggctggtgctacagttttattaagaaatctttgggatgaactttcaaaactcattgatttaaactcggcccaatacgtttatgagagcatagagatgcctcttgttcccattttatatgaaatggagaaaatcggttttaaggttgacaaaaacactttgcaggagtatacaaaagagattgagagcaagcttttaaagttggaatcacagatttatcaaatagccggtgaatggtttaacataaactcgccaaaacaactctcatatatattattcgaaaaactgaagcttccggttgttaaaaagaccaaaacaggatattcaacagatgccgaggtattagaagagctgtatgataaacatgacataataccgcttattctggattatagaatgtatacgaaaatactgacaacttactgtcagggactggttcaggcaataaatcctgcaactggaagaattcataccaactttattcagacaggtacggcaactggaagacttgcaagtgcagagcccaatctgcaaaatattcctgtaaaatatgatgagggaaagctaataagaaaggcatttgttccagatgaaggttatgtgttgatagatgctgattattctcagattgagcttagaatacttgcacatatctctgaggatgaacgactgataaatgcttttaaaaataaccttgatattcattcacagacggcggcagagatctttggtgtggatataagtcaggttacaccaattatgcgaagccaggcaaaagcagttaactttggaattgtatatggtatatctgattatggactttcacgggatataaagatttcaagaaaagaagcagccgagtttattaatcgttattttgaaaagtatcccagagtaaaagaatatttggacaatgtcgtcaagtttgcccgtgaaaacggatttgttttgacaatatttaacaggaaaaggtatatcaaggatataaagtctactactaaaaacctgagaaactatgcagagagaatagcaatgaattcacctatccagggaagtgctgcagatattatgaaaatagcaatgataagagtttataaaaagctaaaagaaaacaatttaaaatcaagaattattctgcaggtccatgacgaacttttgattgaatcaccctatgaagagaaagagatagtaaaggaaatagtaaaatcggagatggaaaatgcggttttattgaaagttcctttggtagttgaagtgaaagaaggttcaaattggtatgaaacaaagtaaaggatcc

SEQ ID NO: 1650 - DNA, 2623 bp, Artificial Sequence
  Description of Artificial Sequence: Synthetic DNA sequence of Caldicellulosiruptor TOK13B DNA Polymerase N775W
atgaaatacctgctgccgaccgctgctgctggtctgctgctcctcgctgcccagccggcgatggccatggaatttgttatttttgatgggaatagtattctgtatagagctttttttgccttgccacagcttactacctcaacaggcatacctacaaatgctatatatggttttttgaatgtgctgttaaaatacttagattctgaaaaaccggattatgtagcagtagcttttgacaaaaaaggcagagctgtccgaaaaagtgaatatgaagaatacaaggctaacagaaaaccgatgccagattctcttcaggttcagataccttacgtaagagaaatacttgctgctctgaacattcctgtactgaaatgtgaagggtatgaagctgatgacgttataggcacacttgtaaatagatttaaagcccaggatttagagattgtgataataaccggagacagagatacacttcagttacttgataaaaatgtaattgtcaaaatagtcacaacaaggtttgacaggacaactgaagatttgtatgctgtagaaaatgtaaaagaaaaatatggtgtttttgcgcatcaggttgttgactataaagcattagtaggtgatgcgtcagacaatataccaggtgttaagggaattggagataaaactgccataaagctgttagaagagtaccagactctggagaatatatatcagaatctaaataacattaaaggagcgctaaaagagaagttggaatcaggaaaagacatggcatttttatcaaaaagactggctactatcatatgcgatttaccaattgaggtgaatcttgaagaattaaaaaccaaagaatgggacaaagaaagactttatcagattttacttcaacttgagtttaaaagctttattaaaagactgggcttttcagaagagattaactatgcaaggcagaactttcagctacctgaatttagtattaaagaacttcgtgatgtttcagcaatagggggcaaagaaatctatctattgtactcagatgaagaaggacttttttatatttatgaccatcaaacctcaaccatttttacaacttctgataaggaagctattaaagatcttttaacactccaaagcattcaaaaggttgtatatgatttaaaaaatatactccataaggtggactttgatgaagctaatcagataaaaaattgtaatgatgttatgttggcttcatatgttttggacagtacacgcagttcgtacgatttggaaacattgtttatttcttatctcaacactgatatagctgcaatcaaagagaatagatgggctggtgctacagttttattaagaaatctttgggatgaactttcaaaactcattgatttaaactcggcccaatacgtttatgagagcatagagatgcctcttgttcccattttatatgaaatggagaaaatcggttttaaggttgacaaaaacactttgcaggagtatacaaaagagattgagagcaagcttttaaagttggaatcacagatttatcaaatagccggtgaatggtttaacataaactcgccaaaacaactctcatatatattattcgaaaaactgaagcttccggttgttaaaaagaccaaaacaggatattcaacagatgccgaggtattagaagagctgtatgataaacatgacataataccgcttattctggattatagaatgtatacgaaaatactgacaacttactgtcagggactggttcaggcaataaatcctgcaactggaagaattcataccaactttattcagacaggtacggcaactggaagacttgcaagtgcagagcccaatctgcaaaatattcctgtaaaatatgatgagggaaagctaataagaaaggcatttgttccagatgaaggttatgtgttgatagatgctgattattctcagattgagcttagaatacttgcacatatctctgaggatgaacgactgataaatgcttttaaaaataaccttgatattcattcacagacggcggcagagatctttggtgtggatataagtcaggttacaccaattatgcgaagccaggcaaaagcagttaactttggaattgtatatggtatatctgattatggactttcacgggatataaagatttcaagaaaagaagcagccgagtttattaatcgttattttgaaaagtatcccagagtaaaagaatatttggacaatgtcgtcaagtttgcccgtgaaaacggatttgttttgacaatatttaacaggaaaaggtatatcaaggatataaagtctacttggaaaaacctgagaaactatgcagagagaatagcaatgaattcacctatccagggaagtgctgcagatattatgaaaatagcaatgataagagtttataaaaagctaaaagaaaacaatttaaaatcaagaattattctgcaggtccatgacgaacttttgattgaatcaccctatgaagagaaagagatagtaaaggaaatagtaaaatcggagatggaaaatgcggttttattgaaagttcctttggtagttgaagtgaaagaaggttcaaattggtatgaaacaaagtaaaggatcc

SEQ ID NO: 1651 - DNA, 2623 bp, Artificial Sequence
  Description of Artificial Sequence: Synthetic DNA sequence of Caldicellulosiruptor TOK13B DNA Polymerase N775Y
atgaaatacctgctgccgaccgctgctgctggtctgctgctcctcgctgcccagccggcgatggccatggaatttgttatttttgatgggaatagtattctgtatagagctttttttgccttgccacagcttactacctcaacaggcatacctacaaatgctatatatggttttttgaatgtgctgttaaaatacttagattctgaaaaaccggattatgtagcagtagcttttgacaaaaaaggcagagctgtccgaaaaagtgaatatgaagaatacaaggctaacagaaaaccgatgccagattctcttcaggttcagataccttacgtaagagaaatacttgctgctctgaacattcctgtactgaaatgtgaagggtatgaagctgatgacgttataggcacacttgtaaatagatttaaagcccaggatttagagattgtgataataaccggagacagagatacacttcagttacttgataaaaatgtaattgtcaaaatagtcacaacaaggtttgacaggacaactgaagatttgtatgctgtagaaaatgtaaaagaaaaatatggtgtttttgcgcatcaggttgttgactataaagcattagtaggtgatgcgtcagacaatataccaggtgttaagggaattggagataaaactgccataaagctgttagaagagtaccagactctggagaatatatatcagaatctaaataacattaaaggagcgctaaaagagaagttggaatcaggaaaagacatggcatttttatcaaaaagactggctactatcatatgcgatttaccaattgaggtgaatcttgaagaattaaaaaccaaagaatgggacaaagaaagactttatcagattttacttcaacttgagtttaaaagctttattaaaagactgggcttttcagaagagattaactatgcaaggcagaactttcagctacctgaatttagtattaaagaacttcgtgatgtttcagcaatagggggcaaagaaatctatctattgtactcagatgaagaaggacttttttatatttatgaccatcaaacctcaaccatttttacaacttctgataaggaagctattaaagatcttttaacactccaaagcattcaaaaggttgtatatgatttaaaaaatatactccataaggtggactttgatgaagctaatcagataaaaaattgtaatgatgttatgttggcttcatatgttttggacagtacacgcagttcgtacgatttggaaacattgtttatttcttatctcaacactgatatagctgcaatcaaagagaatagatgggctggtgctacagttttattaagaaatctttgggatgaactttcaaaactcattgatttaaactcggcccaatacgtttatgagagcatagagatgcctcttgttcccattttatatgaaatggagaaaatcggttttaaggttgacaaaaacactttgcaggagtatacaaaagagattgagagcaagcttttaaagttggaatcacagatttatcaaatagccggtgaatggtttaacataaactcgccaaaacaactctcatatatattattcgaaaaactgaagcttccggttgttaaaaagaccaaaacaggatattcaacagatgccgaggtattagaagagctgtatgataaacatgacataataccgcttattctggattatagaatgtatacgaaaatactgacaacttactgtcagggactggttcaggcaataaatcctgcaactggaagaattcataccaactttattcagacaggtacggcaactggaagacttgcaagtgcagagcccaatctgcaaaatattcctgtaaaatatgatgagggaaagctaataagaaaggcatttgttccagatgaaggttatgtgttgatagatgctgattattctcagattgagcttagaatacttgcacatatctctgaggatgaacgactgataaatgcttttaaaaataaccttgatattcattcacagacggcggcagagatctttggtgtggatataagtcaggttacaccaattatgcgaagccaggcaaaagcagttaactttggaattgtatatggtatatctgattatggactttcacgggatataaagatttcaagaaaagaagcagccgagtttattaatcgttattttgaaaagtatcccagagtaaaagaatatttggacaatgtcgtcaagtttgcccgtgaaaacggatttgttttgacaatatttaacaggaaaaggtatatcaaggatataaagtctacttataaaaacctgagaaactatgcagagagaatagcaatgaattcacctatccagggaagtgctgcagatattatgaaaatagcaatgataagagtttataaaaagctaaaagaaaacaatttaaaatcaagaattattctgcaggtccatgacgaacttttgattgaatcaccctatgaagagaaagagatagtaaaggaaatagtaaaatcggagatggaaaatgcggttttattgaaagttcctttggtagttgaagtgaaagaaggttcaaattggtatgaaacaaagtaaaggatcc

SEQ ID NO: 1652 - DNA, 2623 bp, Artificial Sequence
  Description of Artificial Sequence: Synthetic DNA sequence of Caldicellulosiruptor TOK13B DNA Polymerase N775V
atgaaatacctgctgccgaccgctgctgctggtctgctgctcctcgctgcccagccggcgatggccatggaatttgttatttttgatgggaatagtattctgtatagagctttttttgccttgccacagcttactacctcaacaggcatacctacaaatgctatatatggttttttgaatgtgctgttaaaatacttagattctgaaaaaccggattatgtagcagtagcttttgacaaaaaaggcagagctgtccgaaaaagtgaatatgaagaatacaaggctaacagaaaaccgatgccagattctcttcaggttcagataccttacgtaagagaaatacttgctgctctgaacattcctgtactgaaatgtgaagggtatgaagctgatgacgttataggcacacttgtaaatagatttaaagcccaggatttagagattgtgataataaccggagacagagatacacttcagttacttgataaaaatgtaattgtcaaaatagtcacaacaaggtttgacaggacaactgaagatttgtatgctgtagaaaatgtaaaagaaaaatatggtgtttttgcgcatcaggttgttgactataaagcattagtaggtgatgcgtcagacaatataccaggtgttaagggaattggagataaaactgccataaagctgttagaagagtaccagactctggagaatatatatcagaatctaaataacattaaaggagcgctaaaagagaagttggaatcaggaaaagacatggcatttttatcaaaaagactggctactatcatatgcgatttaccaattgaggtgaatcttgaagaattaaaaaccaaagaatgggacaaagaaagactttatcagattttacttcaacttgagtttaaaagctttattaaaagactgggcttttcagaagagattaactatgcaaggcagaactttcagctacctgaatttagtattaaagaacttcgtgatgtttcagcaatagggggcaaagaaatctatctattgtactcagatgaagaaggacttttttatatttatgaccatcaaacctcaaccatttttacaacttctgataaggaagctattaaagatcttttaacactccaaagcattcaaaaggttgtatatgatttaaaaaatatactccataaggtggactttgatgaagctaatcagataaaaaattgtaatgatgttatgttggcttcatatgttttggacagtacacgcagttcgtacgatttggaaacattgtttatttcttatctcaacactgatatagctgcaatcaaagagaatagatgggctggtgctacagttttattaagaaatctttgggatgaactttcaaaactcattgatttaaactcggcccaatacgtttatgagagcatagagatgcctcttgttcccattttatatgaaatggagaaaatcggttttaaggttgacaaaaacactttgcaggagtatacaaaagagattgagagcaagcttttaaagttggaatcacagatttatcaaatagccggtgaatggtttaacataaactcgccaaaacaactctcatatatattattcgaaaaactgaagcttccggttgttaaaaagaccaaaacaggatattcaacagatgccgaggtattagaagagctgtatgataaacatgacataataccgcttattctggattatagaatgtatacgaaaatactgacaacttactgtcagggactggttcaggcaataaatcctgcaactggaagaattcataccaactttattcagacaggtacggcaactggaagacttgcaagtgcagagcccaatctgcaaaatattcctgtaaaatatgatgagggaaagctaataagaaaggcatttgttccagatgaaggttatgtgttgatagatgctgattattctcagattgagcttagaatacttgcacatatctctgaggatgaacgactgataaatgcttttaaaaataaccttgatattcattcacagacggcggcagagatctttggtgtggatataagtcaggttacaccaattatgcgaagccaggcaaaagcagttaactttggaattgtatatggtatatctgattatggactttcacgggatataaagatttcaagaaaagaagcagccgagtttattaatcgttattttgaaaagtatcccagagtaaaagaatatttggacaatgtcgtcaagtttgcccgtgaaaacggatttgttttgacaatatttaacaggaaaaggtatatcaaggatataaagtctactgttaaaaacctgagaaactatgcagagagaatagcaatgaattcacctatccagggaagtgctgcagatattatgaaaatagcaatgataagagtttataaaaagctaaaagaaaacaatttaaaatcaagaattattctgcaggtccatgacgaacttttgattgaatcaccctatgaagagaaagagatagtaaaggaaatagtaaaatcggagatggaaaatgcggttttattgaaagttcctttggtagttgaagtgaaagaaggttcaaattggtatgaaacaaagtaaaggatcc

SEQ ID NO: 1653 - DNA, 2623 bp, Artificial Sequence
  Description of Artificial Sequence: Synthetic DNA sequence of Caldicellulosiruptor TOK13B DNA Polymerase K776A
atgaaatacctgctgccgaccgctgctgctggtctgctgctcctcgctgcccagccggcgatggccatggaatttgttatttttgatgggaatagtattctgtatagagctttttttgccttgccacagcttactacctcaacaggcatacctacaaatgctatatatggttttttgaatgtgctgttaaaatacttagattctgaaaaaccggattatgtagcagtagcttttgacaaaaaaggcagagctgtccgaaaaagtgaatatgaagaatacaaggctaacagaaaaccgatgccagattctcttcaggttcagataccttacgtaagagaaatacttgctgctctgaacattcctgtactgaaatgtgaagggtatgaagctgatgacgttataggcacacttgtaaatagatttaaagcccaggatttagagattgtgataataaccggagacagagatacacttcagttacttgataaaaatgtaattgtcaaaatagtcacaacaaggtttgacaggacaactgaagatttgtatgctgtagaaaatgtaaaagaaaaatatggtgtttttgcgcatcaggttgttgactataaagcattagtaggtgatgcgtcagacaatataccaggtgttaagggaattggagataaaactgccataaagctgttagaagagtaccagactctggagaatatatatcagaatctaaataacattaaaggagcgctaaaagagaagttggaatcaggaaaagacatggcatttttatcaaaaagactggctactatcatatgcgatttaccaattgaggtgaatcttgaagaattaaaaaccaaagaatgggacaaagaaagactttatcagattttacttcaacttgagtttaaaagctttattaaaagactgggcttttcagaagagattaactatgcaaggcagaactttcagctacctgaatttagtattaaagaacttcgtgatgtttcagcaatagggggcaaagaaatctatctattgtactcagatgaagaaggacttttttatatttatgaccatcaaacctcaaccatttttacaacttctgataaggaagctattaaagatcttttaacactccaaagcattcaaaaggttgtatatgatttaaaaaatatactccataaggtggactttgatgaagctaatcagataaaaaattgtaatgatgttatgttggcttcatatgttttggacagtacacgcagttcgtacgatttggaaacattgtttatttcttatctcaacactgatatagctgcaatcaaagagaatagatgggctggtgctacagttttattaagaaatctttgggatgaactttcaaaactcattgatttaaactcggcccaatacgtttatgagagcatagagatgcctcttgttcccattttatatgaaatggagaaaatcggttttaaggttgacaaaaacactttgcaggagtatacaaaagagattgagagcaagcttttaaagttggaatcacagatttatcaaatagccggtgaatggtttaacataaactcgccaaaacaactctcatatatattattcgaaaaactgaagcttccggttgttaaaaagaccaaaacaggatattcaacagatgccgaggtattagaagagctgtatgataaacatgacataataccgcttattctggattatagaatgtatacgaaaatactgacaacttactgtcagggactggttcaggcaataaatcctgcaactggaagaattcataccaactttattcagacaggtacggcaactggaagacttgcaagtgcagagcccaatctgcaaaatattcctgtaaaatatgatgagggaaagctaataagaaaggcatttgttccagatgaaggttatgtgttgatagatgctgattattctcagattgagcttagaatacttgcacatatctctgaggatgaacgactgataaatgcttttaaaaataaccttgatattcattcacagacggcggcagagatctttggtgtggatataagtcaggttacaccaattatgcgaagccaggcaaaagcagttaactttggaattgtatatggtatatctgattatggactttcacgggatataaagatttcaagaaaagaagcagccgagtttattaatcgttattttgaaaagtatcccagagtaaaagaatatttggacaatgtcgtcaagtttgcccgtgaaaacggatttgttttgacaatatttaacaggaaaaggtatatcaaggatataaagtctactaatgctaacctgagaaactatgcagagagaatagcaatgaattcacctatccagggaagtgctgcagatattatgaaaatagcaatgataagagtttataaaaagctaaaagaaaacaatttaaaatcaagaattattctgcaggtccatgacgaacttttgattgaatcaccctatgaagagaaagagatagtaaaggaaatagtaaaatcggagatggaaaatgcggttttattgaaagttcctttggtagttgaagtgaaagaaggttcaaattggtatgaaacaaagtaaaggatcc

SEQ ID NO: 1654 - DNA, 2623 bp, Artificial Sequence
  Description of Artificial Sequence: Synthetic DNA sequence of Caldicellulosiruptor TOK13B DNA Polymerase K776R
atgaaatacctgctgccgaccgctgctgctggtctgctgctcctcgctgcccagccggcgatggccatggaatttgttatttttgatgggaatagtattctgtatagagctttttttgccttgccacagcttactacctcaacaggcatacctacaaatgctatatatggttttttgaatgtgctgttaaaatacttagattctgaaaaaccggattatgtagcagtagcttttgacaaaaaaggcagagctgtccgaaaaagtgaatatgaagaatacaaggctaacagaaaaccgatgccagattctcttcaggttcagataccttacgtaagagaaatacttgctgctctgaacattcctgtactgaaatgtgaagggtatgaagctgatgacgttataggcacacttgtaaatagatttaaagcccaggatttagagattgtgataataaccggagacagagatacacttcagttacttgataaaaatgtaattgtcaaaatagtcacaacaaggtttgacaggacaactgaagatttgtatgctgtagaaaatgtaaaagaaaaatatggtgtttttgcgcatcaggttgttgactataaagcattagtaggtgatgcgtcagacaatataccaggtgttaagggaattggagataaaactgccataaagctgttagaagagtaccagactctggagaatatatatcagaatctaaataacattaaaggagcgctaaaagagaagttggaatcaggaaaagacatggcatttttatcaaaaagactggctactatcatatgcgatttaccaattgaggtgaatcttgaagaattaaaaaccaaagaatgggacaaagaaagactttatcagattttacttcaacttgagtttaaaagctttattaaaagactgggcttttcagaagagattaactatgcaaggcagaactttcagctacctgaatttagtattaaagaacttcgtgatgtttcagcaatagggggcaaagaaatctatctattgtactcagatgaagaaggacttttttatatttatgaccatcaaacctcaaccatttttacaacttctgataaggaagctattaaagatcttttaacactccaaagcattcaaaaggttgtatatgatttaaaaaatatactccataaggtggactttgatgaagctaatcagataaaaaattgtaatgatgttatgttggcttcatatgttttggacagtacacgcagttcgtacgatttggaaacattgtttatttcttatctcaacactgatatagctgcaatcaaagagaatagatgggctggtgctacagttttattaagaaatctttgggatgaactttcaaaactcattgatttaaactcggcccaatacgtttatgagagcatagagatgcctcttgttcccattttatatgaaatggagaaaatcggttttaaggttgacaaaaacactttgcaggagtatacaaaagagattgagagcaagcttttaaagttggaatcacagatttatcaaatagccggtgaatggtttaacataaactcgccaaaacaactctcatatatattattcgaaaaactgaagcttccggttgttaaaaagaccaaaacaggatattcaacagatgccgaggtattagaagagctgtatgataaacatgacataataccgcttattctggattatagaatgtatacgaaaatactgacaacttactgtcagggactggttcaggcaataaatcctgcaactggaagaattcataccaactttattcagacaggtacggcaactggaagacttgcaagtgcagagcccaatctgcaaaatattcctgtaaaatatgatgagggaaagctaataagaaaggcatttgttccagatgaaggttatgtgttgatagatgctgattattctcagattgagcttagaatacttgcacatatctctgaggatgaacgactgataaatgcttttaaaaataaccttgatattcattcacagacggcggcagagatctttggtgtggatataagtcaggttacaccaattatgcgaagccaggcaaaagcagttaactttggaattgtatatggtatatctgattatggactttcacgggatataaagatttcaagaaaagaagcagccgagtttattaatcgttattttgaaaagtatcccagagtaaaagaatatttggacaatgtcgtcaagtttgcccgtgaaaacggatttgttttgacaatatttaacaggaaaaggtatatcaaggatataaagtctactaatcgtaacctgagaaactatgcagagagaatagcaatgaattcacctatccagggaagtgctgcagatattatgaaaatagcaatgataagagtttataaaaagctaaaagaaaacaatttaaaatcaagaattattctgcaggtccatgacgaacttttgattgaatcaccctatgaagagaaagagatagtaaaggaaatagtaaaatcggagatggaaaatgcggttttattgaaagttcctttggtagttgaagtgaaagaaggttcaaattggtatgaaacaaagtaaaggatcc

SEQ ID NO: 1655 - DNA, 2623 bp, Artificial Sequence
  Description of Artificial Sequence: Synthetic DNA sequence of Caldicellulosiruptor TOK13B DNA Polymerase K776N
atgaaatacctgctgccgaccgctgctgctggtctgctgctcctcgctgcccagccggcgatggccatggaatttgttatttttgatgggaatagtattctgtatagagctttttttgccttgccacagcttactacctcaacaggcatacctacaaatgctatatatggttttttgaatgtgctgttaaaatacttagattctgaaaaaccggattatgtagcagtagcttttgacaaaaaaggcagagctgtccgaaaaagtgaatatgaagaatacaaggctaacagaaaaccgatgccagattctcttcaggttcagataccttacgtaagagaaatacttgctgctctgaacattcctgtactgaaatgtgaagggtatgaagctgatgacgttataggcacacttgtaaatagatttaaagcccaggatttagagattgtgataataaccggagacagagatacacttcagttacttgataaaaatgtaattgtcaaaatagtcacaacaaggtttgacaggacaactgaagatttgtatgctgtagaaaatgtaaaagaaaaatatggtgtttttgcgcatcaggttgttgactataaagcattagtaggtgatgcgtcagacaatataccaggtgttaagggaattggagataaaactgccataaagctgttagaagagtaccagactctggagaatatatatcagaatctaaataacattaaaggagcgctaaaagagaagttggaatcaggaaaagacatggcatttttatcaaaaagactggctactatcatatgcgatttaccaattgaggtgaatcttgaagaattaaaaaccaaagaatgggacaaagaaagactttatcagattttacttcaacttgagtttaaaagctttattaaaagactgggcttttcagaagagattaactatgcaaggcagaactttcagctacctgaatttagtattaaagaacttcgtgatgtttcagcaatagggggcaaagaaatctatctattgtactcagatgaagaaggacttttttatatttatgaccatcaaacctcaaccatttttacaacttctgataaggaagctattaaagatcttttaacactccaaagcattcaaaaggttgtatatgatttaaaaaatatactccataaggtggactttgatgaagctaatcagataaaaaattgtaatgatgttatgttggcttcatatgttttggacagtacacgcagttcgtacgatttggaaacattgtttatttcttatctcaacactgatatagctgcaatcaaagagaatagatgggctggtgctacagttttattaagaaatctttgggatgaactttcaaaactcattgatttaaactcggcccaatacgtttatgagagcatagagatgcctcttgttcccattttatatgaaatggagaaaatcggttttaaggttgacaaaaacactttgcaggagtatacaaaagagattgagagcaagcttttaaagttggaatcacagatttatcaaatagccggtgaatggtttaacataaactcgccaaaacaactctcatatatattattcgaaaaactgaagcttccggttgttaaaaagaccaaaacaggatattcaacagatgccgaggtattagaagagctgtatgataaacatgacataataccgcttattctggattatagaatgtatacgaaaatactgacaacttactgtcagggactggttcaggcaataaatcctgcaactggaagaattcataccaactttattcagacaggtacggcaactggaagacttgcaagtgcagagcccaatctgcaaaatattcctgtaaaatatgatgagggaaagctaataagaaaggcatttgttccagatgaaggttatgtgttgatagatgctgattattctcagattgagcttagaatacttgcacatatctctgaggatgaacgactgataaatgcttttaaaaataaccttgatattcattcacagacggcggcagagatctttggtgtggatataagtcaggttacaccaattatgcgaagccaggcaaaagcagttaactttggaattgtatatggtatatctgattatggactttcacgggatataaagatttcaagaaaagaagcagccgagtttattaatcgttattttgaaaagtatcccagagtaaaagaatatttggacaatgtcgtcaagtttgcccgtgaaaacggatttgttttgacaatatttaacaggaaaaggtatatcaaggatataaagtctactaataataacctgagaaactatgcagagagaatagcaatgaattcacctatccagggaagtgctgcagatattatgaaaatagcaatgataagagtttataaaaagctaaaagaaaacaatttaaaatcaagaattattctgcaggtccatgacgaacttttgattgaatcaccctatgaagagaaagagatagtaaaggaaatagtaaaatcggagatggaaaatgcggttttattgaaagttcctttggtagttgaagtgaaagaaggttcaaattggtatgaaacaaagtaaaggatcc

SEQ ID NO: 1656 - DNA, 2623 bp, Artificial Sequence
  Description of Artificial Sequence: Synthetic DNA sequence of Caldicellulosiruptor TOK13B DNA Polymerase K776D
atgaaatacctgctgccgaccgctgctgctggtctgctgctcctcgctgcccagccggcgatggccatggaatttgttatttttgatgggaatagtattctgtatagagctttttttgccttgccacagcttactacctcaacaggcatacctacaaatgctatatatggttttttgaatgtgctgttaaaatacttagattctgaaaaaccggattatgtagcagtagcttttgacaaaaaaggcagagctgtccgaaaaagtgaatatgaagaatacaaggctaacagaaaaccgatgccagattctcttcaggttcagataccttacgtaagagaaatacttgctgctctgaacattcctgtactgaaatgtgaagggtatgaagctgatgacgttataggcacacttgtaaatagatttaaagcccaggatttagagattgtgataataaccggagacagagatacacttcagttacttgataaaaatgtaattgtcaaaatagtcacaacaaggtttgacaggacaactgaagatttgtatgctgtagaaaatgtaaaagaaaaatatggtgtttttgcgcatcaggttgttgactataaagcattagtaggtgatgcgtcagacaatataccaggtgttaagggaattggagataaaactgccataaagctgttagaagagtaccagactctggagaatatatatcagaatctaaataacattaaaggagcgctaaaagagaagttggaatcaggaaaagacatggcatttttatcaaaaagactggctactatcatatgcgatttaccaattgaggtgaatcttgaagaattaaaaaccaaagaatgggacaaagaaagactttatcagattttacttcaacttgagtttaaaagctttattaaaagactgggcttttcagaagagattaactatgcaaggcagaactttcagctacctgaatttagtattaaagaacttcgtgatgtttcagcaatagggggcaaagaaatctatctattgtactcagatgaagaaggacttttttatatttatgaccatcaaacctcaaccatttttacaacttctgataaggaagctattaaagatcttttaacactccaaagcattcaaaaggttgtatatgatttaaaaaatatactccataaggtggactttgatgaagctaatcagataaaaaattgtaatgatgttatgttggcttcatatgttttggacagtacacgcagttcgtacgatttggaaacattgtttatttcttatctcaacactgatatagctgcaatcaaagagaatagatgggctggtgctacagttttattaagaaatctttgggatgaactttcaaaactcattgatttaaactcggcccaatacgtttatgagagcatagagatgcctcttgttcccattttatatgaaatggagaaaatcggttttaaggttgacaaaaacactttgcaggagtatacaaaagagattgagagcaagcttttaaagttggaatcacagatttatcaaatagccggtgaatggtttaacataaactcgccaaaacaactctcatatatattattcgaaaaactgaagcttccggttgttaaaaagaccaaaacaggatattcaacagatgccgaggtattagaagagctgtatgataaacatgacataataccgcttattctggattatagaatgtatacgaaaatactgacaacttactgtcagggactggttcaggcaataaatcctgcaactggaagaattcataccaactttattcagacaggtacggcaactggaagacttgcaagtgcagagcccaatctgcaaaatattcctgtaaaatatgatgagggaaagctaataagaaaggcatttgttccagatgaaggttatgtgttgatagatgctgattattctcagattgagcttagaatacttgcacatatctctgaggatgaacgactgataaatgcttttaaaaataaccttgatattcattcacagacggcggcagagatctttggtgtggatataagtcaggttacaccaattatgcgaagccaggcaaaagcagttaactttggaattgtatatggtatatctgattatggactttcacgggatataaagatttcaagaaaagaagcagccgagtttattaatcgttattttgaaaagtatcccagagtaaaagaatatttggacaatgtcgtcaagtttgcccgtgaaaacggatttgttttgacaatatttaacaggaaaaggtatatcaaggatataaagtctactaatgataacctgagaaactatgcagagagaatagcaatgaattcacctatccagggaagtgctgcagatattatgaaaatagcaatgataagagtttataaaaagctaaaagaaaacaatttaaaatcaagaattattctgcaggtccatgacgaacttttgattgaatcaccctatgaagagaaagagatagtaaaggaaatagtaaaatcggagatggaaaatgcggttttattgaaagttcctttggtagttgaagtgaaagaaggttcaaattggtatgaaacaaagtaaaggatcc

SEQ ID NO: 1657 - DNA, 2623 bp, Artificial Sequence
  Description of Artificial Sequence: Synthetic DNA sequence of Caldicellulosiruptor TOK13B DNA Polymerase K776C
atgaaatacctgctgccgaccgctgctgctggtctgctgctcctcgctgcccagccggcgatggccatggaatttgttatttttgatgggaatagtattctgtatagagctttttttgccttgccacagcttactacctcaacaggcatacctacaaatgctatatatggttttttgaatgtgctgttaaaatacttagattctgaaaaaccggattatgtagcagtagcttttgacaaaaaaggcagagctgtccgaaaaagtgaatatgaagaatacaaggctaacagaaaaccgatgccagattctcttcaggttcagataccttacgtaagagaaatacttgctgctctgaacattcctgtactgaaatgtgaagggtatgaagctgatgacgttataggcacacttgtaaatagatttaaagcccaggatttagagattgtgataataaccggagacagagatacacttcagttacttgataaaaatgtaattgtcaaaatagtcacaacaaggtttgacaggacaactgaagatttgtatgctgtagaaaatgtaaaagaaaaatatggtgtttttgcgcatcaggttgttgactataaagcattagtaggtgatgcgtcagacaatataccaggtgttaagggaattggagataaaactgccataaagctgttagaagagtaccagactctggagaatatatatcagaatctaaataacattaaaggagcgctaaaagagaagttggaatcaggaaaagacatggcatttttatcaaaaagactggctactatcatatgcgatttaccaattgaggtgaatcttgaagaattaaaaaccaaagaatgggacaaagaaagactttatcagattttacttcaacttgagtttaaaagctttattaaaagactgggcttttcagaagagattaactatgcaaggcagaactttcagctacctgaatttagtattaaagaacttcgtgatgtttcagcaatagggggcaaagaaatctatctattgtactcagatgaagaaggacttttttatatttatgaccatcaaacctcaaccatttttacaacttctgataaggaagctattaaagatcttttaacactccaaagcattcaaaaggttgtatatgatttaaaaaatatactccataaggtggactttgatgaagctaatcagataaaaaattgtaatgatgttatgttggcttcatatgttttggacagtacacgcagttcgtacgatttggaaacattgtttatttcttatctcaacactgatatagctgcaatcaaagagaatagatgggctggtgctacagttttattaagaaatctttgggatgaactttcaaaactcattgatttaaactcggcccaatacgtttatgagagcatagagatgcctcttgttcccattttatatgaaatggagaaaatcggttttaaggttgacaaaaacactttgcaggagtatacaaaagagattgagagcaagcttttaaagttggaatcacagatttatcaaatagccggtgaatggtttaacataaactcgccaaaacaactctcatatatattattcgaaaaactgaagcttccggttgttaaaaagaccaaaacaggatattcaacagatgccgaggtattagaagagctgtatgataaacatgacataataccgcttattctggattatagaatgtatacgaaaatactgacaacttactgtcagggactggttcaggcaataaatcctgcaactggaagaattcataccaactttattcagacaggtacggcaactggaagacttgcaagtgcagagcccaatctgcaaaatattcctgtaaaatatgatgagggaaagctaataagaaaggcatttgttccagatgaaggttatgtgttgatagatgctgattattctcagattgagcttagaatacttgcacatatctctgaggatgaacgactgataaatgcttttaaaaataaccttgatattcattcacagacggcggcagagatctttggtgtggatataagtcaggttacaccaattatgcgaagccaggcaaaagcagttaactttggaattgtatatggtatatctgattatggactttcacgggatataaagatttcaagaaaagaagcagccgagtttattaatcgttattttgaaaagtatcccagagtaaaagaatatttggacaatgtcgtcaagtttgcccgtgaaaacggatttgttttgacaatatttaacaggaaaaggtatatcaaggatataaagtctactaattgtaacctgagaaactatgcagagagaatagcaatgaattcacctatccagggaagtgctgcagatattatgaaaatagcaatgataagagtttataaaaagctaaaagaaaacaatttaaaatcaagaattattctgcaggtccatgacgaacttttgattgaatcaccctatgaagagaaagagatagtaaaggaaatagtaaaatcggagatggaaaatgcggttttattgaaagttcctttggtagttgaagtgaaagaaggttcaaattggtatgaaacaaagtaaaggatcc

SEQ ID NO: 1658 - DNA, 2623 bp, Artificial Sequence
  Description of Artificial Sequence: Synthetic DNA sequence of Caldicellulosiruptor TOK13B DNA Polymerase K776E
atgaaatacctgctgccgaccgctgctgctggtctgctgctcctcgctgcccagccggcgatggccatggaatttgttatttttgatgggaatagtattctgtatagagctttttttgccttgccacagcttactacctcaacaggcatacctacaaatgctatatatggttttttgaatgtgctgttaaaatacttagattctgaaaaaccggattatgtagcagtagcttttgacaaaaaaggcagagctgtccgaaaaagtgaatatgaagaatacaaggctaacagaaaaccgatgccagattctcttcaggttcagataccttacgtaagagaaatacttgctgctctgaacattcctgtactgaaatgtgaagggtatgaagctgatgacgttataggcacacttgtaaatagatttaaagcccaggatttagagattgtgataataaccggagacagagatacacttcagttacttgataaaaatgtaattgtcaaaatagtcacaacaaggtttgacaggacaactgaagatttgtatgctgtagaaaatgtaaaagaaaaatatggtgtttttgcgcatcaggttgttgactataaagcattagtaggtgatgcgtcagacaatataccaggtgttaagggaattggagataaaactgccataaagctgttagaagagtaccagactctggagaatatatatcagaatctaaataacattaaaggagcgctaaaagagaagttggaatcaggaaaagacatggcatttttatcaaaaagactggctactatcatatgcgatttaccaattgaggtgaatcttgaagaattaaaaaccaaagaatgggacaaagaaagactttatcagattttacttcaacttgagtttaaaagctttattaaaagactgggcttttcagaagagattaactatgcaaggcagaactttcagctacctgaatttagtattaaagaacttcgtgatgtttcagcaatagggggcaaagaaatctatctattgtactcagatgaagaaggacttttttatatttatgaccatcaaacctcaaccatttttacaacttctgataaggaagctattaaagatcttttaacactccaaagcattcaaaaggttgtatatgatttaaaaaatatactccataaggtggactttgatgaagctaatcagataaaaaattgtaatgatgttatgttggcttcatatgttttggacagtacacgcagttcgtacgatttggaaacattgtttatttcttatctcaacactgatatagctgcaatcaaagagaatagatgggctggtgctacagttttattaagaaatctttgggatgaactttcaaaactcattgatttaaactcggcccaatacgtttatgagagcatagagatgcctcttgttcccattttatatgaaatggagaaaatcggttttaaggttgacaaaaacactttgcaggagtatacaaaagagattgagagcaagcttttaaagttggaatcacagatttatcaaatagccggtgaatggtttaacataaactcgccaaaacaactctcatatatattattcgaaaaactgaagcttccggttgttaaaaagaccaaaacaggatattcaacagatgccgaggtattagaagagctgtatgataaacatgacataataccgcttattctggattatagaatgtatacgaaaatactgacaacttactgtcagggactggttcaggcaataaatcctgcaactggaagaattcataccaactttattcagacaggtacggcaactggaagacttgcaagtgcagagcccaatctgcaaaatattcctgtaaaatatgatgagggaaagctaataagaaaggcatttgttccagatgaaggttatgtgttgatagatgctgattattctcagattgagcttagaatacttgcacatatctctgaggatgaacgactgataaatgcttttaaaaataaccttgatattcattcacagacggcggcagagatctttggtgtggatataagtcaggttacaccaattatgcgaagccaggcaaaagcagttaactttggaattgtatatggtatatctgattatggactttcacgggatataaagatttcaagaaaagaagcagccgagtttattaatcgttattttgaaaagtatcccagagtaaaagaatatttggacaatgtcgtcaagtttgcccgtgaaaacggatttgttttgacaatatttaacaggaaaaggtatatcaaggatataaagtctactaatgaaaacctgagaaactatgcagagagaatagcaatgaattcacctatccagggaagtgctgcagatattatgaaaatagcaatgataagagtttataaaaagctaaaagaaaacaatttaaaatcaagaattattctgcaggtccatgacgaacttttgattgaatcaccctatgaagagaaagagatagtaaaggaaatagtaaaatcggagatggaaaatgcggttttattgaaagttcctttggtagttgaagtgaaagaaggttcaaattggtatgaaacaaagtaaaggatcc

SEQ ID NO: 1659 - DNA, 2623 bp, Artificial Sequence
  Description of Artificial Sequence: Synthetic DNA sequence of Caldicellulosiruptor TOK13B DNA Polymerase K776Q
atgaaatacctgctgccgaccgctgctgctggtctgctgctcctcgctgcccagccggcgatggccatggaatttgttatttttgatgggaatagtattctgtatagagctttttttgccttgccacagcttactacctcaacaggcatacctacaaatgctatatatggttttttgaatgtgctgttaaaatacttagattctgaaaaaccggattatgtagcagtagcttttgacaaaaaaggcagagctgtccgaaaaagtgaatatgaagaatacaaggctaacagaaaaccgatgccagattctcttcaggttcagataccttacgtaagagaaatacttgctgctctgaacattcctgtactgaaatgtgaagggtatgaagctgatgacgttataggcacacttgtaaatagatttaaagcccaggatttagagattgtgataataaccggagacagagatacacttcagttacttgataaaaatgtaattgtcaaaatagtcacaacaaggtttgacaggacaactgaagatttgtatgctgtagaaaatgtaaaagaaaaatatggtgtttttgcgcatcaggttgttgactataaagcattagtaggtgatgcgtcagacaatataccaggtgttaagggaattggagataaaactgccataaagctgttagaagagtaccagactctggagaatatatatcagaatctaaataacattaaaggagcgctaaaagagaagttggaatcaggaaaagacatggcatttttatcaaaaagactggctactatcatatgcgatttaccaattgaggtgaatcttgaagaattaaaaaccaaagaatgggacaaagaaagactttatcagattttacttcaacttgagtttaaaagctttattaaaagactgggcttttcagaagagattaactatgcaaggcagaactttcagctacctgaatttagtattaaagaacttcgtgatgtttcagcaatagggggcaaagaaatctatctattgtactcagatgaagaaggacttttttatatttatgaccatcaaacctcaaccatttttacaacttctgataaggaagctattaaagatcttttaacactccaaagcattcaaaaggttgtatatgatttaaaaaatatactccataaggtggactttgatgaagctaatcagataaaaaattgtaatgatgttatgttggcttcatatgttttggacagtacacgcagttcgtacgatttggaaacattgtttatttcttatctcaacactgatatagctgcaatcaaagagaatagatgggctggtgctacagttttattaagaaatctttgggatgaactttcaaaactcattgatttaaactcggcccaatacgtttatgagagcatagagatgcctcttgttcccattttatatgaaatggagaaaatcggttttaaggttgacaaaaacactttgcaggagtatacaaaagagattgagagcaagcttttaaagttggaatcacagatttatcaaatagccggtgaatggtttaacataaactcgccaaaacaactctcatatatattattcgaaaaactgaagcttccggttgttaaaaagaccaaaacaggatattcaacagatgccgaggtattagaagagctgtatgataaacatgacataataccgcttattctggattatagaatgtatacgaaaatactgacaacttactgtcagggactggttcaggcaataaatcctgcaactggaagaattcataccaactttattcagacaggtacggcaactggaagacttgcaagtgcagagcccaatctgcaaaatattcctgtaaaatatgatgagggaaagctaataagaaaggcatttgttccagatgaaggttatgtgttgatagatgctgattattctcagattgagcttagaatacttgcacatatctctgaggatgaacgactgataaatgcttttaaaaataaccttgatattcattcacagacggcggcagagatctttggtgtggatataagtcaggttacaccaattatgcgaagccaggcaaaagcagttaactttggaattgtatatggtatatctgattatggactttcacgggatataaagatttcaagaaaagaagcagccgagtttattaatcgttattttgaaaagtatcccagagtaaaagaatatttggacaatgtcgtcaagtttgcccgtgaaaacggatttgttttgacaatatttaacaggaaaaggtatatcaaggatataaagtctactaatcaaaacctgagaaactatgcagagagaatagcaatgaattcacctatccagggaagtgctgcagatattatgaaaatagcaatgataagagtttataaaaagctaaaagaaaacaatttaaaatcaagaattattctgcaggtccatgacgaacttttgattgaatcaccctatgaagagaaagagatagtaaaggaaatagtaaaatcggagatggaaaatgcggttttattgaaagttcctttggtagttgaagtgaaagaaggttcaaattggtatgaaacaaagtaaaggatcc

SEQ ID NO: 1660 - DNA, 2623 bp, Artificial Sequence
  Description of Artificial Sequence: Synthetic DNA sequence of Caldicellulosiruptor TOK13B DNA Polymerase K776G
atgaaatacctgctgccgaccgctgctgctggtctgctgctcctcgctgcccagccggcgatggccatggaatttgttatttttgatgggaatagtattctgtatagagctttttttgccttgccacagcttactacctcaacaggcatacctacaaatgctatatatggttttttgaatgtgctgttaaaatacttagattctgaaaaaccggattatgtagcagtagcttttgacaaaaaaggcagagctgtccgaaaaagtgaatatgaagaatacaaggctaacagaaaaccgatgccagattctcttcaggttcagataccttacgtaagagaaatacttgctgctctgaacattcctgtactgaaatgtgaagggtatgaagctgatgacgttataggcacacttgtaaatagatttaaagcccaggatttagagattgtgataataaccggagacagagatacacttcagttacttgataaaaatgtaattgtcaaaatagtcacaacaaggtttgacaggacaactgaagatttgtatgctgtagaaaatgtaaaagaaaaatatggtgtttttgcgcatcaggttgttgactataaagcattagtaggtgatgcgtcagacaatataccaggtgttaagggaattggagataaaactgccataaagctgttagaagagtaccagactctggagaatatatatcagaatctaaataacattaaaggagcgctaaaagagaagttggaatcaggaaaagacatggcatttttatcaaaaagactggctactatcatatgcgatttaccaattgaggtgaatcttgaagaattaaaaaccaaagaatgggacaaagaaagactttatcagattttacttcaacttgagtttaaaagctttattaaaagactgggcttttcagaagagattaactatgcaaggcagaactttcagctacctgaatttagtattaaagaacttcgtgatgtttcagcaatagggggcaaagaaatctatctattgtactcagatgaagaaggacttttttatatttatgaccatcaaacctcaaccatttttacaacttctgataaggaagctattaaagatcttttaacactccaaagcattcaaaaggttgtatatgatttaaaaaatatactccataaggtggactttgatgaagctaatcagataaaaaattgtaatgatgttatgttggcttcatatgttttggacagtacacgcagttcgtacgatttggaaacattgtttatttcttatctcaacactgatatagctgcaatcaaagagaatagatgggctggtgctacagttttattaagaaatctttgggatgaactttcaaaactcattgatttaaactcggcccaatacgtttatgagagcatagagatgcctcttgttcccattttatatgaaatggagaaaatcggttttaaggttgacaaaaacactttgcaggagtatacaaaagagattgagagcaagcttttaaagttggaatcacagatttatcaaatagccggtgaatggtttaacataaactcgccaaaacaactctcatatatattattcgaaaaactgaagcttccggttgttaaaaagaccaaaacaggatattcaacagatgccgaggtattagaagagctgtatgataaacatgacataataccgcttattctggattatagaatgtatacgaaaatactgacaacttactgtcagggactggttcaggcaataaatcctgcaactggaagaattcataccaactttattcagacaggtacggcaactggaagacttgcaagtgcagagcccaatctgcaaaatattcctgtaaaatatgatgagggaaagctaataagaaaggcatttgttccagatgaaggttatgtgttgatagatgctgattattctcagattgagcttagaatacttgcacatatctctgaggatgaacgactgataaatgcttttaaaaataaccttgatattcattcacagacggcggcagagatctttggtgtggatataagtcaggttacaccaattatgcgaagccaggcaaaagcagttaactttggaattgtatatggtatatctgattatggactttcacgggatataaagatttcaagaaaagaagcagccgagtttattaatcgttattttgaaaagtatcccagagtaaaagaatatttggacaatgtcgtcaagtttgcccgtgaaaacggatttgttttgacaatatttaacaggaaaaggtatatcaaggatataaagtctactaatggtaacctgagaaactatgcagagagaatagcaatgaattcacctatccagggaagtgctgcagatattatgaaaatagcaatgataagagtttataaaaagctaaaagaaaacaatttaaaatcaagaattattctgcaggtccatgacgaacttttgattgaatcaccctatgaagagaaagagatagtaaaggaaatagtaaaatcggagatggaaaatgcggttttattgaaagttcctttggtagttgaagtgaaagaaggttcaaattggtatgaaacaaagtaaaggatcc

SEQ ID NO: 1661 - DNA, 2623 bp, Artificial Sequence
  Description of Artificial Sequence: Synthetic DNA sequence of Caldicellulosiruptor TOK13B DNA Polymerase K776H
atgaaatacctgctgccgaccgctgctgctggtctgctgctcctcgctgcccagccggcgatggccatggaatttgttatttttgatgggaatagtattctgtatagagctttttttgccttgccacagcttactacctcaacaggcatacctacaaatgctatatatggttttttgaatgtgctgttaaaatacttagattctgaaaaaccggattatgtagcagtagcttttgacaaaaaaggcagagctgtccgaaaaagtgaatatgaagaatacaaggctaacagaaaaccgatgccagattctcttcaggttcagataccttacgtaagagaaatacttgctgctctgaacattcctgtactgaaatgtgaagggtatgaagctgatgacgttataggcacacttgtaaatagatttaaagcccaggatttagagattgtgataataaccggagacagagatacacttcagttacttgataaaaatgtaattgtcaaaatagtcacaacaaggtttgacaggacaactgaagatttgtatgctgtagaaaatgtaaaagaaaaatatggtgtttttgcgcatcaggttgttgactataaagcattagtaggtgatgcgtcagacaatataccaggtgttaagggaattggagataaaactgccataaagctgttagaagagtaccagactctggagaatatatatcagaatctaaataacattaaaggagcgctaaaagagaagttggaatcaggaaaagacatggcatttttatcaaaaagactggctactatcatatgcgatttaccaattgaggtgaatcttgaagaattaaaaaccaaagaatgggacaaagaaagactttatcagattttacttcaacttgagtttaaaagctttattaaaagactgggcttttcagaagagattaactatgcaaggcagaactttcagctacctgaatttagtattaaagaacttcgtgatgtttcagcaatagggggcaaagaaatctatctattgtactcagatgaagaaggacttttttatatttatgaccatcaaacctcaaccatttttacaacttctgataaggaagctattaaagatcttttaacactccaaagcattcaaaaggttgtatatgatttaaaaaatatactccataaggtggactttgatgaagctaatcagataaaaaattgtaatgatgttatgttggcttcatatgttttggacagtacacgcagttcgtacgatttggaaacattgtttatttcttatctcaacactgatatagctgcaatcaaagagaatagatgggctggtgctacagttttattaagaaatctttgggatgaactttcaaaactcattgatttaaactcggcccaatacgtttatgagagcatagagatgcctcttgttcccattttatatgaaatggagaaaatcggttttaaggttgacaaaaacactttgcaggagtatacaaaagagattgagagcaagcttttaaagttggaatcacagatttatcaaatagccggtgaatggtttaacataaactcgccaaaacaactctcatatatattattcgaaaaactgaagcttccggttgttaaaaagaccaaaacaggatattcaacagatgccgaggtattagaagagctgtatgataaacatgacataataccgcttattctggattatagaatgtatacgaaaatactgacaacttactgtcagggactggttcaggcaataaatcctgcaactggaagaattcataccaactttattcagacaggtacggcaactggaagacttgcaagtgcagagcccaatctgcaaaatattcctgtaaaatatgatgagggaaagctaataagaaaggcatttgttccagatgaaggttatgtgttgatagatgctgattattctcagattgagcttagaatacttgcacatatctctgaggatgaacgactgataaatgcttttaaaaataaccttgatattcattcacagacggcggcagagatctttggtgtggatataagtcaggttacaccaattatgcgaagccaggcaaaagcagttaactttggaattgtatatggtatatctgattatggactttcacgggatataaagatttcaagaaaagaagcagccgagtttattaatcgttattttgaaaagtatcccagagtaaaagaatatttggacaatgtcgtcaagtttgcccgtgaaaacggatttgttttgacaatatttaacaggaaaaggtatatcaaggatataaagtctactaatcataacctgagaaactatgcagagagaatagcaatgaattcacctatccagggaagtgctgcagatattatgaaaatagcaatgataagagtttataaaaagctaaaagaaaacaatttaaaatcaagaattattctgcaggtccatgacgaacttttgattgaatcaccctatgaagagaaagagatagtaaaggaaatagtaaaatcggagatggaaaatgcggttttattgaaagttcctttggtagttgaagtgaaagaaggttcaaattggtatgaaacaaagtaaaggatcc

SEQ ID NO: 1662 - DNA, 2623 bp, Artificial Sequence
  Description of Artificial Sequence: Synthetic DNA sequence of Caldicellulosiruptor TOK13B DNA Polymerase K776I
atgaaatacctgctgccgaccgctgctgctggtctgctgctcctcgctgcccagccggcgatggccatggaatttgttatttttgatgggaatagtattctgtatagagctttttttgccttgccacagcttactacctcaacaggcatacctacaaatgctatatatggttttttgaatgtgctgttaaaatacttagattctgaaaaaccggattatgtagcagtagcttttgacaaaaaaggcagagctgtccgaaaaagtgaatatgaagaatacaaggctaacagaaaaccgatgccagattctcttcaggttcagataccttacgtaagagaaatacttgctgctctgaacattcctgtactgaaatgtgaagggtatgaagctgatgacgttataggcacacttgtaaatagatttaaagcccaggatttagagattgtgataataaccggagacagagatacacttcagttacttgataaaaatgtaattgtcaaaatagtcacaacaaggtttgacaggacaactgaagatttgtatgctgtagaaaatgtaaaagaaaaatatggtgtttttgcgcatcaggttgttgactataaagcattagtaggtgatgcgtcagacaatataccaggtgttaagggaattggagataaaactgccataaagctgttagaagagtaccagactctggagaatatatatcagaatctaaataacattaaaggagcgctaaaagagaagttggaatcaggaaaagacatggcatttttatcaaaaagactggctactatcatatgcgatttaccaattgaggtgaatcttgaagaattaaaaaccaaagaatgggacaaagaaagactttatcagattttacttcaacttgagtttaaaagctttattaaaagactgggcttttcagaagagattaactatgcaaggcagaactttcagctacctgaatttagtattaaagaacttcgtgatgtttcagcaatagggggcaaagaaatctatctattgtactcagatgaagaaggacttttttatatttatgaccatcaaacctcaaccatttttacaacttctgataaggaagctattaaagatcttttaacactccaaagcattcaaaaggttgtatatgatttaaaaaatatactccataaggtggactttgatgaagctaatcagataaaaaattgtaatgatgttatgttggcttcatatgttttggacagtacacgcagttcgtacgatttggaaacattgtttatttcttatctcaacactgatatagctgcaatcaaagagaatagatgggctggtgctacagttttattaagaaatctttgggatgaactttcaaaactcattgatttaaactcggcccaatacgtttatgagagcatagagatgcctcttgttcccattttatatgaaatggagaaaatcggttttaaggttgacaaaaacactttgcaggagtatacaaaagagattgagagcaagcttttaaagttggaatcacagatttatcaaatagccggtgaatggtttaacataaactcgccaaaacaactctcatatatattattcgaaaaactgaagcttccggttgttaaaaagaccaaaacaggatattcaacagatgccgaggtattagaagagctgtatgataaacatgacataataccgcttattctggattatagaatgtatacgaaaatactgacaacttactgtcagggactggttcaggcaataaatcctgcaactggaagaattcataccaactttattcagacaggtacggcaactggaagacttgcaagtgcagagcccaatctgcaaaatattcctgtaaaatatgatgagggaaagctaataagaaaggcatttgttccagatgaaggttatgtgttgatagatgctgattattctcagattgagcttagaatacttgcacatatctctgaggatgaacgactgataaatgcttttaaaaataaccttgatattcattcacagacggcggcagagatctttggtgtggatataagtcaggttacaccaattatgcgaagccaggcaaaagcagttaactttggaattgtatatggtatatctgattatggactttcacgggatataaagatttcaagaaaagaagcagccgagtttattaatcgttattttgaaaagtatcccagagtaaaagaatatttggacaatgtcgtcaagtttgcccgtgaaaacggatttgttttgacaatatttaacaggaaaaggtatatcaaggatataaagtctactaatattaacctgagaaactatgcagagagaatagcaatgaattcacctatccagggaagtgctgcagatattatgaaaatagcaatgataagagtttataaaaagctaaaagaaaacaatttaaaatcaagaattattctgcaggtccatgacgaacttttgattgaatcaccctatgaagagaaagagatagtaaaggaaatagtaaaatcggagatggaaaatgcggttttattgaaagttcctttggtagttgaagtgaaagaaggttcaaattggtatgaaacaaagtaaaggatcc

SEQ ID NO: 1663 - DNA, 2623 bp, Artificial Sequence
  Description of Artificial Sequence: Synthetic DNA sequence of Caldicellulosiruptor TOK13B DNA Polymerase K776L
atgaaatacctgctgccgaccgctgctgctggtctgctgctcctcgctgcccagccggcgatggccatggaatttgttatttttgatgggaatagtattctgtatagagctttttttgccttgccacagcttactacctcaacaggcatacctacaaatgctatatatggttttttgaatgtgctgttaaaatacttagattctgaaaaaccggattatgtagcagtagcttttgacaaaaaaggcagagctgtccgaaaaagtgaatatgaagaatacaaggctaacagaaaaccgatgccagattctcttcaggttcagataccttacgtaagagaaatacttgctgctctgaacattcctgtactgaaatgtgaagggtatgaagctgatgacgttataggcacacttgtaaatagatttaaagcccaggatttagagattgtgataataaccggagacagagatacacttcagttacttgataaaaatgtaattgtcaaaatagtcacaacaaggtttgacaggacaactgaagatttgtatgctgtagaaaatgtaaaagaaaaatatggtgtttttgcgcatcaggttgttgactataaagcattagtaggtgatgcgtcagacaatataccaggtgttaagggaattggagataaaactgccataaagctgttagaagagtaccagactctggagaatatatatcagaatctaaataacattaaaggagcgctaaaagagaagttggaatcaggaaaagacatggcatttttatcaaaaagactggctactatcatatgcgatttaccaattgaggtgaatcttgaagaattaaaaaccaaagaatgggacaaagaaagactttatcagattttacttcaacttgagtttaaaagctttattaaaagactgggcttttcagaagagattaactatgcaaggcagaactttcagctacctgaatttagtattaaagaacttcgtgatgtttcagcaatagggggcaaagaaatctatctattgtactcagatgaagaaggacttttttatatttatgaccatcaaacctcaaccatttttacaacttctgataaggaagctattaaagatcttttaacactccaaagcattcaaaaggttgtatatgatttaaaaaatatactccataaggtggactttgatgaagctaatcagataaaaaattgtaatgatgttatgttggcttcatatgttttggacagtacacgcagttcgtacgatttggaaacattgtttatttcttatctcaacactgatatagctgcaatcaaagagaatagatgggctggtgctacagttttattaagaaatctttgggatgaactttcaaaactcattgatttaaactcggcccaatacgtttatgagagcatagagatgcctcttgttcccattttatatgaaatggagaaaatcggttttaaggttgacaaaaacactttgcaggagtatacaaaagagattgagagcaagcttttaaagttggaatcacagatttatcaaatagccggtgaatggtttaacataaactcgccaaaacaactctcatatatattattcgaaaaactgaagcttccggttgttaaaaagaccaaaacaggatattcaacagatgccgaggtattagaagagctgtatgataaacatgacataataccgcttattctggattatagaatgtatacgaaaatactgacaacttactgtcagggactggttcaggcaataaatcctgcaactggaagaattcataccaactttattcagacaggtacggcaactggaagacttgcaagtgcagagcccaatctgcaaaatattcctgtaaaatatgatgagggaaagctaataagaaaggcatttgttccagatgaaggttatgtgttgatagatgctgattattctcagattgagcttagaatacttgcacatatctctgaggatgaacgactgataaatgcttttaaaaataaccttgatattcattcacagacggcggcagagatctttggtgtggatataagtcaggttacaccaattatgcgaagccaggcaaaagcagttaactttggaattgtatatggtatatctgattatggactttcacgggatataaagatttcaagaaaagaagcagccgagtttattaatcgttattttgaaaagtatcccagagtaaaagaatatttggacaatgtcgtcaagtttgcccgtgaaaacggatttgttttgacaatatttaacaggaaaaggtatatcaaggatataaagtctactaatcttaacctgagaaactatgcagagagaatagcaatgaattcacctatccagggaagtgctgcagatattatgaaaatagcaatgataagagtttataaaaagctaaaagaaaacaatttaaaatcaagaattattctgcaggtccatgacgaacttttgattgaatcaccctatgaagagaaagagatagtaaaggaaatagtaaaatcggagatggaaaatgcggttttattgaaagttcctttggtagttgaagtgaaagaaggttcaaattggtatgaaacaaagtaaaggatcc

SEQ ID NO: 1664 - DNA, 2623 bp, Artificial Sequence
  Description of Artificial Sequence: Synthetic DNA sequence of Caldicellulosiruptor TOK13B DNA Polymerase K776M
atgaaatacctgctgccgaccgctgctgctggtctgctgctcctcgctgcccagccggcgatggccatggaatttgttatttttgatgggaatagtattctgtatagagctttttttgccttgccacagcttactacctcaacaggcatacctacaaatgctatatatggttttttgaatgtgctgttaaaatacttagattctgaaaaaccggattatgtagcagtagcttttgacaaaaaaggcagagctgtccgaaaaagtgaatatgaagaatacaaggctaacagaaaaccgatgccagattctcttcaggttcagataccttacgtaagagaaatacttgctgctctgaacattcctgtactgaaatgtgaagggtatgaagctgatgacgttataggcacacttgtaaatagatttaaagcccaggatttagagattgtgataataaccggagacagagatacacttcagttacttgataaaaatgtaattgtcaaaatagtcacaacaaggtttgacaggacaactgaagatttgtatgctgtagaaaatgtaaaagaaaaatatggtgtttttgcgcatcaggttgttgactataaagcattagtaggtgatgcgtcagacaatataccaggtgttaagggaattggagataaaactgccataaagctgttagaagagtaccagactctggagaatatatatcagaatctaaataacattaaaggagcgctaaaagagaagttggaatcaggaaaagacatggcatttttatcaaaaagactggctactatcatatgcgatttaccaattgaggtgaatcttgaagaattaaaaaccaaagaatgggacaaagaaagactttatcagattttacttcaacttgagtttaaaagctttattaaaagactgggcttttcagaagagattaactatgcaaggcagaactttcagctacctgaatttagtattaaagaacttcgtgatgtttcagcaatagggggcaaagaaatctatctattgtactcagatgaagaaggacttttttatatttatgaccatcaaacctcaaccatttttacaacttctgataaggaagctattaaagatcttttaacactccaaagcattcaaaaggttgtatatgatttaaaaaatatactccataaggtggactttgatgaagctaatcagataaaaaattgtaatgatgttatgttggcttcatatgttttggacagtacacgcagttcgtacgatttggaaacattgtttatttcttatctcaacactgatatagctgcaatcaaagagaatagatgggctggtgctacagttttattaagaaatctttgggatgaactttcaaaactcattgatttaaactcggcccaatacgtttatgagagcatagagatgcctcttgttcccattttatatgaaatggagaaaatcggttttaaggttgacaaaaacactttgcaggagtatacaaaagagattgagagcaagcttttaaagttggaatcacagatttatcaaatagccggtgaatggtttaacataaactcgccaaaacaactctcatatatattattcgaaaaactgaagcttccggttgttaaaaagaccaaaacaggatattcaacagatgccgaggtattagaagagctgtatgataaacatgacataataccgcttattctggattatagaatgtatacgaaaatactgacaacttactgtcagggactggttcaggcaataaatcctgcaactggaagaattcataccaactttattcagacaggtacggcaactggaagacttgcaagtgcagagcccaatctgcaaaatattcctgtaaaatatgatgagggaaagctaataagaaaggcatttgttccagatgaaggttatgtgttgatagatgctgattattctcagattgagcttagaatacttgcacatatctctgaggatgaacgactgataaatgcttttaaaaataaccttgatattcattcacagacggcggcagagatctttggtgtggatataagtcaggttacaccaattatgcgaagccaggcaaaagcagttaactttggaattgtatatggtatatctgattatggactttcacgggatataaagatttcaagaaaagaagcagccgagtttattaatcgttattttgaaaagtatcccagagtaaaagaatatttggacaatgtcgtcaagtttgcccgtgaaaacggatttgttttgacaatatttaacaggaaaaggtatatcaaggatataaagtctactaatatgaacctgagaaactatgcagagagaatagcaatgaattcacctatccagggaagtgctgcagatattatgaaaatagcaatgataagagtttataaaaagctaaaagaaaacaatttaaaatcaagaattattctgcaggtccatgacgaacttttgattgaatcaccctatgaagagaaagagatagtaaaggaaatagtaaaatcggagatggaaaatgcggttttattgaaagttcctttggtagttgaagtgaaagaaggttcaaattggtatgaaacaaagtaaaggatcc

SEQ ID NO: 1665 - DNA, 2623 bp, Artificial Sequence
  Description of Artificial Sequence: Synthetic DNA sequence of Caldicellulosiruptor TOK13B DNA Polymerase K776F
atgaaatacctgctgccgaccgctgctgctggtctgctgctcctcgctgcccagccggcgatggccatggaatttgttatttttgatgggaatagtattctgtatagagctttttttgccttgccacagcttactacctcaacaggcatacctacaaatgctatatatggttttttgaatgtgctgttaaaatacttagattctgaaaaaccggattatgtagcagtagcttttgacaaaaaaggcagagctgtccgaaaaagtgaatatgaagaatacaaggctaacagaaaaccgatgccagattctcttcaggttcagataccttacgtaagagaaatacttgctgctctgaacattcctgtactgaaatgtgaagggtatgaagctgatgacgttataggcacacttgtaaatagatttaaagcccaggatttagagattgtgataataaccggagacagagatacacttcagttacttgataaaaatgtaattgtcaaaatagtcacaacaaggtttgacaggacaactgaagatttgtatgctgtagaaaatgtaaaagaaaaatatggtgtttttgcgcatcaggttgttgactataaagcattagtaggtgatgcgtcagacaatataccaggtgttaagggaattggagataaaactgccataaagctgttagaagagtaccagactctggagaatatatatcagaatctaaataacattaaaggagcgctaaaagagaagttggaatcaggaaaagacatggcatttttatcaaaaagactggctactatcatatgcgatttaccaattgaggtgaatcttgaagaattaaaaaccaaagaatgggacaaagaaagactttatcagattttacttcaacttgagtttaaaagctttattaaaagactgggcttttcagaagagattaactatgcaaggcagaactttcagctacctgaatttagtattaaagaacttcgtgatgtttcagcaatagggggcaaagaaatctatctattgtactcagatgaagaaggacttttttatatttatgaccatcaaacctcaaccatttttacaacttctgataaggaagctattaaagatcttttaacactccaaagcattcaaaaggttgtatatgatttaaaaaatatactccataaggtggactttgatgaagctaatcagataaaaaattgtaatgatgttatgttggcttcatatgttttggacagtacacgcagttcgtacgatttggaaacattgtttatttcttatctcaacactgatatagctgcaatcaaagagaatagatgggctggtgctacagttttattaagaaatctttgggatgaactttcaaaactcattgatttaaactcggcccaatacgtttatgagagcatagagatgcctcttgttcccattttatatgaaatggagaaaatcggttttaaggttgacaaaaacactttgcaggagtatacaaaagagattgagagcaagcttttaaagttggaatcacagatttatcaaatagccggtgaatggtttaacataaactcgccaaaacaactctcatatatattattcgaaaaactgaagcttccggttgttaaaaagaccaaaacaggatattcaacagatgccgaggtattagaagagctgtatgataaacatgacataataccgcttattctggattatagaatgtatacgaaaatactgacaacttactgtcagggactggttcaggcaataaatcctgcaactggaagaattcataccaactttattcagacaggtacggcaactggaagacttgcaagtgcagagcccaatctgcaaaatattcctgtaaaatatgatgagggaaagctaataagaaaggcatttgttccagatgaaggttatgtgttgatagatgctgattattctcagattgagcttagaatacttgcacatatctctgaggatgaacgactgataaatgcttttaaaaataaccttgatattcattcacagacggcggcagagatctttggtgtggatataagtcaggttacaccaattatgcgaagccaggcaaaagcagttaactttggaattgtatatggtatatctgattatggactttcacgggatataaagatttcaagaaaagaagcagccgagtttattaatcgttattttgaaaagtatcccagagtaaaagaatatttggacaatgtcgtcaagtttgcccgtgaaaacggatttgttttgacaatatttaacaggaaaaggtatatcaaggatataaagtctactaattttaacctgagaaactatgcagagagaatagcaatgaattcacctatccagggaagtgctgcagatattatgaaaatagcaatgataagagtttataaaaagctaaaagaaaacaatttaaaatcaagaattattctgcaggtccatgacgaacttttgattgaatcaccctatgaagagaaagagatagtaaaggaaatagtaaaatcggagatggaaaatgcggttttattgaaagttcctttggtagttgaagtgaaagaaggttcaaattggtatgaaacaaagtaaaggatcc

SEQ ID NO: 1666 - DNA, 2623 bp, Artificial Sequence
  Description of Artificial Sequence: Synthetic DNA sequence of Caldicellulosiruptor TOK13B DNA Polymerase K776P
atgaaatacctgctgccgaccgctgctgctggtctgctgctcctcgctgcccagccggcgatggccatggaatttgttatttttgatgggaatagtattctgtatagagctttttttgccttgccacagcttactacctcaacaggcatacctacaaatgctatatatggttttttgaatgtgctgttaaaatacttagattctgaaaaaccggattatgtagcagtagcttttgacaaaaaaggcagagctgtccgaaaaagtgaatatgaagaatacaaggctaacagaaaaccgatgccagattctcttcaggttcagataccttacgtaagagaaatacttgctgctctgaacattcctgtactgaaatgtgaagggtatgaagctgatgacgttataggcacacttgtaaatagatttaaagcccaggatttagagattgtgataataaccggagacagagatacacttcagttacttgataaaaatgtaattgtcaaaatagtcacaacaaggtttgacaggacaactgaagatttgtatgctgtagaaaatgtaaaagaaaaatatggtgtttttgcgcatcaggttgttgactataaagcattagtaggtgatgcgtcagacaatataccaggtgttaagggaattggagataaaactgccataaagctgttagaagagtaccagactctggagaatatatatcagaatctaaataacattaaaggagcgctaaaagagaagttggaatcaggaaaagacatggcatttttatcaaaaagactggctactatcatatgcgatttaccaattgaggtgaatcttgaagaattaaaaaccaaagaatgggacaaagaaagactttatcagattttacttcaacttgagtttaaaagctttattaaaagactgggcttttcagaagagattaactatgcaaggcagaactttcagctacctgaatttagtattaaagaacttcgtgatgtttcagcaatagggggcaaagaaatctatctattgtactcagatgaagaaggacttttttatatttatgaccatcaaacctcaaccatttttacaacttctgataaggaagctattaaagatcttttaacactccaaagcattcaaaaggttgtatatgatttaaaaaatatactccataaggtggactttgatgaagctaatcagataaaaaattgtaatgatgttatgttggcttcatatgttttggacagtacacgcagttcgtacgatttggaaacattgtttatttcttatctcaacactgatatagctgcaatcaaagagaatagatgggctggtgctacagttttattaagaaatctttgggatgaactttcaaaactcattgatttaaactcggcccaatacgtttatgagagcatagagatgcctcttgttcccattttatatgaaatggagaaaatcggttttaaggttgacaaaaacactttgcaggagtatacaaaagagattgagagcaagcttttaaagttggaatcacagatttatcaaatagccggtgaatggtttaacataaactcgccaaaacaactctcatatatattattcgaaaaactgaagcttccggttgttaaaaagaccaaaacaggatattcaacagatgccgaggtattagaagagctgtatgataaacatgacataataccgcttattctggattatagaatgtatacgaaaatactgacaacttactgtcagggactggttcaggcaataaatcctgcaactggaagaattcataccaactttattcagacaggtacggcaactggaagacttgcaagtgcagagcccaatctgcaaaatattcctgtaaaatatgatgagggaaagctaataagaaaggcatttgttccagatgaaggttatgtgttgatagatgctgattattctcagattgagcttagaatacttgcacatatctctgaggatgaacgactgataaatgcttttaaaaataaccttgatattcattcacagacggcggcagagatctttggtgtggatataagtcaggttacaccaattatgcgaagccaggcaaaagcagttaactttggaattgtatatggtatatctgattatggactttcacgggatataaagatttcaagaaaagaagcagccgagtttattaatcgttattttgaaaagtatcccagagtaaaagaatatttggacaatgtcgtcaagtttgcccgtgaaaacggatttgttttgacaatatttaacaggaaaaggtatatcaaggatataaagtctactaatcctaacctgagaaactatgcagagagaatagcaatgaattcacctatccagggaagtgctgcagatattatgaaaatagcaatgataagagtttataaaaagctaaaagaaaacaatttaaaatcaagaattattctgcaggtccatgacgaacttttgattgaatcaccctatgaagagaaagagatagtaaaggaaatagtaaaatcggagatggaaaatgcggttttattgaaagttcctttggtagttgaagtgaaagaaggttcaaattggtatgaaacaaagtaaaggatcc

SEQ ID NO: 1667 - DNA, 2623 bp, Artificial Sequence
  Description of Artificial Sequence: Synthetic DNA sequence of Caldicellulosiruptor TOK13B DNA Polymerase K776S
atgaaatacctgctgccgaccgctgctgctggtctgctgctcctcgctgcccagccggcgatggccatggaatttgttatttttgatgggaatagtattctgtatagagctttttttgccttgccacagcttactacctcaacaggcatacctacaaatgctatatatggttttttgaatgtgctgttaaaatacttagattctgaaaaaccggattatgtagcagtagcttttgacaaaaaaggcagagctgtccgaaaaagtgaatatgaagaatacaaggctaacagaaaaccgatgccagattctcttcaggttcagataccttacgtaagagaaatacttgctgctctgaacattcctgtactgaaatgtgaagggtatgaagctgatgacgttataggcacacttgtaaatagatttaaagcccaggatttagagattgtgataataaccggagacagagatacacttcagttacttgataaaaatgtaattgtcaaaatagtcacaacaaggtttgacaggacaactgaagatttgtatgctgtagaaaatgtaaaagaaaaatatggtgtttttgcgcatcaggttgttgactataaagcattagtaggtgatgcgtcagacaatataccaggtgttaagggaattggagataaaactgccataaagctgttagaagagtaccagactctggagaatatatatcagaatctaaataacattaaaggagcgctaaaagagaagttggaatcaggaaaagacatggcatttttatcaaaaagactggctactatcatatgcgatttaccaattgaggtgaatcttgaagaattaaaaaccaaagaatgggacaaagaaagactttatcagattttacttcaacttgagtttaaaagctttattaaaagactgggcttttcagaagagattaactatgcaaggcagaactttcagctacctgaatttagtattaaagaacttcgtgatgtttcagcaatagggggcaaagaaatctatctattgtactcagatgaagaaggacttttttatatttatgaccatcaaacctcaaccatttttacaacttctgataaggaagctattaaagatcttttaacactccaaagcattcaaaaggttgtatatgatttaaaaaatatactccataaggtggactttgatgaagctaatcagataaaaaattgtaatgatgttatgttggcttcatatgttttggacagtacacgcagttcgtacgatttggaaacattgtttatttcttatctcaacactgatatagctgcaatcaaagagaatagatgggctggtgctacagttttattaagaaatctttgggatgaactttcaaaactcattgatttaaactcggcccaatacgtttatgagagcatagagatgcctcttgttcccattttatatgaaatggagaaaatcggttttaaggttgacaaaaacactttgcaggagtatacaaaagagattgagagcaagcttttaaagttggaatcacagatttatcaaatagccggtgaatggtttaacataaactcgccaaaacaactctcatatatattattcgaaaaactgaagcttccggttgttaaaaagaccaaaacaggatattcaacagatgccgaggtattagaagagctgtatgataaacatgacataataccgcttattctggattatagaatgtatacgaaaatactgacaacttactgtcagggactggttcaggcaataaatcctgcaactggaagaattcataccaactttattcagacaggtacggcaactggaagacttgcaagtgcagagcccaatctgcaaaatattcctgtaaaatatgatgagggaaagctaataagaaaggcatttgttccagatgaaggttatgtgttgatagatgctgattattctcagattgagcttagaatacttgcacatatctctgaggatgaacgactgataaatgcttttaaaaataaccttgatattcattcacagacggcggcagagatctttggtgtggatataagtcaggttacaccaattatgcgaagccaggcaaaagcagttaactttggaattgtatatggtatatctgattatggactttcacgggatataaagatttcaagaaaagaagcagccgagtttattaatcgttattttgaaaagtatcccagagtaaaagaatatttggacaatgtcgtcaagtttgcccgtgaaaacggatttgttttgacaatatttaacaggaaaaggtatatcaaggatataaagtctactaattctaacctgagaaactatgcagagagaatagcaatgaattcacctatccagggaagtgctgcagatattatgaaaatagcaatgataagagtttataaaaagctaaaagaaaacaatttaaaatcaagaattattctgcaggtccatgacgaacttttgattgaatcaccctatgaagagaaagagatagtaaaggaaatagtaaaatcggagatggaaaatgcggttttattgaaagttcctttggtagttgaagtgaaagaaggttcaaattggtatgaaacaaagtaaaggatcc

SEQ ID NO: 1668 - DNA, 2623 bp, Artificial Sequence
  Description of Artificial Sequence: Synthetic DNA sequence of Caldicellulosiruptor TOK13B DNA Polymerase K776T
atgaaatacctgctgccgaccgctgctgctggtctgctgctcctcgctgcccagccggcgatggccatggaatttgttatttttgatgggaatagtattctgtatagagctttttttgccttgccacagcttactacctcaacaggcatacctacaaatgctatatatggttttttgaatgtgctgttaaaatacttagattctgaaaaaccggattatgtagcagtagcttttgacaaaaaaggcagagctgtccgaaaaagtgaatatgaagaatacaaggctaacagaaaaccgatgccagattctcttcaggttcagataccttacgtaagagaaatacttgctgctctgaacattcctgtactgaaatgtgaagggtatgaagctgatgacgttataggcacacttgtaaatagatttaaagcccaggatttagagattgtgataataaccggagacagagatacacttcagttacttgataaaaatgtaattgtcaaaatagtcacaacaaggtttgacaggacaactgaagatttgtatgctgtagaaaatgtaaaagaaaaatatggtgtttttgcgcatcaggttgttgactataaagcattagtaggtgatgcgtcagacaatataccaggtgttaagggaattggagataaaactgccataaagctgttagaagagtaccagactctggagaatatatatcagaatctaaataacattaaaggagcgctaaaagagaagttggaatcaggaaaagacatggcatttttatcaaaaagactggctactatcatatgcgatttaccaattgaggtgaatcttgaagaattaaaaaccaaagaatgggacaaagaaagactttatcagattttacttcaacttgagtttaaaagctttattaaaagactgggcttttcagaagagattaactatgcaaggcagaactttcagctacctgaatttagtattaaagaacttcgtgatgtttcagcaatagggggcaaagaaatctatctattgtactcagatgaagaaggacttttttatatttatgaccatcaaacctcaaccatttttacaacttctgataaggaagctattaaagatcttttaacactccaaagcattcaaaaggttgtatatgatttaaaaaatatactccataaggtggactttgatgaagctaatcagataaaaaattgtaatgatgttatgttggcttcatatgttttggacagtacacgcagttcgtacgatttggaaacattgtttatttcttatctcaacactgatatagctgcaatcaaagagaatagatgggctggtgctacagttttattaagaaatctttgggatgaactttcaaaactcattgatttaaactcggcccaatacgtttatgagagcatagagatgcctcttgttcccattttatatgaaatggagaaaatcggttttaaggttgacaaaaacactttgcaggagtatacaaaagagattgagagcaagcttttaaagttggaatcacagatttatcaaatagccggtgaatggtttaacataaactcgccaaaacaactctcatatatattattcgaaaaactgaagcttccggttgttaaaaagaccaaaacaggatattcaacagatgccgaggtattagaagagctgtatgataaacatgacataataccgcttattctggattatagaatgtatacgaaaatactgacaacttactgtcagggactggttcaggcaataaatcctgcaactggaagaattcataccaactttattcagacaggtacggcaactggaagacttgcaagtgcagagcccaatctgcaaaatattcctgtaaaatatgatgagggaaagctaataagaaaggcatttgttccagatgaaggttatgtgttgatagatgctgattattctcagattgagcttagaatacttgcacatatctctgaggatgaacgactgataaatgcttttaaaaataaccttgatattcattcacagacggcggcagagatctttggtgtggatataagtcaggttacaccaattatgcgaagccaggcaaaagcagttaactttggaattgtatatggtatatctgattatggactttcacgggatataaagatttcaagaaaagaagcagccgagtttattaatcgttattttgaaaagtatcccagagtaaaagaatatttggacaatgtcgtcaagtttgcccgtgaaaacggatttgttttgacaatatttaacaggaaaaggtatatcaaggatataaagtctactaatactaacctgagaaactatgcagagagaatagcaatgaattcacctatccagggaagtgctgcagatattatgaaaatagcaatgataagagtttataaaaagctaaaagaaaacaatttaaaatcaagaattattctgcaggtccatgacgaacttttgattgaatcaccctatgaagagaaagagatagtaaaggaaatagtaaaatcggagatggaaaatgcggttttattgaaagttcctttggtagttgaagtgaaagaaggttcaaattggtatgaaacaaagtaaaggatcc

SEQ ID NO: 1669 - DNA, 2623 bp, Artificial Sequence
  Description of Artificial Sequence: Synthetic DNA sequence of Caldicellulosiruptor TOK13B DNA Polymerase K776W
atgaaatacctgctgccgaccgctgctgctggtctgctgctcctcgctgcccagccggcgatggccatggaatttgttatttttgatgggaatagtattctgtatagagctttttttgccttgccacagcttactacctcaacaggcatacctacaaatgctatatatggttttttgaatgtgctgttaaaatacttagattctgaaaaaccggattatgtagcagtagcttttgacaaaaaaggcagagctgtccgaaaaagtgaatatgaagaatacaaggctaacagaaaaccgatgccagattctcttcaggttcagataccttacgtaagagaaatacttgctgctctgaacattcctgtactgaaatgtgaagggtatgaagctgatgacgttataggcacacttgtaaatagatttaaagcccaggatttagagattgtgataataaccggagacagagatacacttcagttacttgataaaaatgtaattgtcaaaatagtcacaacaaggtttgacaggacaactgaagatttgtatgctgtagaaaatgtaaaagaaaaatatggtgtttttgcgcatcaggttgttgactataaagcattagtaggtgatgcgtcagacaatataccaggtgttaagggaattggagataaaactgccataaagctgttagaagagtaccagactctggagaatatatatcagaatctaaataacattaaaggagcgctaaaagagaagttggaatcaggaaaagacatggcatttttatcaaaaagactggctactatcatatgcgatttaccaattgaggtgaatcttgaagaattaaaaaccaaagaatgggacaaagaaagactttatcagattttacttcaacttgagtttaaaagctttattaaaagactgggcttttcagaagagattaactatgcaaggcagaactttcagctacctgaatttagtattaaagaacttcgtgatgtttcagcaatagggggcaaagaaatctatctattgtactcagatgaagaaggacttttttatatttatgaccatcaaacctcaaccatttttacaacttctgataaggaagctattaaagatcttttaacactccaaagcattcaaaaggttgtatatgatttaaaaaatatactccataaggtggactttgatgaagctaatcagataaaaaattgtaatgatgttatgttggcttcatatgttttggacagtacacgcagttcgtacgatttggaaacattgtttatttcttatctcaacactgatatagctgcaatcaaagagaatagatgggctggtgctacagttttattaagaaatctttgggatgaactttcaaaactcattgatttaaactcggcccaatacgtttatgagagcatagagatgcctcttgttcccattttatatgaaatggagaaaatcggttttaaggttgacaaaaacactttgcaggagtatacaaaagagattgagagcaagcttttaaagttggaatcacagatttatcaaatagccggtgaatggtttaacataaactcgccaaaacaactctcatatatattattcgaaaaactgaagcttccggttgttaaaaagaccaaaacaggatattcaacagatgccgaggtattagaagagctgtatgataaacatgacataataccgcttattctggattatagaatgtatacgaaaatactgacaacttactgtcagggactggttcaggcaataaatcctgcaactggaagaattcataccaactttattcagacaggtacggcaactggaagacttgcaagtgcagagcccaatctgcaaaatattcctgtaaaatatgatgagggaaagctaataagaaaggcatttgttccagatgaaggttatgtgttgatagatgctgattattctcagattgagcttagaatacttgcacatatctctgaggatgaacgactgataaatgcttttaaaaataaccttgatattcattcacagacggcggcagagatctttggtgtggatataagtcaggttacaccaattatgcgaagccaggcaaaagcagttaactttggaattgtatatggtatatctgattatggactttcacgggatataaagatttcaagaaaagaagcagccgagtttattaatcgttattttgaaaagtatcccagagtaaaagaatatttggacaatgtcgtcaagtttgcccgtgaaaacggatttgttttgacaatatttaacaggaaaaggtatatcaaggatataaagtctactaattggaacctgagaaactatgcagagagaatagcaatgaattcacctatccagggaagtgctgcagatattatgaaaatagcaatgataagagtttataaaaagctaaaagaaaacaatttaaaatcaagaattattctgcaggtccatgacgaacttttgattgaatcaccctatgaagagaaagagatagtaaaggaaatagtaaaatcggagatggaaaatgcggttttattgaaagttcctttggtagttgaagtgaaagaaggttcaaattggtatgaaacaaagtaaaggatcc

SEQ ID NO: 1670 - DNA, 2623 bp, Artificial Sequence
  Description of Artificial Sequence: Synthetic DNA sequence of Caldicellulosiruptor TOK13B DNA Polymerase K776Y
atgaaatacctgctgccgaccgctgctgctggtctgctgctcctcgctgcccagccggcgatggccatggaatttgttatttttgatgggaatagtattctgtatagagctttttttgccttgccacagcttactacctcaacaggcatacctacaaatgctatatatggttttttgaatgtgctgttaaaatacttagattctgaaaaaccggattatgtagcagtagcttttgacaaaaaaggcagagctgtccgaaaaagtgaatatgaagaatacaaggctaacagaaaaccgatgccagattctcttcaggttcagataccttacgtaagagaaatacttgctgctctgaacattcctgtactgaaatgtgaagggtatgaagctgatgacgttataggcacacttgtaaatagatttaaagcccaggatttagagattgtgataataaccggagacagagatacacttcagttacttgataaaaatgtaattgtcaaaatagtcacaacaaggtttgacaggacaactgaagatttgtatgctgtagaaaatgtaaaagaaaaatatggtgtttttgcgcatcaggttgttgactataaagcattagtaggtgatgcgtcagacaatataccaggtgttaagggaattggagataaaactgccataaagctgttagaagagtaccagactctggagaatatatatcagaatctaaataacattaaaggagcgctaaaagagaagttggaatcaggaaaagacatggcatttttatcaaaaagactggctactatcatatgcgatttaccaattgaggtgaatcttgaagaattaaaaaccaaagaatgggacaaagaaagactttatcagattttacttcaacttgagtttaaaagctttattaaaagactgggcttttcagaagagattaactatgcaaggcagaactttcagctacctgaatttagtattaaagaacttcgtgatgtttcagcaatagggggcaaagaaatctatctattgtactcagatgaagaaggacttttttatatttatgaccatcaaacctcaaccatttttacaacttctgataaggaagctattaaagatcttttaacactccaaagcattcaaaaggttgtatatgatttaaaaaatatactccataaggtggactttgatgaagctaatcagataaaaaattgtaatgatgttatgttggcttcatatgttttggacagtacacgcagttcgtacgatttggaaacattgtttatttcttatctcaacactgatatagctgcaatcaaagagaatagatgggctggtgctacagttttattaagaaatctttgggatgaactttcaaaactcattgatttaaactcggcccaatacgtttatgagagcatagagatgcctcttgttcccattttatatgaaatggagaaaatcggttttaaggttgacaaaaacactttgcaggagtatacaaaagagattgagagcaagcttttaaagttggaatcacagatttatcaaatagccggtgaatggtttaacataaactcgccaaaacaactctcatatatattattcgaaaaactgaagcttccggttgttaaaaagaccaaaacaggatattcaacagatgccgaggtattagaagagctgtatgataaacatgacataataccgcttattctggattatagaatgtatacgaaaatactgacaacttactgtcagggactggttcaggcaataaatcctgcaactggaagaattcataccaactttattcagacaggtacggcaactggaagacttgcaagtgcagagcccaatctgcaaaatattcctgtaaaatatgatgagggaaagctaataagaaaggcatttgttccagatgaaggttatgtgttgatagatgctgattattctcagattgagcttagaatacttgcacatatctctgaggatgaacgactgataaatgcttttaaaaataaccttgatattcattcacagacggcggcagagatctttggtgtggatataagtcaggttacaccaattatgcgaagccaggcaaaagcagttaactttggaattgtatatggtatatctgattatggactttcacgggatataaagatttcaagaaaagaagcagccgagtttattaatcgttattttgaaaagtatcccagagtaaaagaatatttggacaatgtcgtcaagtttgcccgtgaaaacggatttgttttgacaatatttaacaggaaaaggtatatcaaggatataaagtctactaattataacctgagaaactatgcagagagaatagcaatgaattcacctatccagggaagtgctgcagatattatgaaaatagcaatgataagagtttataaaaagctaaaagaaaacaatttaaaatcaagaattattctgcaggtccatgacgaacttttgattgaatcaccctatgaagagaaagagatagtaaaggaaatagtaaaatcggagatggaaaatgcggttttattgaaagttcctttggtagttgaagtgaaagaaggttcaaattggtatgaaacaaagtaaaggatcc

SEQ ID NO: 1671 - DNA, 2623 bp, Artificial Sequence
  Description of Artificial Sequence: Synthetic DNA sequence of Caldicellulosiruptor TOK13B DNA Polymerase K776V
atgaaatacctgctgccgaccgctgctgctggtctgctgctcctcgctgcccagccggcgatggccatggaatttgttatttttgatgggaatagtattctgtatagagctttttttgccttgccacagcttactacctcaacaggcatacctacaaatgctatatatggttttttgaatgtgctgttaaaatacttagattctgaaaaaccggattatgtagcagtagcttttgacaaaaaaggcagagctgtccgaaaaagtgaatatgaagaatacaaggctaacagaaaaccgatgccagattctcttcaggttcagataccttacgtaagagaaatacttgctgctctgaacattcctgtactgaaatgtgaagggtatgaagctgatgacgttataggcacacttgtaaatagatttaaagcccaggatttagagattgtgataataaccggagacagagatacacttcagttacttgataaaaatgtaattgtcaaaatagtcacaacaaggtttgacaggacaactgaagatttgtatgctgtagaaaatgtaaaagaaaaatatggtgtttttgcgcatcaggttgttgactataaagcattagtaggtgatgcgtcagacaatataccaggtgttaagggaattggagataaaactgccataaagctgttagaagagtaccagactctggagaatatatatcagaatctaaataacattaaaggagcgctaaaagagaagttggaatcaggaaaagacatggcatttttatcaaaaagactggctactatcatatgcgatttaccaattgaggtgaatcttgaagaattaaaaaccaaagaatgggacaaagaaagactttatcagattttacttcaacttgagtttaaaagctttattaaaagactgggcttttcagaagagattaactatgcaaggcagaactttcagctacctgaatttagtattaaagaacttcgtgatgtttcagcaatagggggcaaagaaatctatctattgtactcagatgaagaaggacttttttatatttatgaccatcaaacctcaaccatttttacaacttctgataaggaagctattaaagatcttttaacactccaaagcattcaaaaggttgtatatgatttaaaaaatatactccataaggtggactttgatgaagctaatcagataaaaaattgtaatgatgttatgttggcttcatatgttttggacagtacacgcagttcgtacgatttggaaacattgtttatttcttatctcaacactgatatagctgcaatcaaagagaatagatgggctggtgctacagttttattaagaaatctttgggatgaactttcaaaactcattgatttaaactcggcccaatacgtttatgagagcatagagatgcctcttgttcccattttatatgaaatggagaaaatcggttttaaggttgacaaaaacactttgcaggagtatacaaaagagattgagagcaagcttttaaagttggaatcacagatttatcaaatagccggtgaatggtttaacataaactcgccaaaacaactctcatatatattattcgaaaaactgaagcttccggttgttaaaaagaccaaaacaggatattcaacagatgccgaggtattagaagagctgtatgataaacatgacataataccgcttattctggattatagaatgtatacgaaaatactgacaacttactgtcagggactggttcaggcaataaatcctgcaactggaagaattcataccaactttattcagacaggtacggcaactggaagacttgcaagtgcagagcccaatctgcaaaatattcctgtaaaatatgatgagggaaagctaataagaaaggcatttgttccagatgaaggttatgtgttgatagatgctgattattctcagattgagcttagaatacttgcacatatctctgaggatgaacgactgataaatgcttttaaaaataaccttgatattcattcacagacggcggcagagatctttggtgtggatataagtcaggttacaccaattatgcgaagccaggcaaaagcagttaactttggaattgtatatggtatatctgattatggactttcacgggatataaagatttcaagaaaagaagcagccgagtttattaatcgttattttgaaaagtatcccagagtaaaagaatatttggacaatgtcgtcaagtttgcccgtgaaaacggatttgttttgacaatatttaacaggaaaaggtatatcaaggatataaagtctactaatgttaacctgagaaactatgcagagagaatagcaatgaattcacctatccagggaagtgctgcagatattatgaaaatagcaatgataagagtttataaaaagctaaaagaaaacaatttaaaatcaagaattattctgcaggtccatgacgaacttttgattgaatcaccctatgaagagaaagagatagtaaaggaaatagtaaaatcggagatggaaaatgcggttttattgaaagttcctttggtagttgaagtgaaagaaggttcaaattggtatgaaacaaagtaaaggatcc

SEQ ID NO: 1672 - DNA, 2623 bp, Artificial Sequence
  Description of Artificial Sequence: Synthetic DNA sequence of Caldicellulosiruptor TOK13B DNA Polymerase N777A
atgaaatacctgctgccgaccgctgctgctggtctgctgctcctcgctgcccagccggcgatggccatggaatttgttatttttgatgggaatagtattctgtatagagctttttttgccttgccacagcttactacctcaacaggcatacctacaaatgctatatatggttttttgaatgtgctgttaaaatacttagattctgaaaaaccggattatgtagcagtagcttttgacaaaaaaggcagagctgtccgaaaaagtgaatatgaagaatacaaggctaacagaaaaccgatgccagattctcttcaggttcagataccttacgtaagagaaatacttgctgctctgaacattcctgtactgaaatgtgaagggtatgaagctgatgacgttataggcacacttgtaaatagatttaaagcccaggatttagagattgtgataataaccggagacagagatacacttcagttacttgataaaaatgtaattgtcaaaatagtcacaacaaggtttgacaggacaactgaagatttgtatgctgtagaaaatgtaaaagaaaaatatggtgtttttgcgcatcaggttgttgactataaagcattagtaggtgatgcgtcagacaatataccaggtgttaagggaattggagataaaactgccataaagctgttagaagagtaccagactctggagaatatatatcagaatctaaataacattaaaggagcgctaaaagagaagttggaatcaggaaaagacatggcatttttatcaaaaagactggctactatcatatgcgatttaccaattgaggtgaatcttgaagaattaaaaaccaaagaatgggacaaagaaagactttatcagattttacttcaacttgagtttaaaagctttattaaaagactgggcttttcagaagagattaactatgcaaggcagaactttcagctacctgaatttagtattaaagaacttcgtgatgtttcagcaatagggggcaaagaaatctatctattgtactcagatgaagaaggacttttttatatttatgaccatcaaacctcaaccatttttacaacttctgataaggaagctattaaagatcttttaacactccaaagcattcaaaaggttgtatatgatttaaaaaatatactccataaggtggactttgatgaagctaatcagataaaaaattgtaatgatgttatgttggcttcatatgttttggacagtacacgcagttcgtacgatttggaaacattgtttatttcttatctcaacactgatatagctgcaatcaaagagaatagatgggctggtgctacagttttattaagaaatctttgggatgaactttcaaaactcattgatttaaactcggcccaatacgtttatgagagcatagagatgcctcttgttcccattttatatgaaatggagaaaatcggttttaaggttgacaaaaacactttgcaggagtatacaaaagagattgagagcaagcttttaaagttggaatcacagatttatcaaatagccggtgaatggtttaacataaactcgccaaaacaactctcatatatattattcgaaaaactgaagcttccggttgttaaaaagaccaaaacaggatattcaacagatgccgaggtattagaagagctgtatgataaacatgacataataccgcttattctggattatagaatgtatacgaaaatactgacaacttactgtcagggactggttcaggcaataaatcctgcaactggaagaattcataccaactttattcagacaggtacggcaactggaagacttgcaagtgcagagcccaatctgcaaaatattcctgtaaaatatgatgagggaaagctaataagaaaggcatttgttccagatgaaggttatgtgttgatagatgctgattattctcagattgagcttagaatacttgcacatatctctgaggatgaacgactgataaatgcttttaaaaataaccttgatattcattcacagacggcggcagagatctttggtgtggatataagtcaggttacaccaattatgcgaagccaggcaaaagcagttaactttggaattgtatatggtatatctgattatggactttcacgggatataaagatttcaagaaaagaagcagccgagtttattaatcgttattttgaaaagtatcccagagtaaaagaatatttggacaatgtcgtcaagtttgcccgtgaaaacggatttgttttgacaatatttaacaggaaaaggtatatcaaggatataaagtctactaataaagctctgagaaactatgcagagagaatagcaatgaattcacctatccagggaagtgctgcagatattatgaaaatagcaatgataagagtttataaaaagctaaaagaaaacaatttaaaatcaagaattattctgcaggtccatgacgaacttttgattgaatcaccctatgaagagaaagagatagtaaaggaaatagtaaaatcggagatggaaaatgcggttttattgaaagttcctttggtagttgaagtgaaagaaggttcaaattggtatgaaacaaagtaaaggatcc

SEQ ID NO: 1673 - DNA, 2623 bp, Artificial Sequence
  Description of Artificial Sequence: Synthetic DNA sequence of Caldicellulosiruptor TOK13B DNA Polymerase N777R
atgaaatacctgctgccgaccgctgctgctggtctgctgctcctcgctgcccagccggcgatggccatggaatttgttatttttgatgggaatagtattctgtatagagctttttttgccttgccacagcttactacctcaacaggcatacctacaaatgctatatatggttttttgaatgtgctgttaaaatacttagattctgaaaaaccggattatgtagcagtagcttttgacaaaaaaggcagagctgtccgaaaaagtgaatatgaagaatacaaggctaacagaaaaccgatgccagattctcttcaggttcagataccttacgtaagagaaatacttgctgctctgaacattcctgtactgaaatgtgaagggtatgaagctgatgacgttataggcacacttgtaaatagatttaaagcccaggatttagagattgtgataataaccggagacagagatacacttcagttacttgataaaaatgtaattgtcaaaatagtcacaacaaggtttgacaggacaactgaagatttgtatgctgtagaaaatgtaaaagaaaaatatggtgtttttgcgcatcaggttgttgactataaagcattagtaggtgatgcgtcagacaatataccaggtgttaagggaattggagataaaactgccataaagctgttagaagagtaccagactctggagaatatatatcagaatctaaataacattaaaggagcgctaaaagagaagttggaatcaggaaaagacatggcatttttatcaaaaagactggctactatcatatgcgatttaccaattgaggtgaatcttgaagaattaaaaaccaaagaatgggacaaagaaagactttatcagattttacttcaacttgagtttaaaagctttattaaaagactgggcttttcagaagagattaactatgcaaggcagaactttcagctacctgaatttagtattaaagaacttcgtgatgtttcagcaatagggggcaaagaaatctatctattgtactcagatgaagaaggacttttttatatttatgaccatcaaacctcaaccatttttacaacttctgataaggaagctattaaagatcttttaacactccaaagcattcaaaaggttgtatatgatttaaaaaatatactccataaggtggactttgatgaagctaatcagataaaaaattgtaatgatgttatgttggcttcatatgttttggacagtacacgcagttcgtacgatttggaaacattgtttatttcttatctcaacactgatatagctgcaatcaaagagaatagatgggctggtgctacagttttattaagaaatctttgggatgaactttcaaaactcattgatttaaactcggcccaatacgtttatgagagcatagagatgcctcttgttcccattttatatgaaatggagaaaatcggttttaaggttgacaaaaacactttgcaggagtatacaaaagagattgagagcaagcttttaaagttggaatcacagatttatcaaatagccggtgaatggtttaacataaactcgccaaaacaactctcatatatattattcgaaaaactgaagcttccggttgttaaaaagaccaaaacaggatattcaacagatgccgaggtattagaagagctgtatgataaacatgacataataccgcttattctggattatagaatgtatacgaaaatactgacaacttactgtcagggactggttcaggcaataaatcctgcaactggaagaattcataccaactttattcagacaggtacggcaactggaagacttgcaagtgcagagcccaatctgcaaaatattcctgtaaaatatgatgagggaaagctaataagaaaggcatttgttccagatgaaggttatgtgttgatagatgctgattattctcagattgagcttagaatacttgcacatatctctgaggatgaacgactgataaatgcttttaaaaataaccttgatattcattcacagacggcggcagagatctttggtgtggatataagtcaggttacaccaattatgcgaagccaggcaaaagcagttaactttggaattgtatatggtatatctgattatggactttcacgggatataaagatttcaagaaaagaagcagccgagtttattaatcgttattttgaaaagtatcccagagtaaaagaatatttggacaatgtcgtcaagtttgcccgtgaaaacggatttgttttgacaatatttaacaggaaaaggtatatcaaggatataaagtctactaataaacgtctgagaaactatgcagagagaatagcaatgaattcacctatccagggaagtgctgcagatattatgaaaatagcaatgataagagtttataaaaagctaaaagaaaacaatttaaaatcaagaattattctgcaggtccatgacgaacttttgattgaatcaccctatgaagagaaagagatagtaaaggaaatagtaaaatcggagatggaaaatgcggttttattgaaagttcctttggtagttgaagtgaaagaaggttcaaattggtatgaaacaaagtaaaggatcc

SEQ ID NO: 1674 - DNA, 2623 bp, Artificial Sequence
  Description of Artificial Sequence: Synthetic DNA sequence of Caldicellulosiruptor TOK13B DNA Polymerase N777D
atgaaatacctgctgccgaccgctgctgctggtctgctgctcctcgctgcccagccggcgatggccatggaatttgttatttttgatgggaatagtattctgtatagagctttttttgccttgccacagcttactacctcaacaggcatacctacaaatgctatatatggttttttgaatgtgctgttaaaatacttagattctgaaaaaccggattatgtagcagtagcttttgacaaaaaaggcagagctgtccgaaaaagtgaatatgaagaatacaaggctaacagaaaaccgatgccagattctcttcaggttcagataccttacgtaagagaaatacttgctgctctgaacattcctgtactgaaatgtgaagggtatgaagctgatgacgttataggcacacttgtaaatagatttaaagcccaggatttagagattgtgataataaccggagacagagatacacttcagttacttgataaaaatgtaattgtcaaaatagtcacaacaaggtttgacaggacaactgaagatttgtatgctgtagaaaatgtaaaagaaaaatatggtgtttttgcgcatcaggttgttgactataaagcattagtaggtgatgcgtcagacaatataccaggtgttaagggaattggagataaaactgccataaagctgttagaagagtaccagactctggagaatatatatcagaatctaaataacattaaaggagcgctaaaagagaagttggaatcaggaaaagacatggcatttttatcaaaaagactggctactatcatatgcgatttaccaattgaggtgaatcttgaagaattaaaaaccaaagaatgggacaaagaaagactttatcagattttacttcaacttgagtttaaaagctttattaaaagactgggcttttcagaagagattaactatgcaaggcagaactttcagctacctgaatttagtattaaagaacttcgtgatgtttcagcaatagggggcaaagaaatctatctattgtactcagatgaagaaggacttttttatatttatgaccatcaaacctcaaccatttttacaacttctgataaggaagctattaaagatcttttaacactccaaagcattcaaaaggttgtatatgatttaaaaaatatactccataaggtggactttgatgaagctaatcagataaaaaattgtaatgatgttatgttggcttcatatgttttggacagtacacgcagttcgtacgatttggaaacattgtttatttcttatctcaacactgatatagctgcaatcaaagagaatagatgggctggtgctacagttttattaagaaatctttgggatgaactttcaaaactcattgatttaaactcggcccaatacgtttatgagagcatagagatgcctcttgttcccattttatatgaaatggagaaaatcggttttaaggttgacaaaaacactttgcaggagtatacaaaagagattgagagcaagcttttaaagttggaatcacagatttatcaaatagccggtgaatggtttaacataaactcgccaaaacaactctcatatatattattcgaaaaactgaagcttccggttgttaaaaagaccaaaacaggatattcaacagatgccgaggtattagaagagctgtatgataaacatgacataataccgcttattctggattatagaatgtatacgaaaatactgacaacttactgtcagggactggttcaggcaataaatcctgcaactggaagaattcataccaactttattcagacaggtacggcaactggaagacttgcaagtgcagagcccaatctgcaaaatattcctgtaaaatatgatgagggaaagctaataagaaaggcatttgttccagatgaaggttatgtgttgatagatgctgattattctcagattgagcttagaatacttgcacatatctctgaggatgaacgactgataaatgcttttaaaaataaccttgatattcattcacagacggcggcagagatctttggtgtggatataagtcaggttacaccaattatgcgaagccaggcaaaagcagttaactttggaattgtatatggtatatctgattatggactttcacgggatataaagatttcaagaaaagaagcagccgagtttattaatcgttattttgaaaagtatcccagagtaaaagaatatttggacaatgtcgtcaagtttgcccgtgaaaacggatttgttttgacaatatttaacaggaaaaggtatatcaaggatataaagtctactaataaagatctgagaaactatgcagagagaatagcaatgaattcacctatccagggaagtgctgcagatattatgaaaatagcaatgataagagtttataaaaagctaaaagaaaacaatttaaaatcaagaattattctgcaggtccatgacgaacttttgattgaatcaccctatgaagagaaagagatagtaaaggaaatagtaaaatcggagatggaaaatgcggttttattgaaagttcctttggtagttgaagtgaaagaaggttcaaattggtatgaaacaaagtaaaggatcc

SEQ ID NO: 1675 - DNA, 2623 bp, Artificial Sequence
  Description of Artificial Sequence: Synthetic DNA sequence of Caldicellulosiruptor TOK13B DNA Polymerase N777C
atgaaatacctgctgccgaccgctgctgctggtctgctgctcctcgctgcccagccggcgatggccatggaatttgttatttttgatgggaatagtattctgtatagagctttttttgccttgccacagcttactacctcaacaggcatacctacaaatgctatatatggttttttgaatgtgctgttaaaatacttagattctgaaaaaccggattatgtagcagtagcttttgacaaaaaaggcagagctgtccgaaaaagtgaatatgaagaatacaaggctaacagaaaaccgatgccagattctcttcaggttcagataccttacgtaagagaaatacttgctgctctgaacattcctgtactgaaatgtgaagggtatgaagctgatgacgttataggcacacttgtaaatagatttaaagcccaggatttagagattgtgataataaccggagacagagatacacttcagttacttgataaaaatgtaattgtcaaaatagtcacaacaaggtttgacaggacaactgaagatttgtatgctgtagaaaatgtaaaagaaaaatatggtgtttttgcgcatcaggttgttgactataaagcattagtaggtgatgcgtcagacaatataccaggtgttaagggaattggagataaaactgccataaagctgttagaagagtaccagactctggagaatatatatcagaatctaaataacattaaaggagcgctaaaagagaagttggaatcaggaaaagacatggcatttttatcaaaaagactggctactatcatatgcgatttaccaattgaggtgaatcttgaagaattaaaaaccaaagaatgggacaaagaaagactttatcagattttacttcaacttgagtttaaaagctttattaaaagactgggcttttcagaagagattaactatgcaaggcagaactttcagctacctgaatttagtattaaagaacttcgtgatgtttcagcaatagggggcaaagaaatctatctattgtactcagatgaagaaggacttttttatatttatgaccatcaaacctcaaccatttttacaacttctgataaggaagctattaaagatcttttaacactccaaagcattcaaaaggttgtatatgatttaaaaaatatactccataaggtggactttgatgaagctaatcagataaaaaattgtaatgatgttatgttggcttcatatgttttggacagtacacgcagttcgtacgatttggaaacattgtttatttcttatctcaacactgatatagctgcaatcaaagagaatagatgggctggtgctacagttttattaagaaatctttgggatgaactttcaaaactcattgatttaaactcggcccaatacgtttatgagagcatagagatgcctcttgttcccattttatatgaaatggagaaaatcggttttaaggttgacaaaaacactttgcaggagtatacaaaagagattgagagcaagcttttaaagttggaatcacagatttatcaaatagccggtgaatggtttaacataaactcgccaaaacaactctcatatatattattcgaaaaactgaagcttccggttgttaaaaagaccaaaacaggatattcaacagatgccgaggtattagaagagctgtatgataaacatgacataataccgcttattctggattatagaatgtatacgaaaatactgacaacttactgtcagggactggttcaggcaataaatcctgcaactggaagaattcataccaactttattcagacaggtacggcaactggaagacttgcaagtgcagagcccaatctgcaaaatattcctgtaaaatatgatgagggaaagctaataagaaaggcatttgttccagatgaaggttatgtgttgatagatgctgattattctcagattgagcttagaatacttgcacatatctctgaggatgaacgactgataaatgcttttaaaaataaccttgatattcattcacagacggcggcagagatctttggtgtggatataagtcaggttacaccaattatgcgaagccaggcaaaagcagttaactttggaattgtatatggtatatctgattatggactttcacgggatataaagatttcaagaaaagaagcagccgagtttattaatcgttattttgaaaagtatcccagagtaaaagaatatttggacaatgtcgtcaagtttgcccgtgaaaacggatttgttttgacaatatttaacaggaaaaggtatatcaaggatataaagtctactaataaatgtctgagaaactatgcagagagaatagcaatgaattcacctatccagggaagtgctgcagatattatgaaaatagcaatgataagagtttataaaaagctaaaagaaaacaatttaaaatcaagaattattctgcaggtccatgacgaacttttgattgaatcaccctatgaagagaaagagatagtaaaggaaatagtaaaatcggagatggaaaatgcggttttattgaaagttcctttggtagttgaagtgaaagaaggttcaaattggtatgaaacaaagtaaaggatcc

SEQ ID NO: 1676 - DNA, 2623 bp, Artificial Sequence
  Description of Artificial Sequence: Synthetic DNA sequence of Caldicellulosiruptor TOK13B DNA Polymerase N777E
atgaaatacctgctgccgaccgctgctgctggtctgctgctcctcgctgcccagccggcgatggccatggaatttgttatttttgatgggaatagtattctgtatagagctttttttgccttgccacagcttactacctcaacaggcatacctacaaatgctatatatggttttttgaatgtgctgttaaaatacttagattctgaaaaaccggattatgtagcagtagcttttgacaaaaaaggcagagctgtccgaaaaagtgaatatgaagaatacaaggctaacagaaaaccgatgccagattctcttcaggttcagataccttacgtaagagaaatacttgctgctctgaacattcctgtactgaaatgtgaagggtatgaagctgatgacgttataggcacacttgtaaatagatttaaagcccaggatttagagattgtgataataaccggagacagagatacacttcagttacttgataaaaatgtaattgtcaaaatagtcacaacaaggtttgacaggacaactgaagatttgtatgctgtagaaaatgtaaaagaaaaatatggtgtttttgcgcatcaggttgttgactataaagcattagtaggtgatgcgtcagacaatataccaggtgttaagggaattggagataaaactgccataaagctgttagaagagtaccagactctggagaatatatatcagaatctaaataacattaaaggagcgctaaaagagaagttggaatcaggaaaagacatggcatttttatcaaaaagactggctactatcatatgcgatttaccaattgaggtgaatcttgaagaattaaaaaccaaagaatgggacaaagaaagactttatcagattttacttcaacttgagtttaaaagctttattaaaagactgggcttttcagaagagattaactatgcaaggcagaactttcagctacctgaatttagtattaaagaacttcgtgatgtttcagcaatagggggcaaagaaatctatctattgtactcagatgaagaaggacttttttatatttatgaccatcaaacctcaaccatttttacaacttctgataaggaagctattaaagatcttttaacactccaaagcattcaaaaggttgtatatgatttaaaaaatatactccataaggtggactttgatgaagctaatcagataaaaaattgtaatgatgttatgttggcttcatatgttttggacagtacacgcagttcgtacgatttggaaacattgtttatttcttatctcaacactgatatagctgcaatcaaagagaatagatgggctggtgctacagttttattaagaaatctttgggatgaactttcaaaactcattgatttaaactcggcccaatacgtttatgagagcatagagatgcctcttgttcccattttatatgaaatggagaaaatcggttttaaggttgacaaaaacactttgcaggagtatacaaaagagattgagagcaagcttttaaagttggaatcacagatttatcaaatagccggtgaatggtttaacataaactcgccaaaacaactctcatatatattattcgaaaaactgaagcttccggttgttaaaaagaccaaaacaggatattcaacagatgccgaggtattagaagagctgtatgataaacatgacataataccgcttattctggattatagaatgtatacgaaaatactgacaacttactgtcagggactggttcaggcaataaatcctgcaactggaagaattcataccaactttattcagacaggtacggcaactggaagacttgcaagtgcagagcccaatctgcaaaatattcctgtaaaatatgatgagggaaagctaataagaaaggcatttgttccagatgaaggttatgtgttgatagatgctgattattctcagattgagcttagaatacttgcacatatctctgaggatgaacgactgataaatgcttttaaaaataaccttgatattcattcacagacggcggcagagatctttggtgtggatataagtcaggttacaccaattatgcgaagccaggcaaaagcagttaactttggaattgtatatggtatatctgattatggactttcacgggatataaagatttcaagaaaagaagcagccgagtttattaatcgttattttgaaaagtatcccagagtaaaagaatatttggacaatgtcgtcaagtttgcccgtgaaaacggatttgttttgacaatatttaacaggaaaaggtatatcaaggatataaagtctactaataaagaactgagaaactatgcagagagaatagcaatgaattcacctatccagggaagtgctgcagatattatgaaaatagcaatgataagagtttataaaaagctaaaagaaaacaatttaaaatcaagaattattctgcaggtccatgacgaacttttgattgaatcaccctatgaagagaaagagatagtaaaggaaatagtaaaatcggagatggaaaatgcggttttattgaaagttcctttggtagttgaagtgaaagaaggttcaaattggtatgaaacaaagtaaaggatcc

SEQ ID NO: 1677 - DNA, 2623 bp, Artificial Sequence
  Description of Artificial Sequence: Synthetic DNA sequence of Caldicellulosiruptor TOK13B DNA Polymerase N777Q
atgaaatacctgctgccgaccgctgctgctggtctgctgctcctcgctgcccagccggcgatggccatggaatttgttatttttgatgggaatagtattctgtatagagctttttttgccttgccacagcttactacctcaacaggcatacctacaaatgctatatatggttttttgaatgtgctgttaaaatacttagattctgaaaaaccggattatgtagcagtagcttttgacaaaaaaggcagagctgtccgaaaaagtgaatatgaagaatacaaggctaacagaaaaccgatgccagattctcttcaggttcagataccttacgtaagagaaatacttgctgctctgaacattcctgtactgaaatgtgaagggtatgaagctgatgacgttataggcacacttgtaaatagatttaaagcccaggatttagagattgtgataataaccggagacagagatacacttcagttacttgataaaaatgtaattgtcaaaatagtcacaacaaggtttgacaggacaactgaagatttgtatgctgtagaaaatgtaaaagaaaaatatggtgtttttgcgcatcaggttgttgactataaagcattagtaggtgatgcgtcagacaatataccaggtgttaagggaattggagataaaactgccataaagctgttagaagagtaccagactctggagaatatatatcagaatctaaataacattaaaggagcgctaaaagagaagttggaatcaggaaaagacatggcatttttatcaaaaagactggctactatcatatgcgatttaccaattgaggtgaatcttgaagaattaaaaaccaaagaatgggacaaagaaagactttatcagattttacttcaacttgagtttaaaagctttattaaaagactgggcttttcagaagagattaactatgcaaggcagaactttcagctacctgaatttagtattaaagaacttcgtgatgtttcagcaatagggggcaaagaaatctatctattgtactcagatgaagaaggacttttttatatttatgaccatcaaacctcaaccatttttacaacttctgataaggaagctattaaagatcttttaacactccaaagcattcaaaaggttgtatatgatttaaaaaatatactccataaggtggactttgatgaagctaatcagataaaaaattgtaatgatgttatgttggcttcatatgttttggacagtacacgcagttcgtacgatttggaaacattgtttatttcttatctcaacactgatatagctgcaatcaaagagaatagatgggctggtgctacagttttattaagaaatctttgggatgaactttcaaaactcattgatttaaactcggcccaatacgtttatgagagcatagagatgcctcttgttcccattttatatgaaatggagaaaatcggttttaaggttgacaaaaacactttgcaggagtatacaaaagagattgagagcaagcttttaaagttggaatcacagatttatcaaatagccggtgaatggtttaacataaactcgccaaaacaactctcatatatattattcgaaaaactgaagcttccggttgttaaaaagaccaaaacaggatattcaacagatgccgaggtattagaagagctgtatgataaacatgacataataccgcttattctggattatagaatgtatacgaaaatactgacaacttactgtcagggactggttcaggcaataaatcctgcaactggaagaattcataccaactttattcagacaggtacggcaactggaagacttgcaagtgcagagcccaatctgcaaaatattcctgtaaaatatgatgagggaaagctaataagaaaggcatttgttccagatgaaggttatgtgttgatagatgctgattattctcagattgagcttagaatacttgcacatatctctgaggatgaacgactgataaatgcttttaaaaataaccttgatattcattcacagacggcggcagagatctttggtgtggatataagtcaggttacaccaattatgcgaagccaggcaaaagcagttaactttggaattgtatatggtatatctgattatggactttcacgggatataaagatttcaagaaaagaagcagccgagtttattaatcgttattttgaaaagtatcccagagtaaaagaatatttggacaatgtcgtcaagtttgcccgtgaaaacggatttgttttgacaatatttaacaggaaaaggtatatcaaggatataaagtctactaataaacaactgagaaactatgcagagagaatagcaatgaattcacctatccagggaagtgctgcagatattatgaaaatagcaatgataagagtttataaaaagctaaaagaaaacaatttaaaatcaagaattattctgcaggtccatgacgaacttttgattgaatcaccctatgaagagaaagagatagtaaaggaaatagtaaaatcggagatggaaaatgcggttttattgaaagttcctttggtagttgaagtgaaagaaggttcaaattggtatgaaacaaagtaaaggatcc

SEQ ID NO: 1678 - DNA, 2623 bp, Artificial Sequence
  Description of Artificial Sequence: Synthetic DNA sequence of Caldicellulosiruptor TOK13B DNA Polymerase N777G
atgaaatacctgctgccgaccgctgctgctggtctgctgctcctcgctgcccagccggcgatggccatggaatttgttatttttgatgggaatagtattctgtatagagctttttttgccttgccacagcttactacctcaacaggcatacctacaaatgctatatatggttttttgaatgtgctgttaaaatacttagattctgaaaaaccggattatgtagcagtagcttttgacaaaaaaggcagagctgtccgaaaaagtgaatatgaagaatacaaggctaacagaaaaccgatgccagattctcttcaggttcagataccttacgtaagagaaatacttgctgctctgaacattcctgtactgaaatgtgaagggtatgaagctgatgacgttataggcacacttgtaaatagatttaaagcccaggatttagagattgtgataataaccggagacagagatacacttcagttacttgataaaaatgtaattgtcaaaatagtcacaacaaggtttgacaggacaactgaagatttgtatgctgtagaaaatgtaaaagaaaaatatggtgtttttgcgcatcaggttgttgactataaagcattagtaggtgatgcgtcagacaatataccaggtgttaagggaattggagataaaactgccataaagctgttagaagagtaccagactctggagaatatatatcagaatctaaataacattaaaggagcgctaaaagagaagttggaatcaggaaaagacatggcatttttatcaaaaagactggctactatcatatgcgatttaccaattgaggtgaatcttgaagaattaaaaaccaaagaatgggacaaagaaagactttatcagattttacttcaacttgagtttaaaagctttattaaaagactgggcttttcagaagagattaactatgcaaggcagaactttcagctacctgaatttagtattaaagaacttcgtgatgtttcagcaatagggggcaaagaaatctatctattgtactcagatgaagaaggacttttttatatttatgaccatcaaacctcaaccatttttacaacttctgataaggaagctattaaagatcttttaacactccaaagcattcaaaaggttgtatatgatttaaaaaatatactccataaggtggactttgatgaagctaatcagataaaaaattgtaatgatgttatgttggcttcatatgttttggacagtacacgcagttcgtacgatttggaaacattgtttatttcttatctcaacactgatatagctgcaatcaaagagaatagatgggctggtgctacagttttattaagaaatctttgggatgaactttcaaaactcattgatttaaactcggcccaatacgtttatgagagcatagagatgcctcttgttcccattttatatgaaatggagaaaatcggttttaaggttgacaaaaacactttgcaggagtatacaaaagagattgagagcaagcttttaaagttggaatcacagatttatcaaatagccggtgaatggtttaacataaactcgccaaaacaactctcatatatattattcgaaaaactgaagcttccggttgttaaaaagaccaaaacaggatattcaacagatgccgaggtattagaagagctgtatgataaacatgacataataccgcttattctggattatagaatgtatacgaaaatactgacaacttactgtcagggactggttcaggcaataaatcctgcaactggaagaattcataccaactttattcagacaggtacggcaactggaagacttgcaagtgcagagcccaatctgcaaaatattcctgtaaaatatgatgagggaaagctaataagaaaggcatttgttccagatgaaggttatgtgttgatagatgctgattattctcagattgagcttagaatacttgcacatatctctgaggatgaacgactgataaatgcttttaaaaataaccttgatattcattcacagacggcggcagagatctttggtgtggatataagtcaggttacaccaattatgcgaagccaggcaaaagcagttaactttggaattgtatatggtatatctgattatggactttcacgggatataaagatttcaagaaaagaagcagccgagtttattaatcgttattttgaaaagtatcccagagtaaaagaatatttggacaatgtcgtcaagtttgcccgtgaaaacggatttgttttgacaatatttaacaggaaaaggtatatcaaggatataaagtctactaataaaggtctgagaaactatgcagagagaatagcaatgaattcacctatccagggaagtgctgcagatattatgaaaatagcaatgataagagtttataaaaagctaaaagaaaacaatttaaaatcaagaattattctgcaggtccatgacgaacttttgattgaatcaccctatgaagagaaagagatagtaaaggaaatagtaaaatcggagatggaaaatgcggttttattgaaagttcctttggtagttgaagtgaaagaaggttcaaattggtatgaaacaaagtaaaggatcc

SEQ ID NO: 1679 - DNA, 2623 bp, Artificial Sequence
  Description of Artificial Sequence: Synthetic DNA sequence of Caldicellulosiruptor TOK13B DNA Polymerase N777H
atgaaatacctgctgccgaccgctgctgctggtctgctgctcctcgctgcccagccggcgatggccatggaatttgttatttttgatgggaatagtattctgtatagagctttttttgccttgccacagcttactacctcaacaggcatacctacaaatgctatatatggttttttgaatgtgctgttaaaatacttagattctgaaaaaccggattatgtagcagtagcttttgacaaaaaaggcagagctgtccgaaaaagtgaatatgaagaatacaaggctaacagaaaaccgatgccagattctcttcaggttcagataccttacgtaagagaaatacttgctgctctgaacattcctgtactgaaatgtgaagggtatgaagctgatgacgttataggcacacttgtaaatagatttaaagcccaggatttagagattgtgataataaccggagacagagatacacttcagttacttgataaaaatgtaattgtcaaaatagtcacaacaaggtttgacaggacaactgaagatttgtatgctgtagaaaatgtaaaagaaaaatatggtgtttttgcgcatcaggttgttgactataaagcattagtaggtgatgcgtcagacaatataccaggtgttaagggaattggagataaaactgccataaagctgttagaagagtaccagactctggagaatatatatcagaatctaaataacattaaaggagcgctaaaagagaagttggaatcaggaaaagacatggcatttttatcaaaaagactggctactatcatatgcgatttaccaattgaggtgaatcttgaagaattaaaaaccaaagaatgggacaaagaaagactttatcagattttacttcaacttgagtttaaaagctttattaaaagactgggcttttcagaagagattaactatgcaaggcagaactttcagctacctgaatttagtattaaagaacttcgtgatgtttcagcaatagggggcaaagaaatctatctattgtactcagatgaagaaggacttttttatatttatgaccatcaaacctcaaccatttttacaacttctgataaggaagctattaaagatcttttaacactccaaagcattcaaaaggttgtatatgatttaaaaaatatactccataaggtggactttgatgaagctaatcagataaaaaattgtaatgatgttatgttggcttcatatgttttggacagtacacgcagttcgtacgatttggaaacattgtttatttcttatctcaacactgatatagctgcaatcaaagagaatagatgggctggtgctacagttttattaagaaatctttgggatgaactttcaaaactcattgatttaaactcggcccaatacgtttatgagagcatagagatgcctcttgttcccattttatatgaaatggagaaaatcggttttaaggttgacaaaaacactttgcaggagtatacaaaagagattgagagcaagcttttaaagttggaatcacagatttatcaaatagccggtgaatggtttaacataaactcgccaaaacaactctcatatatattattcgaaaaactgaagcttccggttgttaaaaagaccaaaacaggatattcaacagatgccgaggtattagaagagctgtatgataaacatgacataataccgcttattctggattatagaatgtatacgaaaatactgacaacttactgtcagggactggttcaggcaataaatcctgcaactggaagaattcataccaactttattcagacaggtacggcaactggaagacttgcaagtgcagagcccaatctgcaaaatattcctgtaaaatatgatgagggaaagctaataagaaaggcatttgttccagatgaaggttatgtgttgatagatgctgattattctcagattgagcttagaatacttgcacatatctctgaggatgaacgactgataaatgcttttaaaaataaccttgatattcattcacagacggcggcagagatctttggtgtggatataagtcaggttacaccaattatgcgaagccaggcaaaagcagttaactttggaattgtatatggtatatctgattatggactttcacgggatataaagatttcaagaaaagaagcagccgagtttattaatcgttattttgaaaagtatcccagagtaaaagaatatttggacaatgtcgtcaagtttgcccgtgaaaacggatttgttttgacaatatttaacaggaaaaggtatatcaaggatataaagtctactaataaacatctgagaaactatgcagagagaatagcaatgaattcacctatccagggaagtgctgcagatattatgaaaatagcaatgataagagtttataaaaagctaaaagaaaacaatttaaaatcaagaattattctgcaggtccatgacgaacttttgattgaatcaccctatgaagagaaagagatagtaaaggaaatagtaaaatcggagatggaaaatgcggttttattgaaagttcctttggtagttgaagtgaaagaaggttcaaattggtatgaaacaaagtaaaggatcc

SEQ ID NO: 1680 - DNA, 2623 bp, Artificial Sequence
  Description of Artificial Sequence: Synthetic DNA sequence of Caldicellulosiruptor TOK13B DNA Polymerase N777I
atgaaatacctgctgccgaccgctgctgctggtctgctgctcctcgctgcccagccggcgatggccatggaatttgttatttttgatgggaatagtattctgtatagagctttttttgccttgccacagcttactacctcaacaggcatacctacaaatgctatatatggttttttgaatgtgctgttaaaatacttagattctgaaaaaccggattatgtagcagtagcttttgacaaaaaaggcagagctgtccgaaaaagtgaatatgaagaatacaaggctaacagaaaaccgatgccagattctcttcaggttcagataccttacgtaagagaaatacttgctgctctgaacattcctgtactgaaatgtgaagggtatgaagctgatgacgttataggcacacttgtaaatagatttaaagcccaggatttagagattgtgataataaccggagacagagatacacttcagttacttgataaaaatgtaattgtcaaaatagtcacaacaaggtttgacaggacaactgaagatttgtatgctgtagaaaatgtaaaagaaaaatatggtgtttttgcgcatcaggttgttgactataaagcattagtaggtgatgcgtcagacaatataccaggtgttaagggaattggagataaaactgccataaagctgttagaagagtaccagactctggagaatatatatcagaatctaaataacattaaaggagcgctaaaagagaagttggaatcaggaaaagacatggcatttttatcaaaaagactggctactatcatatgcgatttaccaattgaggtgaatcttgaagaattaaaaaccaaagaatgggacaaagaaagactttatcagattttacttcaacttgagtttaaaagctttattaaaagactgggcttttcagaagagattaactatgcaaggcagaactttcagctacctgaatttagtattaaagaacttcgtgatgtttcagcaatagggggcaaagaaatctatctattgtactcagatgaagaaggacttttttatatttatgaccatcaaacctcaaccatttttacaacttctgataaggaagctattaaagatcttttaacactccaaagcattcaaaaggttgtatatgatttaaaaaatatactccataaggtggactttgatgaagctaatcagataaaaaattgtaatgatgttatgttggcttcatatgttttggacagtacacgcagttcgtacgatttggaaacattgtttatttcttatctcaacactgatatagctgcaatcaaagagaatagatgggctggtgctacagttttattaagaaatctttgggatgaactttcaaaactcattgatttaaactcggcccaatacgtttatgagagcatagagatgcctcttgttcccattttatatgaaatggagaaaatcggttttaaggttgacaaaaacactttgcaggagtatacaaaagagattgagagcaagcttttaaagttggaatcacagatttatcaaatagccggtgaatggtttaacataaactcgccaaaacaactctcatatatattattcgaaaaactgaagcttccggttgttaaaaagaccaaaacaggatattcaacagatgccgaggtattagaagagctgtatgataaacatgacataataccgcttattctggattatagaatgtatacgaaaatactgacaacttactgtcagggactggttcaggcaataaatcctgcaactggaagaattcataccaactttattcagacaggtacggcaactggaagacttgcaagtgcagagcccaatctgcaaaatattcctgtaaaatatgatgagggaaagctaataagaaaggcatttgttccagatgaaggttatgtgttgatagatgctgattattctcagattgagcttagaatacttgcacatatctctgaggatgaacgactgataaatgcttttaaaaataaccttgatattcattcacagacggcggcagagatctttggtgtggatataagtcaggttacaccaattatgcgaagccaggcaaaagcagttaactttggaattgtatatggtatatctgattatggactttcacgggatataaagatttcaagaaaagaagcagccgagtttattaatcgttattttgaaaagtatcccagagtaaaagaatatttggacaatgtcgtcaagtttgcccgtgaaaacggatttgttttgacaatatttaacaggaaaaggtatatcaaggatataaagtctactaataaaattctgagaaactatgcagagagaatagcaatgaattcacctatccagggaagtgctgcagatattatgaaaatagcaatgataagagtttataaaaagctaaaagaaaacaatttaaaatcaagaattattctgcaggtccatgacgaacttttgattgaatcaccctatgaagagaaagagatagtaaaggaaatagtaaaatcggagatggaaaatgcggttttattgaaagttcctttggtagttgaagtgaaagaaggttcaaattggtatgaaacaaagtaaaggatcc

SEQ ID NO: 1681 - DNA, 2623 bp, Artificial Sequence
  Description of Artificial Sequence: Synthetic DNA sequence of Caldicellulosiruptor TOK13B DNA Polymerase N777L
atgaaatacctgctgccgaccgctgctgctggtctgctgctcctcgctgcccagccggcgatggccatggaatttgttatttttgatgggaatagtattctgtatagagctttttttgccttgccacagcttactacctcaacaggcatacctacaaatgctatatatggttttttgaatgtgctgttaaaatacttagattctgaaaaaccggattatgtagcagtagcttttgacaaaaaaggcagagctgtccgaaaaagtgaatatgaagaatacaaggctaacagaaaaccgatgccagattctcttcaggttcagataccttacgtaagagaaatacttgctgctctgaacattcctgtactgaaatgtgaagggtatgaagctgatgacgttataggcacacttgtaaatagatttaaagcccaggatttagagattgtgataataaccggagacagagatacacttcagttacttgataaaaatgtaattgtcaaaatagtcacaacaaggtttgacaggacaactgaagatttgtatgctgtagaaaatgtaaaagaaaaatatggtgtttttgcgcatcaggttgttgactataaagcattagtaggtgatgcgtcagacaatataccaggtgttaagggaattggagataaaactgccataaagctgttagaagagtaccagactctggagaatatatatcagaatctaaataacattaaaggagcgctaaaagagaagttggaatcaggaaaagacatggcatttttatcaaaaagactggctactatcatatgcgatttaccaattgaggtgaatcttgaagaattaaaaaccaaagaatgggacaaagaaagactttatcagattttacttcaacttgagtttaaaagctttattaaaagactgggcttttcagaagagattaactatgcaaggcagaactttcagctacctgaatttagtattaaagaacttcgtgatgtttcagcaatagggggcaaagaaatctatctattgtactcagatgaagaaggacttttttatatttatgaccatcaaacctcaaccatttttacaacttctgataaggaagctattaaagatcttttaacactccaaagcattcaaaaggttgtatatgatttaaaaaatatactccataaggtggactttgatgaagctaatcagataaaaaattgtaatgatgttatgttggcttcatatgttttggacagtacacgcagttcgtacgatttggaaacattgtttatttcttatctcaacactgatatagctgcaatcaaagagaatagatgggctggtgctacagttttattaagaaatctttgggatgaactttcaaaactcattgatttaaactcggcccaatacgtttatgagagcatagagatgcctcttgttcccattttatatgaaatggagaaaatcggttttaaggttgacaaaaacactttgcaggagtatacaaaagagattgagagcaagcttttaaagttggaatcacagatttatcaaatagccggtgaatggtttaacataaactcgccaaaacaactctcatatatattattcgaaaaactgaagcttccggttgttaaaaagaccaaaacaggatattcaacagatgccgaggtattagaagagctgtatgataaacatgacataataccgcttattctggattatagaatgtatacgaaaatactgacaacttactgtcagggactggttcaggcaataaatcctgcaactggaagaattcataccaactttattcagacaggtacggcaactggaagacttgcaagtgcagagcccaatctgcaaaatattcctgtaaaatatgatgagggaaagctaataagaaaggcatttgttccagatgaaggttatgtgttgatagatgctgattattctcagattgagcttagaatacttgcacatatctctgaggatgaacgactgataaatgcttttaaaaataaccttgatattcattcacagacggcggcagagatctttggtgtggatataagtcaggttacaccaattatgcgaagccaggcaaaagcagttaactttggaattgtatatggtatatctgattatggactttcacgggatataaagatttcaagaaaagaagcagccgagtttattaatcgttattttgaaaagtatcccagagtaaaagaatatttggacaatgtcgtcaagtttgcccgtgaaaacggatttgttttgacaatatttaacaggaaaaggtatatcaaggatataaagtctactaataaacttctgagaaactatgcagagagaatagcaatgaattcacctatccagggaagtgctgcagatattatgaaaatagcaatgataagagtttataaaaagctaaaagaaaacaatttaaaatcaagaattattctgcaggtccatgacgaacttttgattgaatcaccctatgaagagaaagagatagtaaaggaaatagtaaaatcggagatggaaaatgcggttttattgaaagttcctttggtagttgaagtgaaagaaggttcaaattggtatgaaacaaagtaaaggatcc

SEQ ID NO: 1682 - DNA, 2623 bp, Artificial Sequence
  Description of Artificial Sequence: Synthetic DNA sequence of Caldicellulosiruptor TOK13B DNA Polymerase N777K
atgaaatacctgctgccgaccgctgctgctggtctgctgctcctcgctgcccagccggcgatggccatggaatttgttatttttgatgggaatagtattctgtatagagctttttttgccttgccacagcttactacctcaacaggcatacctacaaatgctatatatggttttttgaatgtgctgttaaaatacttagattctgaaaaaccggattatgtagcagtagcttttgacaaaaaaggcagagctgtccgaaaaagtgaatatgaagaatacaaggctaacagaaaaccgatgccagattctcttcaggttcagataccttacgtaagagaaatacttgctgctctgaacattcctgtactgaaatgtgaagggtatgaagctgatgacgttataggcacacttgtaaatagatttaaagcccaggatttagagattgtgataataaccggagacagagatacacttcagttacttgataaaaatgtaattgtcaaaatagtcacaacaaggtttgacaggacaactgaagatttgtatgctgtagaaaatgtaaaagaaaaatatggtgtttttgcgcatcaggttgttgactataaagcattagtaggtgatgcgtcagacaatataccaggtgttaagggaattggagataaaactgccataaagctgttagaagagtaccagactctggagaatatatatcagaatctaaataacattaaaggagcgctaaaagagaagttggaatcaggaaaagacatggcatttttatcaaaaagactggctactatcatatgcgatttaccaattgaggtgaatcttgaagaattaaaaaccaaagaatgggacaaagaaagactttatcagattttacttcaacttgagtttaaaagctttattaaaagactgggcttttcagaagagattaactatgcaaggcagaactttcagctacctgaatttagtattaaagaacttcgtgatgtttcagcaatagggggcaaagaaatctatctattgtactcagatgaagaaggacttttttatatttatgaccatcaaacctcaaccatttttacaacttctgataaggaagctattaaagatcttttaacactccaaagcattcaaaaggttgtatatgatttaaaaaatatactccataaggtggactttgatgaagctaatcagataaaaaattgtaatgatgttatgttggcttcatatgttttggacagtacacgcagttcgtacgatttggaaacattgtttatttcttatctcaacactgatatagctgcaatcaaagagaatagatgggctggtgctacagttttattaagaaatctttgggatgaactttcaaaactcattgatttaaactcggcccaatacgtttatgagagcatagagatgcctcttgttcccattttatatgaaatggagaaaatcggttttaaggttgacaaaaacactttgcaggagtatacaaaagagattgagagcaagcttttaaagttggaatcacagatttatcaaatagccggtgaatggtttaacataaactcgccaaaacaactctcatatatattattcgaaaaactgaagcttccggttgttaaaaagaccaaaacaggatattcaacagatgccgaggtattagaagagctgtatgataaacatgacataataccgcttattctggattatagaatgtatacgaaaatactgacaacttactgtcagggactggttcaggcaataaatcctgcaactggaagaattcataccaactttattcagacaggtacggcaactggaagacttgcaagtgcagagcccaatctgcaaaatattcctgtaaaatatgatgagggaaagctaataagaaaggcatttgttccagatgaaggttatgtgttgatagatgctgattattctcagattgagcttagaatacttgcacatatctctgaggatgaacgactgataaatgcttttaaaaataaccttgatattcattcacagacggcggcagagatctttggtgtggatataagtcaggttacaccaattatgcgaagccaggcaaaagcagttaactttggaattgtatatggtatatctgattatggactttcacgggatataaagatttcaagaaaagaagcagccgagtttattaatcgttattttgaaaagtatcccagagtaaaagaatatttggacaatgtcgtcaagtttgcccgtgaaaacggatttgttttgacaatatttaacaggaaaaggtatatcaaggatataaagtctactaataaaaaactgagaaactatgcagagagaatagcaatgaattcacctatccagggaagtgctgcagatattatgaaaatagcaatgataagagtttataaaaagctaaaagaaaacaatttaaaatcaagaattattctgcaggtccatgacgaacttttgattgaatcaccctatgaagagaaagagatagtaaaggaaatagtaaaatcggagatggaaaatgcggttttattgaaagttcctttggtagttgaagtgaaagaaggttcaaattggtatgaaacaaagtaaaggatcc

SEQ ID NO: 1683 - DNA, 2623 bp, Artificial Sequence
  Description of Artificial Sequence: Synthetic DNA sequence of Caldicellulosiruptor TOK13B DNA Polymerase N777M
atgaaatacctgctgccgaccgctgctgctggtctgctgctcctcgctgcccagccggcgatggccatggaatttgttatttttgatgggaatagtattctgtatagagctttttttgccttgccacagcttactacctcaacaggcatacctacaaatgctatatatggttttttgaatgtgctgttaaaatacttagattctgaaaaaccggattatgtagcagtagcttttgacaaaaaaggcagagctgtccgaaaaagtgaatatgaagaatacaaggctaacagaaaaccgatgccagattctcttcaggttcagataccttacgtaagagaaatacttgctgctctgaacattcctgtactgaaatgtgaagggtatgaagctgatgacgttataggcacacttgtaaatagatttaaagcccaggatttagagattgtgataataaccggagacagagatacacttcagttacttgataaaaatgtaattgtcaaaatagtcacaacaaggtttgacaggacaactgaagatttgtatgctgtagaaaatgtaaaagaaaaatatggtgtttttgcgcatcaggttgttgactataaagcattagtaggtgatgcgtcagacaatataccaggtgttaagggaattggagataaaactgccataaagctgttagaagagtaccagactctggagaatatatatcagaatctaaataacattaaaggagcgctaaaagagaagttggaatcaggaaaagacatggcatttttatcaaaaagactggctactatcatatgcgatttaccaattgaggtgaatcttgaagaattaaaaaccaaagaatgggacaaagaaagactttatcagattttacttcaacttgagtttaaaagctttattaaaagactgggcttttcagaagagattaactatgcaaggcagaactttcagctacctgaatttagtattaaagaacttcgtgatgtttcagcaatagggggcaaagaaatctatctattgtactcagatgaagaaggacttttttatatttatgaccatcaaacctcaaccatttttacaacttctgataaggaagctattaaagatcttttaacactccaaagcattcaaaaggttgtatatgatttaaaaaatatactccataaggtggactttgatgaagctaatcagataaaaaattgtaatgatgttatgttggcttcatatgttttggacagtacacgcagttcgtacgatttggaaacattgtttatttcttatctcaacactgatatagctgcaatcaaagagaatagatgggctggtgctacagttttattaagaaatctttgggatgaactttcaaaactcattgatttaaactcggcccaatacgtttatgagagcatagagatgcctcttgttcccattttatatgaaatggagaaaatcggttttaaggttgacaaaaacactttgcaggagtatacaaaagagattgagagcaagcttttaaagttggaatcacagatttatcaaatagccggtgaatggtttaacataaactcgccaaaacaactctcatatatattattcgaaaaactgaagcttccggttgttaaaaagaccaaaacaggatattcaacagatgccgaggtattagaagagctgtatgataaacatgacataataccgcttattctggattatagaatgtatacgaaaatactgacaacttactgtcagggactggttcaggcaataaatcctgcaactggaagaattcataccaactttattcagacaggtacggcaactggaagacttgcaagtgcagagcccaatctgcaaaatattcctgtaaaatatgatgagggaaagctaataagaaaggcatttgttccagatgaaggttatgtgttgatagatgctgattattctcagattgagcttagaatacttgcacatatctctgaggatgaacgactgataaatgcttttaaaaataaccttgatattcattcacagacggcggcagagatctttggtgtggatataagtcaggttacaccaattatgcgaagccaggcaaaagcagttaactttggaattgtatatggtatatctgattatggactttcacgggatataaagatttcaagaaaagaagcagccgagtttattaatcgttattttgaaaagtatcccagagtaaaagaatatttggacaatgtcgtcaagtttgcccgtgaaaacggatttgttttgacaatatttaacaggaaaaggtatatcaaggatataaagtctactaataaaatgctgagaaactatgcagagagaatagcaatgaattcacctatccagggaagtgctgcagatattatgaaaatagcaatgataagagtttataaaaagctaaaagaaaacaatttaaaatcaagaattattctgcaggtccatgacgaacttttgattgaatcaccctatgaagagaaagagatagtaaaggaaatagtaaaatcggagatggaaaatgcggttttattgaaagttcctttggtagttgaagtgaaagaaggttcaaattggtatgaaacaaagtaaaggatcc

SEQ ID NO: 1684 - DNA, 2623 bp, Artificial Sequence
  Description of Artificial Sequence: Synthetic DNA sequence of Caldicellulosiruptor TOK13B DNA Polymerase N777F
atgaaatacctgctgccgaccgctgctgctggtctgctgctcctcgctgcccagccggcgatggccatggaatttgttatttttgatgggaatagtattctgtatagagctttttttgccttgccacagcttactacctcaacaggcatacctacaaatgctatatatggttttttgaatgtgctgttaaaatacttagattctgaaaaaccggattatgtagcagtagcttttgacaaaaaaggcagagctgtccgaaaaagtgaatatgaagaatacaaggctaacagaaaaccgatgccagattctcttcaggttcagataccttacgtaagagaaatacttgctgctctgaacattcctgtactgaaatgtgaagggtatgaagctgatgacgttataggcacacttgtaaatagatttaaagcccaggatttagagattgtgataataaccggagacagagatacacttcagttacttgataaaaatgtaattgtcaaaatagtcacaacaaggtttgacaggacaactgaagatttgtatgctgtagaaaatgtaaaagaaaaatatggtgtttttgcgcatcaggttgttgactataaagcattagtaggtgatgcgtcagacaatataccaggtgttaagggaattggagataaaactgccataaagctgttagaagagtaccagactctggagaatatatatcagaatctaaataacattaaaggagcgctaaaagagaagttggaatcaggaaaagacatggcatttttatcaaaaagactggctactatcatatgcgatttaccaattgaggtgaatcttgaagaattaaaaaccaaagaatgggacaaagaaagactttatcagattttacttcaacttgagtttaaaagctttattaaaagactgggcttttcagaagagattaactatgcaaggcagaactttcagctacctgaatttagtattaaagaacttcgtgatgtttcagcaatagggggcaaagaaatctatctattgtactcagatgaagaaggacttttttatatttatgaccatcaaacctcaaccatttttacaacttctgataaggaagctattaaagatcttttaacactccaaagcattcaaaaggttgtatatgatttaaaaaatatactccataaggtggactttgatgaagctaatcagataaaaaattgtaatgatgttatgttggcttcatatgttttggacagtacacgcagttcgtacgatttggaaacattgtttatttcttatctcaacactgatatagctgcaatcaaagagaatagatgggctggtgctacagttttattaagaaatctttgggatgaactttcaaaactcattgatttaaactcggcccaatacgtttatgagagcatagagatgcctcttgttcccattttatatgaaatggagaaaatcggttttaaggttgacaaaaacactttgcaggagtatacaaaagagattgagagcaagcttttaaagttggaatcacagatttatcaaatagccggtgaatggtttaacataaactcgccaaaacaactctcatatatattattcgaaaaactgaagcttccggttgttaaaaagaccaaaacaggatattcaacagatgccgaggtattagaagagctgtatgataaacatgacataataccgcttattctggattatagaatgtatacgaaaatactgacaacttactgtcagggactggttcaggcaataaatcctgcaactggaagaattcataccaactttattcagacaggtacggcaactggaagacttgcaagtgcagagcccaatctgcaaaatattcctgtaaaatatgatgagggaaagctaataagaaaggcatttgttccagatgaaggttatgtgttgatagatgctgattattctcagattgagcttagaatacttgcacatatctctgaggatgaacgactgataaatgcttttaaaaataaccttgatattcattcacagacggcggcagagatctttggtgtggatataagtcaggttacaccaattatgcgaagccaggcaaaagcagttaactttggaattgtatatggtatatctgattatggactttcacgggatataaagatttcaagaaaagaagcagccgagtttattaatcgttattttgaaaagtatcccagagtaaaagaatatttggacaatgtcgtcaagtttgcccgtgaaaacggatttgttttgacaatatttaacaggaaaaggtatatcaaggatataaagtctactaataaatttctgagaaactatgcagagagaatagcaatgaattcacctatccagggaagtgctgcagatattatgaaaatagcaatgataagagtttataaaaagctaaaagaaaacaatttaaaatcaagaattattctgcaggtccatgacgaacttttgattgaatcaccctatgaagagaaagagatagtaaaggaaatagtaaaatcggagatggaaaatgcggttttattgaaagttcctttggtagttgaagtgaaagaaggttcaaattggtatgaaacaaagtaaaggatcc

SEQ ID NO: 1685 - DNA, 2623 bp, Artificial Sequence
  Description of Artificial Sequence: Synthetic DNA sequence of Caldicellulosiruptor TOK13B DNA Polymerase N777P
atgaaatacctgctgccgaccgctgctgctggtctgctgctcctcgctgcccagccggcgatggccatggaatttgttatttttgatgggaatagtattctgtatagagctttttttgccttgccacagcttactacctcaacaggcatacctacaaatgctatatatggttttttgaatgtgctgttaaaatacttagattctgaaaaaccggattatgtagcagtagcttttgacaaaaaaggcagagctgtccgaaaaagtgaatatgaagaatacaaggctaacagaaaaccgatgccagattctcttcaggttcagataccttacgtaagagaaatacttgctgctctgaacattcctgtactgaaatgtgaagggtatgaagctgatgacgttataggcacacttgtaaatagatttaaagcccaggatttagagattgtgataataaccggagacagagatacacttcagttacttgataaaaatgtaattgtcaaaatagtcacaacaaggtttgacaggacaactgaagatttgtatgctgtagaaaatgtaaaagaaaaatatggtgtttttgcgcatcaggttgttgactataaagcattagtaggtgatgcgtcagacaatataccaggtgttaagggaattggagataaaactgccataaagctgttagaagagtaccagactctggagaatatatatcagaatctaaataacattaaaggagcgctaaaagagaagttggaatcaggaaaagacatggcatttttatcaaaaagactggctactatcatatgcgatttaccaattgaggtgaatcttgaagaattaaaaaccaaagaatgggacaaagaaagactttatcagattttacttcaacttgagtttaaaagctttattaaaagactgggcttttcagaagagattaactatgcaaggcagaactttcagctacctgaatttagtattaaagaacttcgtgatgtttcagcaatagggggcaaagaaatctatctattgtactcagatgaagaaggacttttttatatttatgaccatcaaacctcaaccatttttacaacttctgataaggaagctattaaagatcttttaacactccaaagcattcaaaaggttgtatatgatttaaaaaatatactccataaggtggactttgatgaagctaatcagataaaaaattgtaatgatgttatgttggcttcatatgttttggacagtacacgcagttcgtacgatttggaaacattgtttatttcttatctcaacactgatatagctgcaatcaaagagaatagatgggctggtgctacagttttattaagaaatctttgggatgaactttcaaaactcattgatttaaactcggcccaatacgtttatgagagcatagagatgcctcttgttcccattttatatgaaatggagaaaatcggttttaaggttgacaaaaacactttgcaggagtatacaaaagagattgagagcaagcttttaaagttggaatcacagatttatcaaatagccggtgaatggtttaacataaactcgccaaaacaactctcatatatattattcgaaaaactgaagcttccggttgttaaaaagaccaaaacaggatattcaacagatgccgaggtattagaagagctgtatgataaacatgacataataccgcttattctggattatagaatgtatacgaaaatactgacaacttactgtcagggactggttcaggcaataaatcctgcaactggaagaattcataccaactttattcagacaggtacggcaactggaagacttgcaagtgcagagcccaatctgcaaaatattcctgtaaaatatgatgagggaaagctaataagaaaggcatttgttccagatgaaggttatgtgttgatagatgctgattattctcagattgagcttagaatacttgcacatatctctgaggatgaacgactgataaatgcttttaaaaataaccttgatattcattcacagacggcggcagagatctttggtgtggatataagtcaggttacaccaattatgcgaagccaggcaaaagcagttaactttggaattgtatatggtatatctgattatggactttcacgggatataaagatttcaagaaaagaagcagccgagtttattaatcgttattttgaaaagtatcccagagtaaaagaatatttggacaatgtcgtcaagtttgcccgtgaaaacggatttgttttgacaatatttaacaggaaaaggtatatcaaggatataaagtctactaataaacctctgagaaactatgcagagagaatagcaatgaattcacctatccagggaagtgctgcagatattatgaaaatagcaatgataagagtttataaaaagctaaaagaaaacaatttaaaatcaagaattattctgcaggtccatgacgaacttttgattgaatcaccctatgaagagaaagagatagtaaaggaaatagtaaaatcggagatggaaaatgcggttttattgaaagttcctttggtagttgaagtgaaagaaggttcaaattggtatgaaacaaagtaaaggatcc

SEQ ID NO: 1686 - DNA, 2623 bp, Artificial Sequence
  Description of Artificial Sequence: Synthetic DNA sequence of Caldicellulosiruptor TOK13B DNA Polymerase N777S
atgaaatacctgctgccgaccgctgctgctggtctgctgctcctcgctgcccagccggcgatggccatggaatttgttatttttgatgggaatagtattctgtatagagctttttttgccttgccacagcttactacctcaacaggcatacctacaaatgctatatatggttttttgaatgtgctgttaaaatacttagattctgaaaaaccggattatgtagcagtagcttttgacaaaaaaggcagagctgtccgaaaaagtgaatatgaagaatacaaggctaacagaaaaccgatgccagattctcttcaggttcagataccttacgtaagagaaatacttgctgctctgaacattcctgtactgaaatgtgaagggtatgaagctgatgacgttataggcacacttgtaaatagatttaaagcccaggatttagagattgtgataataaccggagacagagatacacttcagttacttgataaaaatgtaattgtcaaaatagtcacaacaaggtttgacaggacaactgaagatttgtatgctgtagaaaatgtaaaagaaaaatatggtgtttttgcgcatcaggttgttgactataaagcattagtaggtgatgcgtcagacaatataccaggtgttaagggaattggagataaaactgccataaagctgttagaagagtaccagactctggagaatatatatcagaatctaaataacattaaaggagcgctaaaagagaagttggaatcaggaaaagacatggcatttttatcaaaaagactggctactatcatatgcgatttaccaattgaggtgaatcttgaagaattaaaaaccaaagaatgggacaaagaaagactttatcagattttacttcaacttgagtttaaaagctttattaaaagactgggcttttcagaagagattaactatgcaaggcagaactttcagctacctgaatttagtattaaagaacttcgtgatgtttcagcaatagggggcaaagaaatctatctattgtactcagatgaagaaggacttttttatatttatgaccatcaaacctcaaccatttttacaacttctgataaggaagctattaaagatcttttaacactccaaagcattcaaaaggttgtatatgatttaaaaaatatactccataaggtggactttgatgaagctaatcagataaaaaattgtaatgatgttatgttggcttcatatgttttggacagtacacgcagttcgtacgatttggaaacattgtttatttcttatctcaacactgatatagctgcaatcaaagagaatagatgggctggtgctacagttttattaagaaatctttgggatgaactttcaaaactcattgatttaaactcggcccaatacgtttatgagagcatagagatgcctcttgttcccattttatatgaaatggagaaaatcggttttaaggttgacaaaaacactttgcaggagtatacaaaagagattgagagcaagcttttaaagttggaatcacagatttatcaaatagccggtgaatggtttaacataaactcgccaaaacaactctcatatatattattcgaaaaactgaagcttccggttgttaaaaagaccaaaacaggatattcaacagatgccgaggtattagaagagctgtatgataaacatgacataataccgcttattctggattatagaatgtatacgaaaatactgacaacttactgtcagggactggttcaggcaataaatcctgcaactggaagaattcataccaactttattcagacaggtacggcaactggaagacttgcaagtgcagagcccaatctgcaaaatattcctgtaaaatatgatgagggaaagctaataagaaaggcatttgttccagatgaaggttatgtgttgatagatgctgattattctcagattgagcttagaatacttgcacatatctctgaggatgaacgactgataaatgcttttaaaaataaccttgatattcattcacagacggcggcagagatctttggtgtggatataagtcaggttacaccaattatgcgaagccaggcaaaagcagttaactttggaattgtatatggtatatctgattatggactttcacgggatataaagatttcaagaaaagaagcagccgagtttattaatcgttattttgaaaagtatcccagagtaaaagaatatttggacaatgtcgtcaagtttgcccgtgaaaacggatttgttttgacaatatttaacaggaaaaggtatatcaaggatataaagtctactaataaatctctgagaaactatgcagagagaatagcaatgaattcacctatccagggaagtgctgcagatattatgaaaatagcaatgataagagtttataaaaagctaaaagaaaacaatttaaaatcaagaattattctgcaggtccatgacgaacttttgattgaatcaccctatgaagagaaagagatagtaaaggaaatagtaaaatcggagatggaaaatgcggttttattgaaagttcctttggtagttgaagtgaaagaaggttcaaattggtatgaaacaaagtaaaggatcc

SEQ ID NO: 1687 - DNA, 2623 bp, Artificial Sequence
  Description of Artificial Sequence: Synthetic DNA sequence of Caldicellulosiruptor TOK13B DNA Polymerase N777T
atgaaatacctgctgccgaccgctgctgctggtctgctgctcctcgctgcccagccggcgatggccatggaatttgttatttttgatgggaatagtattctgtatagagctttttttgccttgccacagcttactacctcaacaggcatacctacaaatgctatatatggttttttgaatgtgctgttaaaatacttagattctgaaaaaccggattatgtagcagtagcttttgacaaaaaaggcagagctgtccgaaaaagtgaatatgaagaatacaaggctaacagaaaaccgatgccagattctcttcaggttcagataccttacgtaagagaaatacttgctgctctgaacattcctgtactgaaatgtgaagggtatgaagctgatgacgttataggcacacttgtaaatagatttaaagcccaggatttagagattgtgataataaccggagacagagatacacttcagttacttgataaaaatgtaattgtcaaaatagtcacaacaaggtttgacaggacaactgaagatttgtatgctgtagaaaatgtaaaagaaaaatatggtgtttttgcgcatcaggttgttgactataaagcattagtaggtgatgcgtcagacaatataccaggtgttaagggaattggagataaaactgccataaagctgttagaagagtaccagactctggagaatatatatcagaatctaaataacattaaaggagcgctaaaagagaagttggaatcaggaaaagacatggcatttttatcaaaaagactggctactatcatatgcgatttaccaattgaggtgaatcttgaagaattaaaaaccaaagaatgggacaaagaaagactttatcagattttacttcaacttgagtttaaaagctttattaaaagactgggcttttcagaagagattaactatgcaaggcagaactttcagctacctgaatttagtattaaagaacttcgtgatgtttcagcaatagggggcaaagaaatctatctattgtactcagatgaagaaggacttttttatatttatgaccatcaaacctcaaccatttttacaacttctgataaggaagctattaaagatcttttaacactccaaagcattcaaaaggttgtatatgatttaaaaaatatactccataaggtggactttgatgaagctaatcagataaaaaattgtaatgatgttatgttggcttcatatgttttggacagtacacgcagttcgtacgatttggaaacattgtttatttcttatctcaacactgatatagctgcaatcaaagagaatagatgggctggtgctacagttttattaagaaatctttgggatgaactttcaaaactcattgatttaaactcggcccaatacgtttatgagagcatagagatgcctcttgttcccattttatatgaaatggagaaaatcggttttaaggttgacaaaaacactttgcaggagtatacaaaagagattgagagcaagcttttaaagttggaatcacagatttatcaaatagccggtgaatggtttaacataaactcgccaaaacaactctcatatatattattcgaaaaactgaagcttccggttgttaaaaagaccaaaacaggatattcaacagatgccgaggtattagaagagctgtatgataaacatgacataataccgcttattctggattatagaatgtatacgaaaatactgacaacttactgtcagggactggttcaggcaataaatcctgcaactggaagaattcataccaactttattcagacaggtacggcaactggaagacttgcaagtgcagagcccaatctgcaaaatattcctgtaaaatatgatgagggaaagctaataagaaaggcatttgttccagatgaaggttatgtgttgatagatgctgattattctcagattgagcttagaatacttgcacatatctctgaggatgaacgactgataaatgcttttaaaaataaccttgatattcattcacagacggcggcagagatctttggtgtggatataagtcaggttacaccaattatgcgaagccaggcaaaagcagttaactttggaattgtatatggtatatctgattatggactttcacgggatataaagatttcaagaaaagaagcagccgagtttattaatcgttattttgaaaagtatcccagagtaaaagaatatttggacaatgtcgtcaagtttgcccgtgaaaacggatttgttttgacaatatttaacaggaaaaggtatatcaaggatataaagtctactaataaaactctgagaaactatgcagagagaatagcaatgaattcacctatccagggaagtgctgcagatattatgaaaatagcaatgataagagtttataaaaagctaaaagaaaacaatttaaaatcaagaattattctgcaggtccatgacgaacttttgattgaatcaccctatgaagagaaagagatagtaaaggaaatagtaaaatcggagatggaaaatgcggttttattgaaagttcctttggtagttgaagtgaaagaaggttcaaattggtatgaaacaaagtaaaggatcc

SEQ ID NO: 1688 - DNA, 2623 bp, Artificial Sequence
  Description of Artificial Sequence: Synthetic DNA sequence of Caldicellulosiruptor TOK13B DNA Polymerase N777W
atgaaatacctgctgccgaccgctgctgctggtctgctgctcctcgctgcccagccggcgatggccatggaatttgttatttttgatgggaatagtattctgtatagagctttttttgccttgccacagcttactacctcaacaggcatacctacaaatgctatatatggttttttgaatgtgctgttaaaatacttagattctgaaaaaccggattatgtagcagtagcttttgacaaaaaaggcagagctgtccgaaaaagtgaatatgaagaatacaaggctaacagaaaaccgatgccagattctcttcaggttcagataccttacgtaagagaaatacttgctgctctgaacattcctgtactgaaatgtgaagggtatgaagctgatgacgttataggcacacttgtaaatagatttaaagcccaggatttagagattgtgataataaccggagacagagatacacttcagttacttgataaaaatgtaattgtcaaaatagtcacaacaaggtttgacaggacaactgaagatttgtatgctgtagaaaatgtaaaagaaaaatatggtgtttttgcgcatcaggttgttgactataaagcattagtaggtgatgcgtcagacaatataccaggtgttaagggaattggagataaaactgccataaagctgttagaagagtaccagactctggagaatatatatcagaatctaaataacattaaaggagcgctaaaagagaagttggaatcaggaaaagacatggcatttttatcaaaaagactggctactatcatatgcgatttaccaattgaggtgaatcttgaagaattaaaaaccaaagaatgggacaaagaaagactttatcagattttacttcaacttgagtttaaaagctttattaaaagactgggcttttcagaagagattaactatgcaaggcagaactttcagctacctgaatttagtattaaagaacttcgtgatgtttcagcaatagggggcaaagaaatctatctattgtactcagatgaagaaggacttttttatatttatgaccatcaaacctcaaccatttttacaacttctgataaggaagctattaaagatcttttaacactccaaagcattcaaaaggttgtatatgatttaaaaaatatactccataaggtggactttgatgaagctaatcagataaaaaattgtaatgatgttatgttggcttcatatgttttggacagtacacgcagttcgtacgatttggaaacattgtttatttcttatctcaacactgatatagctgcaatcaaagagaatagatgggctggtgctacagttttattaagaaatctttgggatgaactttcaaaactcattgatttaaactcggcccaatacgtttatgagagcatagagatgcctcttgttcccattttatatgaaatggagaaaatcggttttaaggttgacaaaaacactttgcaggagtatacaaaagagattgagagcaagcttttaaagttggaatcacagatttatcaaatagccggtgaatggtttaacataaactcgccaaaacaactctcatatatattattcgaaaaactgaagcttccggttgttaaaaagaccaaaacaggatattcaacagatgccgaggtattagaagagctgtatgataaacatgacataataccgcttattctggattatagaatgtatacgaaaatactgacaacttactgtcagggactggttcaggcaataaatcctgcaactggaagaattcataccaactttattcagacaggtacggcaactggaagacttgcaagtgcagagcccaatctgcaaaatattcctgtaaaatatgatgagggaaagctaataagaaaggcatttgttccagatgaaggttatgtgttgatagatgctgattattctcagattgagcttagaatacttgcacatatctctgaggatgaacgactgataaatgcttttaaaaataaccttgatattcattcacagacggcggcagagatctttggtgtggatataagtcaggttacaccaattatgcgaagccaggcaaaagcagttaactttggaattgtatatggtatatctgattatggactttcacgggatataaagatttcaagaaaagaagcagccgagtttattaatcgttattttgaaaagtatcccagagtaaaagaatatttggacaatgtcgtcaagtttgcccgtgaaaacggatttgttttgacaatatttaacaggaaaaggtatatcaaggatataaagtctactaataaatggctgagaaactatgcagagagaatagcaatgaattcacctatccagggaagtgctgcagatattatgaaaatagcaatgataagagtttataaaaagctaaaagaaaacaatttaaaatcaagaattattctgcaggtccatgacgaacttttgattgaatcaccctatgaagagaaagagatagtaaaggaaatagtaaaatcggagatggaaaatgcggttttattgaaagttcctttggtagttgaagtgaaagaaggttcaaattggtatgaaacaaagtaaaggatcc

SEQ ID NO: 1689 - DNA, 2623 bp, Artificial Sequence
  Description of Artificial Sequence: Synthetic DNA sequence of Caldicellulosiruptor TOK13B DNA Polymerase N777Y
atgaaatacctgctgccgaccgctgctgctggtctgctgctcctcgctgcccagccggcgatggccatggaatttgttatttttgatgggaatagtattctgtatagagctttttttgccttgccacagcttactacctcaacaggcatacctacaaatgctatatatggttttttgaatgtgctgttaaaatacttagattctgaaaaaccggattatgtagcagtagcttttgacaaaaaaggcagagctgtccgaaaaagtgaatatgaagaatacaaggctaacagaaaaccgatgccagattctcttcaggttcagataccttacgtaagagaaatacttgctgctctgaacattcctgtactgaaatgtgaagggtatgaagctgatgacgttataggcacacttgtaaatagatttaaagcccaggatttagagattgtgataataaccggagacagagatacacttcagttacttgataaaaatgtaattgtcaaaatagtcacaacaaggtttgacaggacaactgaagatttgtatgctgtagaaaatgtaaaagaaaaatatggtgtttttgcgcatcaggttgttgactataaagcattagtaggtgatgcgtcagacaatataccaggtgttaagggaattggagataaaactgccataaagctgttagaagagtaccagactctggagaatatatatcagaatctaaataacattaaaggagcgctaaaagagaagttggaatcaggaaaagacatggcatttttatcaaaaagactggctactatcatatgcgatttaccaattgaggtgaatcttgaagaattaaaaaccaaagaatgggacaaagaaagactttatcagattttacttcaacttgagtttaaaagctttattaaaagactgggcttttcagaagagattaactatgcaaggcagaactttcagctacctgaatttagtattaaagaacttcgtgatgtttcagcaatagggggcaaagaaatctatctattgtactcagatgaagaaggacttttttatatttatgaccatcaaacctcaaccatttttacaacttctgataaggaagctattaaagatcttttaacactccaaagcattcaaaaggttgtatatgatttaaaaaatatactccataaggtggactttgatgaagctaatcagataaaaaattgtaatgatgttatgttggcttcatatgttttggacagtacacgcagttcgtacgatttggaaacattgtttatttcttatctcaacactgatatagctgcaatcaaagagaatagatgggctggtgctacagttttattaagaaatctttgggatgaactttcaaaactcattgatttaaactcggcccaatacgtttatgagagcatagagatgcctcttgttcccattttatatgaaatggagaaaatcggttttaaggttgacaaaaacactttgcaggagtatacaaaagagattgagagcaagcttttaaagttggaatcacagatttatcaaatagccggtgaatggtttaacataaactcgccaaaacaactctcatatatattattcgaaaaactgaagcttccggttgttaaaaagaccaaaacaggatattcaacagatgccgaggtattagaagagctgtatgataaacatgacataataccgcttattctggattatagaatgtatacgaaaatactgacaacttactgtcagggactggttcaggcaataaatcctgcaactggaagaattcataccaactttattcagacaggtacggcaactggaagacttgcaagtgcagagcccaatctgcaaaatattcctgtaaaatatgatgagggaaagctaataagaaaggcatttgttccagatgaaggttatgtgttgatagatgctgattattctcagattgagcttagaatacttgcacatatctctgaggatgaacgactgataaatgcttttaaaaataaccttgatattcattcacagacggcggcagagatctttggtgtggatataagtcaggttacaccaattatgcgaagccaggcaaaagcagttaactttggaattgtatatggtatatctgattatggactttcacgggatataaagatttcaagaaaagaagcagccgagtttattaatcgttattttgaaaagtatcccagagtaaaagaatatttggacaatgtcgtcaagtttgcccgtgaaaacggatttgttttgacaatatttaacaggaaaaggtatatcaaggatataaagtctactaataaatatctgagaaactatgcagagagaatagcaatgaattcacctatccagggaagtgctgcagatattatgaaaatagcaatgataagagtttataaaaagctaaaagaaaacaatttaaaatcaagaattattctgcaggtccatgacgaacttttgattgaatcaccctatgaagagaaagagatagtaaaggaaatagtaaaatcggagatggaaaatgcggttttattgaaagttcctttggtagttgaagtgaaagaaggttcaaattggtatgaaacaaagtaaaggatcc

SEQ ID NO: 1690 - DNA, 2623 bp, Artificial Sequence
  Description of Artificial Sequence: Synthetic DNA sequence of Caldicellulosiruptor TOK13B DNA Polymerase N777V
atgaaatacctgctgccgaccgctgctgctggtctgctgctcctcgctgcccagccggcgatggccatggaatttgttatttttgatgggaatagtattctgtatagagctttttttgccttgccacagcttactacctcaacaggcatacctacaaatgctatatatggttttttgaatgtgctgttaaaatacttagattctgaaaaaccggattatgtagcagtagcttttgacaaaaaaggcagagctgtccgaaaaagtgaatatgaagaatacaaggctaacagaaaaccgatgccagattctcttcaggttcagataccttacgtaagagaaatacttgctgctctgaacattcctgtactgaaatgtgaagggtatgaagctgatgacgttataggcacacttgtaaatagatttaaagcccaggatttagagattgtgataataaccggagacagagatacacttcagttacttgataaaaatgtaattgtcaaaatagtcacaacaaggtttgacaggacaactgaagatttgtatgctgtagaaaatgtaaaagaaaaatatggtgtttttgcgcatcaggttgttgactataaagcattagtaggtgatgcgtcagacaatataccaggtgttaagggaattggagataaaactgccataaagctgttagaagagtaccagactctggagaatatatatcagaatctaaataacattaaaggagcgctaaaagagaagttggaatcaggaaaagacatggcatttttatcaaaaagactggctactatcatatgcgatttaccaattgaggtgaatcttgaagaattaaaaaccaaagaatgggacaaagaaagactttatcagattttacttcaacttgagtttaaaagctttattaaaagactgggcttttcagaagagattaactatgcaaggcagaactttcagctacctgaatttagtattaaagaacttcgtgatgtttcagcaatagggggcaaagaaatctatctattgtactcagatgaagaaggacttttttatatttatgaccatcaaacctcaaccatttttacaacttctgataaggaagctattaaagatcttttaacactccaaagcattcaaaaggttgtatatgatttaaaaaatatactccataaggtggactttgatgaagctaatcagataaaaaattgtaatgatgttatgttggcttcatatgttttggacagtacacgcagttcgtacgatttggaaacattgtttatttcttatctcaacactgatatagctgcaatcaaagagaatagatgggctggtgctacagttttattaagaaatctttgggatgaactttcaaaactcattgatttaaactcggcccaatacgtttatgagagcatagagatgcctcttgttcccattttatatgaaatggagaaaatcggttttaaggttgacaaaaacactttgcaggagtatacaaaagagattgagagcaagcttttaaagttggaatcacagatttatcaaatagccggtgaatggtttaacataaactcgccaaaacaactctcatatatattattcgaaaaactgaagcttccggttgttaaaaagaccaaaacaggatattcaacagatgccgaggtattagaagagctgtatgataaacatgacataataccgcttattctggattatagaatgtatacgaaaatactgacaacttactgtcagggactggttcaggcaataaatcctgcaactggaagaattcataccaactttattcagacaggtacggcaactggaagacttgcaagtgcagagcccaatctgcaaaatattcctgtaaaatatgatgagggaaagctaataagaaaggcatttgttccagatgaaggttatgtgttgatagatgctgattattctcagattgagcttagaatacttgcacatatctctgaggatgaacgactgataaatgcttttaaaaataaccttgatattcattcacagacggcggcagagatctttggtgtggatataagtcaggttacaccaattatgcgaagccaggcaaaagcagttaactttggaattgtatatggtatatctgattatggactttcacgggatataaagatttcaagaaaagaagcagccgagtttattaatcgttattttgaaaagtatcccagagtaaaagaatatttggacaatgtcgtcaagtttgcccgtgaaaacggatttgttttgacaatatttaacaggaaaaggtatatcaaggatataaagtctactaataaagttctgagaaactatgcagagagaatagcaatgaattcacctatccagggaagtgctgcagatattatgaaaatagcaatgataagagtttataaaaagctaaaagaaaacaatttaaaatcaagaattattctgcaggtccatgacgaacttttgattgaatcaccctatgaagagaaagagatagtaaaggaaatagtaaaatcggagatggaaaatgcggttttattgaaagttcctttggtagttgaagtgaaagaaggttcaaattggtatgaaacaaagtaaaggatcc

SEQ ID NO: 1691 - DNA, 2623 bp, Artificial Sequence
  Description of Artificial Sequence: Synthetic DNA sequence of Caldicellulosiruptor TOK13B DNA Polymerase L778A
atgaaatacctgctgccgaccgctgctgctggtctgctgctcctcgctgcccagccggcgatggccatggaatttgttatttttgatgggaatagtattctgtatagagctttttttgccttgccacagcttactacctcaacaggcatacctacaaatgctatatatggttttttgaatgtgctgttaaaatacttagattctgaaaaaccggattatgtagcagtagcttttgacaaaaaaggcagagctgtccgaaaaagtgaatatgaagaatacaaggctaacagaaaaccgatgccagattctcttcaggttcagataccttacgtaagagaaatacttgctgctctgaacattcctgtactgaaatgtgaagggtatgaagctgatgacgttataggcacacttgtaaatagatttaaagcccaggatttagagattgtgataataaccggagacagagatacacttcagttacttgataaaaatgtaattgtcaaaatagtcacaacaaggtttgacaggacaactgaagatttgtatgctgtagaaaatgtaaaagaaaaatatggtgtttttgcgcatcaggttgttgactataaagcattagtaggtgatgcgtcagacaatataccaggtgttaagggaattggagataaaactgccataaagctgttagaagagtaccagactctggagaatatatatcagaatctaaataacattaaaggagcgctaaaagagaagttggaatcaggaaaagacatggcatttttatcaaaaagactggctactatcatatgcgatttaccaattgaggtgaatcttgaagaattaaaaaccaaagaatgggacaaagaaagactttatcagattttacttcaacttgagtttaaaagctttattaaaagactgggcttttcagaagagattaactatgcaaggcagaactttcagctacctgaatttagtattaaagaacttcgtgatgtttcagcaatagggggcaaagaaatctatctattgtactcagatgaagaaggacttttttatatttatgaccatcaaacctcaaccatttttacaacttctgataaggaagctattaaagatcttttaacactccaaagcattcaaaaggttgtatatgatttaaaaaatatactccataaggtggactttgatgaagctaatcagataaaaaattgtaatgatgttatgttggcttcatatgttttggacagtacacgcagttcgtacgatttggaaacattgtttatttcttatctcaacactgatatagctgcaatcaaagagaatagatgggctggtgctacagttttattaagaaatctttgggatgaactttcaaaactcattgatttaaactcggcccaatacgtttatgagagcatagagatgcctcttgttcccattttatatgaaatggagaaaatcggttttaaggttgacaaaaacactttgcaggagtatacaaaagagattgagagcaagcttttaaagttggaatcacagatttatcaaatagccggtgaatggtttaacataaactcgccaaaacaactctcatatatattattcgaaaaactgaagcttccggttgttaaaaagaccaaaacaggatattcaacagatgccgaggtattagaagagctgtatgataaacatgacataataccgcttattctggattatagaatgtatacgaaaatactgacaacttactgtcagggactggttcaggcaataaatcctgcaactggaagaattcataccaactttattcagacaggtacggcaactggaagacttgcaagtgcagagcccaatctgcaaaatattcctgtaaaatatgatgagggaaagctaataagaaaggcatttgttccagatgaaggttatgtgttgatagatgctgattattctcagattgagcttagaatacttgcacatatctctgaggatgaacgactgataaatgcttttaaaaataaccttgatattcattcacagacggcggcagagatctttggtgtggatataagtcaggttacaccaattatgcgaagccaggcaaaagcagttaactttggaattgtatatggtatatctgattatggactttcacgggatataaagatttcaagaaaagaagcagccgagtttattaatcgttattttgaaaagtatcccagagtaaaagaatatttggacaatgtcgtcaagtttgcccgtgaaaacggatttgttttgacaatatttaacaggaaaaggtatatcaaggatataaagtctactaataaaaacgctagaaactatgcagagagaatagcaatgaattcacctatccagggaagtgctgcagatattatgaaaatagcaatgataagagtttataaaaagctaaaagaaaacaatttaaaatcaagaattattctgcaggtccatgacgaacttttgattgaatcaccctatgaagagaaagagatagtaaaggaaatagtaaaatcggagatggaaaatgcggttttattgaaagttcctttggtagttgaagtgaaagaaggttcaaattggtatgaaacaaagtaaaggatcc

SEQ ID NO: 1692 - DNA, 2623 bp, Artificial Sequence
  Description of Artificial Sequence: Synthetic DNA sequence of Caldicellulosiruptor TOK13B DNA Polymerase L778R
atgaaatacctgctgccgaccgctgctgctggtctgctgctcctcgctgcccagccggcgatggccatggaatttgttatttttgatgggaatagtattctgtatagagctttttttgccttgccacagcttactacctcaacaggcatacctacaaatgctatatatggttttttgaatgtgctgttaaaatacttagattctgaaaaaccggattatgtagcagtagcttttgacaaaaaaggcagagctgtccgaaaaagtgaatatgaagaatacaaggctaacagaaaaccgatgccagattctcttcaggttcagataccttacgtaagagaaatacttgctgctctgaacattcctgtactgaaatgtgaagggtatgaagctgatgacgttataggcacacttgtaaatagatttaaagcccaggatttagagattgtgataataaccggagacagagatacacttcagttacttgataaaaatgtaattgtcaaaatagtcacaacaaggtttgacaggacaactgaagatttgtatgctgtagaaaatgtaaaagaaaaatatggtgtttttgcgcatcaggttgttgactataaagcattagtaggtgatgcgtcagacaatataccaggtgttaagggaattggagataaaactgccataaagctgttagaagagtaccagactctggagaatatatatcagaatctaaataacattaaaggagcgctaaaagagaagttggaatcaggaaaagacatggcatttttatcaaaaagactggctactatcatatgcgatttaccaattgaggtgaatcttgaagaattaaaaaccaaagaatgggacaaagaaagactttatcagattttacttcaacttgagtttaaaagctttattaaaagactgggcttttcagaagagattaactatgcaaggcagaactttcagctacctgaatttagtattaaagaacttcgtgatgtttcagcaatagggggcaaagaaatctatctattgtactcagatgaagaaggacttttttatatttatgaccatcaaacctcaaccatttttacaacttctgataaggaagctattaaagatcttttaacactccaaagcattcaaaaggttgtatatgatttaaaaaatatactccataaggtggactttgatgaagctaatcagataaaaaattgtaatgatgttatgttggcttcatatgttttggacagtacacgcagttcgtacgatttggaaacattgtttatttcttatctcaacactgatatagctgcaatcaaagagaatagatgggctggtgctacagttttattaagaaatctttgggatgaactttcaaaactcattgatttaaactcggcccaatacgtttatgagagcatagagatgcctcttgttcccattttatatgaaatggagaaaatcggttttaaggttgacaaaaacactttgcaggagtatacaaaagagattgagagcaagcttttaaagttggaatcacagatttatcaaatagccggtgaatggtttaacataaactcgccaaaacaactctcatatatattattcgaaaaactgaagcttccggttgttaaaaagaccaaaacaggatattcaacagatgccgaggtattagaagagctgtatgataaacatgacataataccgcttattctggattatagaatgtatacgaaaatactgacaacttactgtcagggactggttcaggcaataaatcctgcaactggaagaattcataccaactttattcagacaggtacggcaactggaagacttgcaagtgcagagcccaatctgcaaaatattcctgtaaaatatgatgagggaaagctaataagaaaggcatttgttccagatgaaggttatgtgttgatagatgctgattattctcagattgagcttagaatacttgcacatatctctgaggatgaacgactgataaatgcttttaaaaataaccttgatattcattcacagacggcggcagagatctttggtgtggatataagtcaggttacaccaattatgcgaagccaggcaaaagcagttaactttggaattgtatatggtatatctgattatggactttcacgggatataaagatttcaagaaaagaagcagccgagtttattaatcgttattttgaaaagtatcccagagtaaaagaatatttggacaatgtcgtcaagtttgcccgtgaaaacggatttgttttgacaatatttaacaggaaaaggtatatcaaggatataaagtctactaataaaaaccgtagaaactatgcagagagaatagcaatgaattcacctatccagggaagtgctgcagatattatgaaaatagcaatgataagagtttataaaaagctaaaagaaaacaatttaaaatcaagaattattctgcaggtccatgacgaacttttgattgaatcaccctatgaagagaaagagatagtaaaggaaatagtaaaatcggagatggaaaatgcggttttattgaaagttcctttggtagttgaagtgaaagaaggttcaaattggtatgaaacaaagtaaaggatcc

SEQ ID NO: 1693 - DNA, 2623 bp, Artificial Sequence
  Description of Artificial Sequence: Synthetic DNA sequence of Caldicellulosiruptor TOK13B DNA Polymerase L778N
atgaaatacctgctgccgaccgctgctgctggtctgctgctcctcgctgcccagccggcgatggccatggaatttgttatttttgatgggaatagtattctgtatagagctttttttgccttgccacagcttactacctcaacaggcatacctacaaatgctatatatggttttttgaatgtgctgttaaaatacttagattctgaaaaaccggattatgtagcagtagcttttgacaaaaaaggcagagctgtccgaaaaagtgaatatgaagaatacaaggctaacagaaaaccgatgccagattctcttcaggttcagataccttacgtaagagaaatacttgctgctctgaacattcctgtactgaaatgtgaagggtatgaagctgatgacgttataggcacacttgtaaatagatttaaagcccaggatttagagattgtgataataaccggagacagagatacacttcagttacttgataaaaatgtaattgtcaaaatagtcacaacaaggtttgacaggacaactgaagatttgtatgctgtagaaaatgtaaaagaaaaatatggtgtttttgcgcatcaggttgttgactataaagcattagtaggtgatgcgtcagacaatataccaggtgttaagggaattggagataaaactgccataaagctgttagaagagtaccagactctggagaatatatatcagaatctaaataacattaaaggagcgctaaaagagaagttggaatcaggaaaagacatggcatttttatcaaaaagactggctactatcatatgcgatttaccaattgaggtgaatcttgaagaattaaaaaccaaagaatgggacaaagaaagactttatcagattttacttcaacttgagtttaaaagctttattaaaagactgggcttttcagaagagattaactatgcaaggcagaactttcagctacctgaatttagtattaaagaacttcgtgatgtttcagcaatagggggcaaagaaatctatctattgtactcagatgaagaaggacttttttatatttatgaccatcaaacctcaaccatttttacaacttctgataaggaagctattaaagatcttttaacactccaaagcattcaaaaggttgtatatgatttaaaaaatatactccataaggtggactttgatgaagctaatcagataaaaaattgtaatgatgttatgttggcttcatatgttttggacagtacacgcagttcgtacgatttggaaacattgtttatttcttatctcaacactgatatagctgcaatcaaagagaatagatgggctggtgctacagttttattaagaaatctttgggatgaactttcaaaactcattgatttaaactcggcccaatacgtttatgagagcatagagatgcctcttgttcccattttatatgaaatggagaaaatcggttttaaggttgacaaaaacactttgcaggagtatacaaaagagattgagagcaagcttttaaagttggaatcacagatttatcaaatagccggtgaatggtttaacataaactcgccaaaacaactctcatatatattattcgaaaaactgaagcttccggttgttaaaaagaccaaaacaggatattcaacagatgccgaggtattagaagagctgtatgataaacatgacataataccgcttattctggattatagaatgtatacgaaaatactgacaacttactgtcagggactggttcaggcaataaatcctgcaactggaagaattcataccaactttattcagacaggtacggcaactggaagacttgcaagtgcagagcccaatctgcaaaatattcctgtaaaatatgatgagggaaagctaataagaaaggcatttgttccagatgaaggttatgtgttgatagatgctgattattctcagattgagcttagaatacttgcacatatctctgaggatgaacgactgataaatgcttttaaaaataaccttgatattcattcacagacggcggcagagatctttggtgtggatataagtcaggttacaccaattatgcgaagccaggcaaaagcagttaactttggaattgtatatggtatatctgattatggactttcacgggatataaagatttcaagaaaagaagcagccgagtttattaatcgttattttgaaaagtatcccagagtaaaagaatatttggacaatgtcgtcaagtttgcccgtgaaaacggatttgttttgacaatatttaacaggaaaaggtatatcaaggatataaagtctactaataaaaacaatagaaactatgcagagagaatagcaatgaattcacctatccagggaagtgctgcagatattatgaaaatagcaatgataagagtttataaaaagctaaaagaaaacaatttaaaatcaagaattattctgcaggtccatgacgaacttttgattgaatcaccctatgaagagaaagagatagtaaaggaaatagtaaaatcggagatggaaaatgcggttttattgaaagttcctttggtagttgaagtgaaagaaggttcaaattggtatgaaacaaagtaaaggatcc

SEQ ID NO: 1694 - DNA, 2623 bp, Artificial Sequence
  Description of Artificial Sequence: Synthetic DNA sequence of Caldicellulosiruptor TOK13B DNA Polymerase L778D
atgaaatacctgctgccgaccgctgctgctggtctgctgctcctcgctgcccagccggcgatggccatggaatttgttatttttgatgggaatagtattctgtatagagctttttttgccttgccacagcttactacctcaacaggcatacctacaaatgctatatatggttttttgaatgtgctgttaaaatacttagattctgaaaaaccggattatgtagcagtagcttttgacaaaaaaggcagagctgtccgaaaaagtgaatatgaagaatacaaggctaacagaaaaccgatgccagattctcttcaggttcagataccttacgtaagagaaatacttgctgctctgaacattcctgtactgaaatgtgaagggtatgaagctgatgacgttataggcacacttgtaaatagatttaaagcccaggatttagagattgtgataataaccggagacagagatacacttcagttacttgataaaaatgtaattgtcaaaatagtcacaacaaggtttgacaggacaactgaagatttgtatgctgtagaaaatgtaaaagaaaaatatggtgtttttgcgcatcaggttgttgactataaagcattagtaggtgatgcgtcagacaatataccaggtgttaagggaattggagataaaactgccataaagctgttagaagagtaccagactctggagaatatatatcagaatctaaataacattaaaggagcgctaaaagagaagttggaatcaggaaaagacatggcatttttatcaaaaagactggctactatcatatgcgatttaccaattgaggtgaatcttgaagaattaaaaaccaaagaatgggacaaagaaagactttatcagattttacttcaacttgagtttaaaagctttattaaaagactgggcttttcagaagagattaactatgcaaggcagaactttcagctacctgaatttagtattaaagaacttcgtgatgtttcagcaatagggggcaaagaaatctatctattgtactcagatgaagaaggacttttttatatttatgaccatcaaacctcaaccatttttacaacttctgataaggaagctattaaagatcttttaacactccaaagcattcaaaaggttgtatatgatttaaaaaatatactccataaggtggactttgatgaagctaatcagataaaaaattgtaatgatgttatgttggcttcatatgttttggacagtacacgcagttcgtacgatttggaaacattgtttatttcttatctcaacactgatatagctgcaatcaaagagaatagatgggctggtgctacagttttattaagaaatctttgggatgaactttcaaaactcattgatttaaactcggcccaatacgtttatgagagcatagagatgcctcttgttcccattttatatgaaatggagaaaatcggttttaaggttgacaaaaacactttgcaggagtatacaaaagagattgagagcaagcttttaaagttggaatcacagatttatcaaatagccggtgaatggtttaacataaactcgccaaaacaactctcatatatattattcgaaaaactgaagcttccggttgttaaaaagaccaaaacaggatattcaacagatgccgaggtattagaagagctgtatgataaacatgacataataccgcttattctggattatagaatgtatacgaaaatactgacaacttactgtcagggactggttcaggcaataaatcctgcaactggaagaattcataccaactttattcagacaggtacggcaactggaagacttgcaagtgcagagcccaatctgcaaaatattcctgtaaaatatgatgagggaaagctaataagaaaggcatttgttccagatgaaggttatgtgttgatagatgctgattattctcagattgagcttagaatacttgcacatatctctgaggatgaacgactgataaatgcttttaaaaataaccttgatattcattcacagacggcggcagagatctttggtgtggatataagtcaggttacaccaattatgcgaagccaggcaaaagcagttaactttggaattgtatatggtatatctgattatggactttcacgggatataaagatttcaagaaaagaagcagccgagtttattaatcgttattttgaaaagtatcccagagtaaaagaatatttggacaatgtcgtcaagtttgcccgtgaaaacggatttgttttgacaatatttaacaggaaaaggtatatcaaggatataaagtctactaataaaaacgatagaaactatgcagagagaatagcaatgaattcacctatccagggaagtgctgcagatattatgaaaatagcaatgataagagtttataaaaagctaaaagaaaacaatttaaaatcaagaattattctgcaggtccatgacgaacttttgattgaatcaccctatgaagagaaagagatagtaaaggaaatagtaaaatcggagatggaaaatgcggttttattgaaagttcctttggtagttgaagtgaaagaaggttcaaattggtatgaaacaaagtaaaggatcc

SEQ ID NO: 1695 - DNA, 2623 bp, Artificial Sequence
  Description of Artificial Sequence: Synthetic DNA sequence of Caldicellulosiruptor TOK13B DNA Polymerase L778C
atgaaatacctgctgccgaccgctgctgctggtctgctgctcctcgctgcccagccggcgatggccatggaatttgttatttttgatgggaatagtattctgtatagagctttttttgccttgccacagcttactacctcaacaggcatacctacaaatgctatatatggttttttgaatgtgctgttaaaatacttagattctgaaaaaccggattatgtagcagtagcttttgacaaaaaaggcagagctgtccgaaaaagtgaatatgaagaatacaaggctaacagaaaaccgatgccagattctcttcaggttcagataccttacgtaagagaaatacttgctgctctgaacattcctgtactgaaatgtgaagggtatgaagctgatgacgttataggcacacttgtaaatagatttaaagcccaggatttagagattgtgataataaccggagacagagatacacttcagttacttgataaaaatgtaattgtcaaaatagtcacaacaaggtttgacaggacaactgaagatttgtatgctgtagaaaatgtaaaagaaaaatatggtgtttttgcgcatcaggttgttgactataaagcattagtaggtgatgcgtcagacaatataccaggtgttaagggaattggagataaaactgccataaagctgttagaagagtaccagactctggagaatatatatcagaatctaaataacattaaaggagcgctaaaagagaagttggaatcaggaaaagacatggcatttttatcaaaaagactggctactatcatatgcgatttaccaattgaggtgaatcttgaagaattaaaaaccaaagaatgggacaaagaaagactttatcagattttacttcaacttgagtttaaaagctttattaaaagactgggcttttcagaagagattaactatgcaaggcagaactttcagctacctgaatttagtattaaagaacttcgtgatgtttcagcaatagggggcaaagaaatctatctattgtactcagatgaagaaggacttttttatatttatgaccatcaaacctcaaccatttttacaacttctgataaggaagctattaaagatcttttaacactccaaagcattcaaaaggttgtatatgatttaaaaaatatactccataaggtggactttgatgaagctaatcagataaaaaattgtaatgatgttatgttggcttcatatgttttggacagtacacgcagttcgtacgatttggaaacattgtttatttcttatctcaacactgatatagctgcaatcaaagagaatagatgggctggtgctacagttttattaagaaatctttgggatgaactttcaaaactcattgatttaaactcggcccaatacgtttatgagagcatagagatgcctcttgttcccattttatatgaaatggagaaaatcggttttaaggttgacaaaaacactttgcaggagtatacaaaagagattgagagcaagcttttaaagttggaatcacagatttatcaaatagccggtgaatggtttaacataaactcgccaaaacaactctcatatatattattcgaaaaactgaagcttccggttgttaaaaagaccaaaacaggatattcaacagatgccgaggtattagaagagctgtatgataaacatgacataataccgcttattctggattatagaatgtatacgaaaatactgacaacttactgtcagggactggttcaggcaataaatcctgcaactggaagaattcataccaactttattcagacaggtacggcaactggaagacttgcaagtgcagagcccaatctgcaaaatattcctgtaaaatatgatgagggaaagctaataagaaaggcatttgttccagatgaaggttatgtgttgatagatgctgattattctcagattgagcttagaatacttgcacatatctctgaggatgaacgactgataaatgcttttaaaaataaccttgatattcattcacagacggcggcagagatctttggtgtggatataagtcaggttacaccaattatgcgaagccaggcaaaagcagttaactttggaattgtatatggtatatctgattatggactttcacgggatataaagatttcaagaaaagaagcagccgagtttattaatcgttattttgaaaagtatcccagagtaaaagaatatttggacaatgtcgtcaagtttgcccgtgaaaacggatttgttttgacaatatttaacaggaaaaggtatatcaaggatataaagtctactaataaaaactgtagaaactatgcagagagaatagcaatgaattcacctatccagggaagtgctgcagatattatgaaaatagcaatgataagagtttataaaaagctaaaagaaaacaatttaaaatcaagaattattctgcaggtccatgacgaacttttgattgaatcaccctatgaagagaaagagatagtaaaggaaatagtaaaatcggagatggaaaatgcggttttattgaaagttcctttggtagttgaagtgaaagaaggttcaaattggtatgaaacaaagtaaaggatcc

SEQ ID NO: 1696 - DNA, 2623 bp, Artificial Sequence
  Description of Artificial Sequence: Synthetic DNA sequence of Caldicellulosiruptor TOK13B DNA Polymerase L778E
atgaaatacctgctgccgaccgctgctgctggtctgctgctcctcgctgcccagccggcgatggccatggaatttgttatttttgatgggaatagtattctgtatagagctttttttgccttgccacagcttactacctcaacaggcatacctacaaatgctatatatggttttttgaatgtgctgttaaaatacttagattctgaaaaaccggattatgtagcagtagcttttgacaaaaaaggcagagctgtccgaaaaagtgaatatgaagaatacaaggctaacagaaaaccgatgccagattctcttcaggttcagataccttacgtaagagaaatacttgctgctctgaacattcctgtactgaaatgtgaagggtatgaagctgatgacgttataggcacacttgtaaatagatttaaagcccaggatttagagattgtgataataaccggagacagagatacacttcagttacttgataaaaatgtaattgtcaaaatagtcacaacaaggtttgacaggacaactgaagatttgtatgctgtagaaaatgtaaaagaaaaatatggtgtttttgcgcatcaggttgttgactataaagcattagtaggtgatgcgtcagacaatataccaggtgttaagggaattggagataaaactgccataaagctgttagaagagtaccagactctggagaatatatatcagaatctaaataacattaaaggagcgctaaaagagaagttggaatcaggaaaagacatggcatttttatcaaaaagactggctactatcatatgcgatttaccaattgaggtgaatcttgaagaattaaaaaccaaagaatgggacaaagaaagactttatcagattttacttcaacttgagtttaaaagctttattaaaagactgggcttttcagaagagattaactatgcaaggcagaactttcagctacctgaatttagtattaaagaacttcgtgatgtttcagcaatagggggcaaagaaatctatctattgtactcagatgaagaaggacttttttatatttatgaccatcaaacctcaaccatttttacaacttctgataaggaagctattaaagatcttttaacactccaaagcattcaaaaggttgtatatgatttaaaaaatatactccataaggtggactttgatgaagctaatcagataaaaaattgtaatgatgttatgttggcttcatatgttttggacagtacacgcagttcgtacgatttggaaacattgtttatttcttatctcaacactgatatagctgcaatcaaagagaatagatgggctggtgctacagttttattaagaaatctttgggatgaactttcaaaactcattgatttaaactcggcccaatacgtttatgagagcatagagatgcctcttgttcccattttatatgaaatggagaaaatcggttttaaggttgacaaaaacactttgcaggagtatacaaaagagattgagagcaagcttttaaagttggaatcacagatttatcaaatagccggtgaatggtttaacataaactcgccaaaacaactctcatatatattattcgaaaaactgaagcttccggttgttaaaaagaccaaaacaggatattcaacagatgccgaggtattagaagagctgtatgataaacatgacataataccgcttattctggattatagaatgtatacgaaaatactgacaacttactgtcagggactggttcaggcaataaatcctgcaactggaagaattcataccaactttattcagacaggtacggcaactggaagacttgcaagtgcagagcccaatctgcaaaatattcctgtaaaatatgatgagggaaagctaataagaaaggcatttgttccagatgaaggttatgtgttgatagatgctgattattctcagattgagcttagaatacttgcacatatctctgaggatgaacgactgataaatgcttttaaaaataaccttgatattcattcacagacggcggcagagatctttggtgtggatataagtcaggttacaccaattatgcgaagccaggcaaaagcagttaactttggaattgtatatggtatatctgattatggactttcacgggatataaagatttcaagaaaagaagcagccgagtttattaatcgttattttgaaaagtatcccagagtaaaagaatatttggacaatgtcgtcaagtttgcccgtgaaaacggatttgttttgacaatatttaacaggaaaaggtatatcaaggatataaagtctactaataaaaacgaaagaaactatgcagagagaatagcaatgaattcacctatccagggaagtgctgcagatattatgaaaatagcaatgataagagtttataaaaagctaaaagaaaacaatttaaaatcaagaattattctgcaggtccatgacgaacttttgattgaatcaccctatgaagagaaagagatagtaaaggaaatagtaaaatcggagatggaaaatgcggttttattgaaagttcctttggtagttgaagtgaaagaaggttcaaattggtatgaaacaaagtaaaggatcc

SEQ ID NO: 1697 - DNA, 2623 bp, Artificial Sequence
  Description of Artificial Sequence: Synthetic DNA sequence of Caldicellulosiruptor TOK13B DNA Polymerase L778Q
atgaaatacctgctgccgaccgctgctgctggtctgctgctcctcgctgcccagccggcgatggccatggaatttgttatttttgatgggaatagtattctgtatagagctttttttgccttgccacagcttactacctcaacaggcatacctacaaatgctatatatggttttttgaatgtgctgttaaaatacttagattctgaaaaaccggattatgtagcagtagcttttgacaaaaaaggcagagctgtccgaaaaagtgaatatgaagaatacaaggctaacagaaaaccgatgccagattctcttcaggttcagataccttacgtaagagaaatacttgctgctctgaacattcctgtactgaaatgtgaagggtatgaagctgatgacgttataggcacacttgtaaatagatttaaagcccaggatttagagattgtgataataaccggagacagagatacacttcagttacttgataaaaatgtaattgtcaaaatagtcacaacaaggtttgacaggacaactgaagatttgtatgctgtagaaaatgtaaaagaaaaatatggtgtttttgcgcatcaggttgttgactataaagcattagtaggtgatgcgtcagacaatataccaggtgttaagggaattggagataaaactgccataaagctgttagaagagtaccagactctggagaatatatatcagaatctaaataacattaaaggagcgctaaaagagaagttggaatcaggaaaagacatggcatttttatcaaaaagactggctactatcatatgcgatttaccaattgaggtgaatcttgaagaattaaaaaccaaagaatgggacaaagaaagactttatcagattttacttcaacttgagtttaaaagctttattaaaagactgggcttttcagaagagattaactatgcaaggcagaactttcagctacctgaatttagtattaaagaacttcgtgatgtttcagcaatagggggcaaagaaatctatctattgtactcagatgaagaaggacttttttatatttatgaccatcaaacctcaaccatttttacaacttctgataaggaagctattaaagatcttttaacactccaaagcattcaaaaggttgtatatgatttaaaaaatatactccataaggtggactttgatgaagctaatcagataaaaaattgtaatgatgttatgttggcttcatatgttttggacagtacacgcagttcgtacgatttggaaacattgtttatttcttatctcaacactgatatagctgcaatcaaagagaatagatgggctggtgctacagttttattaagaaatctttgggatgaactttcaaaactcattgatttaaactcggcccaatacgtttatgagagcatagagatgcctcttgttcccattttatatgaaatggagaaaatcggttttaaggttgacaaaaacactttgcaggagtatacaaaagagattgagagcaagcttttaaagttggaatcacagatttatcaaatagccggtgaatggtttaacataaactcgccaaaacaactctcatatatattattcgaaaaactgaagcttccggttgttaaaaagaccaaaacaggatattcaacagatgccgaggtattagaagagctgtatgataaacatgacataataccgcttattctggattatagaatgtatacgaaaatactgacaacttactgtcagggactggttcaggcaataaatcctgcaactggaagaattcataccaactttattcagacaggtacggcaactggaagacttgcaagtgcagagcccaatctgcaaaatattcctgtaaaatatgatgagggaaagctaataagaaaggcatttgttccagatgaaggttatgtgttgatagatgctgattattctcagattgagcttagaatacttgcacatatctctgaggatgaacgactgataaatgcttttaaaaataaccttgatattcattcacagacggcggcagagatctttggtgtggatataagtcaggttacaccaattatgcgaagccaggcaaaagcagttaactttggaattgtatatggtatatctgattatggactttcacgggatataaagatttcaagaaaagaagcagccgagtttattaatcgttattttgaaaagtatcccagagtaaaagaatatttggacaatgtcgtcaagtttgcccgtgaaaacggatttgttttgacaatatttaacaggaaaaggtatatcaaggatataaagtctactaataaaaaccaaagaaactatgcagagagaatagcaatgaattcacctatccagggaagtgctgcagatattatgaaaatagcaatgataagagtttataaaaagctaaaagaaaacaatttaaaatcaagaattattctgcaggtccatgacgaacttttgattgaatcaccctatgaagagaaagagatagtaaaggaaatagtaaaatcggagatggaaaatgcggttttattgaaagttcctttggtagttgaagtgaaagaaggttcaaattggtatgaaacaaagtaaaggatcc

SEQ ID NO: 1698 - DNA, 2623 bp, Artificial Sequence
  Description of Artificial Sequence: Synthetic DNA sequence of Caldicellulosiruptor TOK13B DNA Polymerase L778G
atgaaatacctgctgccgaccgctgctgctggtctgctgctcctcgctgcccagccggcgatggccatggaatttgttatttttgatgggaatagtattctgtatagagctttttttgccttgccacagcttactacctcaacaggcatacctacaaatgctatatatggttttttgaatgtgctgttaaaatacttagattctgaaaaaccggattatgtagcagtagcttttgacaaaaaaggcagagctgtccgaaaaagtgaatatgaagaatacaaggctaacagaaaaccgatgccagattctcttcaggttcagataccttacgtaagagaaatacttgctgctctgaacattcctgtactgaaatgtgaagggtatgaagctgatgacgttataggcacacttgtaaatagatttaaagcccaggatttagagattgtgataataaccggagacagagatacacttcagttacttgataaaaatgtaattgtcaaaatagtcacaacaaggtttgacaggacaactgaagatttgtatgctgtagaaaatgtaaaagaaaaatatggtgtttttgcgcatcaggttgttgactataaagcattagtaggtgatgcgtcagacaatataccaggtgttaagggaattggagataaaactgccataaagctgttagaagagtaccagactctggagaatatatatcagaatctaaataacattaaaggagcgctaaaagagaagttggaatcaggaaaagacatggcatttttatcaaaaagactggctactatcatatgcgatttaccaattgaggtgaatcttgaagaattaaaaaccaaagaatgggacaaagaaagactttatcagattttacttcaacttgagtttaaaagctttattaaaagactgggcttttcagaagagattaactatgcaaggcagaactttcagctacctgaatttagtattaaagaacttcgtgatgtttcagcaatagggggcaaagaaatctatctattgtactcagatgaagaaggacttttttatatttatgaccatcaaacctcaaccatttttacaacttctgataaggaagctattaaagatcttttaacactccaaagcattcaaaaggttgtatatgatttaaaaaatatactccataaggtggactttgatgaagctaatcagataaaaaattgtaatgatgttatgttggcttcatatgttttggacagtacacgcagttcgtacgatttggaaacattgtttatttcttatctcaacactgatatagctgcaatcaaagagaatagatgggctggtgctacagttttattaagaaatctttgggatgaactttcaaaactcattgatttaaactcggcccaatacgtttatgagagcatagagatgcctcttgttcccattttatatgaaatggagaaaatcggttttaaggttgacaaaaacactttgcaggagtatacaaaagagattgagagcaagcttttaaagttggaatcacagatttatcaaatagccggtgaatggtttaacataaactcgccaaaacaactctcatatatattattcgaaaaactgaagcttccggttgttaaaaagaccaaaacaggatattcaacagatgccgaggtattagaagagctgtatgataaacatgacataataccgcttattctggattatagaatgtatacgaaaatactgacaacttactgtcagggactggttcaggcaataaatcctgcaactggaagaattcataccaactttattcagacaggtacggcaactggaagacttgcaagtgcagagcccaatctgcaaaatattcctgtaaaatatgatgagggaaagctaataagaaaggcatttgttccagatgaaggttatgtgttgatagatgctgattattctcagattgagcttagaatacttgcacatatctctgaggatgaacgactgataaatgcttttaaaaataaccttgatattcattcacagacggcggcagagatctttggtgtggatataagtcaggttacaccaattatgcgaagccaggcaaaagcagttaactttggaattgtatatggtatatctgattatggactttcacgggatataaagatttcaagaaaagaagcagccgagtttattaatcgttattttgaaaagtatcccagagtaaaagaatatttggacaatgtcgtcaagtttgcccgtgaaaacggatttgttttgacaatatttaacaggaaaaggtatatcaaggatataaagtctactaataaaaacggtagaaactatgcagagagaatagcaatgaattcacctatccagggaagtgctgcagatattatgaaaatagcaatgataagagtttataaaaagctaaaagaaaacaatttaaaatcaagaattattctgcaggtccatgacgaacttttgattgaatcaccctatgaagagaaagagatagtaaaggaaatagtaaaatcggagatggaaaatgcggttttattgaaagttcctttggtagttgaagtgaaagaaggttcaaattggtatgaaacaaagtaaaggatcc

SEQ ID NO: 1699 - DNA, 2623 bp, Artificial Sequence
  Description of Artificial Sequence: Synthetic DNA sequence of Caldicellulosiruptor TOK13B DNA Polymerase L778H
atgaaatacctgctgccgaccgctgctgctggtctgctgctcctcgctgcccagccggcgatggccatggaatttgttatttttgatgggaatagtattctgtatagagctttttttgccttgccacagcttactacctcaacaggcatacctacaaatgctatatatggttttttgaatgtgctgttaaaatacttagattctgaaaaaccggattatgtagcagtagcttttgacaaaaaaggcagagctgtccgaaaaagtgaatatgaagaatacaaggctaacagaaaaccgatgccagattctcttcaggttcagataccttacgtaagagaaatacttgctgctctgaacattcctgtactgaaatgtgaagggtatgaagctgatgacgttataggcacacttgtaaatagatttaaagcccaggatttagagattgtgataataaccggagacagagatacacttcagttacttgataaaaatgtaattgtcaaaatagtcacaacaaggtttgacaggacaactgaagatttgtatgctgtagaaaatgtaaaagaaaaatatggtgtttttgcgcatcaggttgttgactataaagcattagtaggtgatgcgtcagacaatataccaggtgttaagggaattggagataaaactgccataaagctgttagaagagtaccagactctggagaatatatatcagaatctaaataacattaaaggagcgctaaaagagaagttggaatcaggaaaagacatggcatttttatcaaaaagactggctactatcatatgcgatttaccaattgaggtgaatcttgaagaattaaaaaccaaagaatgggacaaagaaagactttatcagattttacttcaacttgagtttaaaagctttattaaaagactgggcttttcagaagagattaactatgcaaggcagaactttcagctacctgaatttagtattaaagaacttcgtgatgtttcagcaatagggggcaaagaaatctatctattgtactcagatgaagaaggacttttttatatttatgaccatcaaacctcaaccatttttacaacttctgataaggaagctattaaagatcttttaacactccaaagcattcaaaaggttgtatatgatttaaaaaatatactccataaggtggactttgatgaagctaatcagataaaaaattgtaatgatgttatgttggcttcatatgttttggacagtacacgcagttcgtacgatttggaaacattgtttatttcttatctcaacactgatatagctgcaatcaaagagaatagatgggctggtgctacagttttattaagaaatctttgggatgaactttcaaaactcattgatttaaactcggcccaatacgtttatgagagcatagagatgcctcttgttcccattttatatgaaatggagaaaatcggttttaaggttgacaaaaacactttgcaggagtatacaaaagagattgagagcaagcttttaaagttggaatcacagatttatcaaatagccggtgaatggtttaacataaactcgccaaaacaactctcatatatattattcgaaaaactgaagcttccggttgttaaaaagaccaaaacaggatattcaacagatgccgaggtattagaagagctgtatgataaacatgacataataccgcttattctggattatagaatgtatacgaaaatactgacaacttactgtcagggactggttcaggcaataaatcctgcaactggaagaattcataccaactttattcagacaggtacggcaactggaagacttgcaagtgcagagcccaatctgcaaaatattcctgtaaaatatgatgagggaaagctaataagaaaggcatttgttccagatgaaggttatgtgttgatagatgctgattattctcagattgagcttagaatacttgcacatatctctgaggatgaacgactgataaatgcttttaaaaataaccttgatattcattcacagacggcggcagagatctttggtgtggatataagtcaggttacaccaattatgcgaagccaggcaaaagcagttaactttggaattgtatatggtatatctgattatggactttcacgggatataaagatttcaagaaaagaagcagccgagtttattaatcgttattttgaaaagtatcccagagtaaaagaatatttggacaatgtcgtcaagtttgcccgtgaaaacggatttgttttgacaatatttaacaggaaaaggtatatcaaggatataaagtctactaataaaaaccatagaaactatgcagagagaatagcaatgaattcacctatccagggaagtgctgcagatattatgaaaatagcaatgataagagtttataaaaagctaaaagaaaacaatttaaaatcaagaattattctgcaggtccatgacgaacttttgattgaatcaccctatgaagagaaagagatagtaaaggaaatagtaaaatcggagatggaaaatgcggttttattgaaagttcctttggtagttgaagtgaaagaaggttcaaattggtatgaaacaaagtaaaggatcc

SEQ ID NO: 1700 - DNA, 2623 bp, Artificial Sequence
  Description of Artificial Sequence: Synthetic DNA sequence of Caldicellulosiruptor TOK13B DNA Polymerase L778I
atgaaatacctgctgccgaccgctgctgctggtctgctgctcctcgctgcccagccggcgatggccatggaatttgttatttttgatgggaatagtattctgtatagagctttttttgccttgccacagcttactacctcaacaggcatacctacaaatgctatatatggttttttgaatgtgctgttaaaatacttagattctgaaaaaccggattatgtagcagtagcttttgacaaaaaaggcagagctgtccgaaaaagtgaatatgaagaatacaaggctaacagaaaaccgatgccagattctcttcaggttcagataccttacgtaagagaaatacttgctgctctgaacattcctgtactgaaatgtgaagggtatgaagctgatgacgttataggcacacttgtaaatagatttaaagcccaggatttagagattgtgataataaccggagacagagatacacttcagttacttgataaaaatgtaattgtcaaaatagtcacaacaaggtttgacaggacaactgaagatttgtatgctgtagaaaatgtaaaagaaaaatatggtgtttttgcgcatcaggttgttgactataaagcattagtaggtgatgcgtcagacaatataccaggtgttaagggaattggagataaaactgccataaagctgttagaagagtaccagactctggagaatatatatcagaatctaaataacattaaaggagcgctaaaagagaagttggaatcaggaaaagacatggcatttttatcaaaaagactggctactatcatatgcgatttaccaattgaggtgaatcttgaagaattaaaaaccaaagaatgggacaaagaaagactttatcagattttacttcaacttgagtttaaaagctttattaaaagactgggcttttcagaagagattaactatgcaaggcagaactttcagctacctgaatttagtattaaagaacttcgtgatgtttcagcaatagggggcaaagaaatctatctattgtactcagatgaagaaggacttttttatatttatgaccatcaaacctcaaccatttttacaacttctgataaggaagctattaaagatcttttaacactccaaagcattcaaaaggttgtatatgatttaaaaaatatactccataaggtggactttgatgaagctaatcagataaaaaattgtaatgatgttatgttggcttcatatgttttggacagtacacgcagttcgtacgatttggaaacattgtttatttcttatctcaacactgatatagctgcaatcaaagagaatagatgggctggtgctacagttttattaagaaatctttgggatgaactttcaaaactcattgatttaaactcggcccaatacgtttatgagagcatagagatgcctcttgttcccattttatatgaaatggagaaaatcggttttaaggttgacaaaaacactttgcaggagtatacaaaagagattgagagcaagcttttaaagttggaatcacagatttatcaaatagccggtgaatggtttaacataaactcgccaaaacaactctcatatatattattcgaaaaactgaagcttccggttgttaaaaagaccaaaacaggatattcaacagatgccgaggtattagaagagctgtatgataaacatgacataataccgcttattctggattatagaatgtatacgaaaatactgacaacttactgtcagggactggttcaggcaataaatcctgcaactggaagaattcataccaactttattcagacaggtacggcaactggaagacttgcaagtgcagagcccaatctgcaaaatattcctgtaaaatatgatgagggaaagctaataagaaaggcatttgttccagatgaaggttatgtgttgatagatgctgattattctcagattgagcttagaatacttgcacatatctctgaggatgaacgactgataaatgcttttaaaaataaccttgatattcattcacagacggcggcagagatctttggtgtggatataagtcaggttacaccaattatgcgaagccaggcaaaagcagttaactttggaattgtatatggtatatctgattatggactttcacgggatataaagatttcaagaaaagaagcagccgagtttattaatcgttattttgaaaagtatcccagagtaaaagaatatttggacaatgtcgtcaagtttgcccgtgaaaacggatttgttttgacaatatttaacaggaaaaggtatatcaaggatataaagtctactaataaaaacattagaaactatgcagagagaatagcaatgaattcacctatccagggaagtgctgcagatattatgaaaatagcaatgataagagtttataaaaagctaaaagaaaacaatttaaaatcaagaattattctgcaggtccatgacgaacttttgattgaatcaccctatgaagagaaagagatagtaaaggaaatagtaaaatcggagatggaaaatgcggttttattgaaagttcctttggtagttgaagtgaaagaaggttcaaattggtatgaaacaaagtaaaggatcc

SEQ ID NO: 1701 - DNA, 2623 bp, Artificial Sequence
  Description of Artificial Sequence: Synthetic DNA sequence of Caldicellulosiruptor TOK13B DNA Polymerase L778K
atgaaatacctgctgccgaccgctgctgctggtctgctgctcctcgctgcccagccggcgatggccatggaatttgttatttttgatgggaatagtattctgtatagagctttttttgccttgccacagcttactacctcaacaggcatacctacaaatgctatatatggttttttgaatgtgctgttaaaatacttagattctgaaaaaccggattatgtagcagtagcttttgacaaaaaaggcagagctgtccgaaaaagtgaatatgaagaatacaaggctaacagaaaaccgatgccagattctcttcaggttcagataccttacgtaagagaaatacttgctgctctgaacattcctgtactgaaatgtgaagggtatgaagctgatgacgttataggcacacttgtaaatagatttaaagcccaggatttagagattgtgataataaccggagacagagatacacttcagttacttgataaaaatgtaattgtcaaaatagtcacaacaaggtttgacaggacaactgaagatttgtatgctgtagaaaatgtaaaagaaaaatatggtgtttttgcgcatcaggttgttgactataaagcattagtaggtgatgcgtcagacaatataccaggtgttaagggaattggagataaaactgccataaagctgttagaagagtaccagactctggagaatatatatcagaatctaaataacattaaaggagcgctaaaagagaagttggaatcaggaaaagacatggcatttttatcaaaaagactggctactatcatatgcgatttaccaattgaggtgaatcttgaagaattaaaaaccaaagaatgggacaaagaaagactttatcagattttacttcaacttgagtttaaaagctttattaaaagactgggcttttcagaagagattaactatgcaaggcagaactttcagctacctgaatttagtattaaagaacttcgtgatgtttcagcaatagggggcaaagaaatctatctattgtactcagatgaagaaggacttttttatatttatgaccatcaaacctcaaccatttttacaacttctgataaggaagctattaaagatcttttaacactccaaagcattcaaaaggttgtatatgatttaaaaaatatactccataaggtggactttgatgaagctaatcagataaaaaattgtaatgatgttatgttggcttcatatgttttggacagtacacgcagttcgtacgatttggaaacattgtttatttcttatctcaacactgatatagctgcaatcaaagagaatagatgggctggtgctacagttttattaagaaatctttgggatgaactttcaaaactcattgatttaaactcggcccaatacgtttatgagagcatagagatgcctcttgttcccattttatatgaaatggagaaaatcggttttaaggttgacaaaaacactttgcaggagtatacaaaagagattgagagcaagcttttaaagttggaatcacagatttatcaaatagccggtgaatggtttaacataaactcgccaaaacaactctcatatatattattcgaaaaactgaagcttccggttgttaaaaagaccaaaacaggatattcaacagatgccgaggtattagaagagctgtatgataaacatgacataataccgcttattctggattatagaatgtatacgaaaatactgacaacttactgtcagggactggttcaggcaataaatcctgcaactggaagaattcataccaactttattcagacaggtacggcaactggaagacttgcaagtgcagagcccaatctgcaaaatattcctgtaaaatatgatgagggaaagctaataagaaaggcatttgttccagatgaaggttatgtgttgatagatgctgattattctcagattgagcttagaatacttgcacatatctctgaggatgaacgactgataaatgcttttaaaaataaccttgatattcattcacagacggcggcagagatctttggtgtggatataagtcaggttacaccaattatgcgaagccaggcaaaagcagttaactttggaattgtatatggtatatctgattatggactttcacgggatataaagatttcaagaaaagaagcagccgagtttattaatcgttattttgaaaagtatcccagagtaaaagaatatttggacaatgtcgtcaagtttgcccgtgaaaacggatttgttttgacaatatttaacaggaaaaggtatatcaaggatataaagtctactaataaaaacaaaagaaactatgcagagagaatagcaatgaattcacctatccagggaagtgctgcagatattatgaaaatagcaatgataagagtttataaaaagctaaaagaaaacaatttaaaatcaagaattattctgcaggtccatgacgaacttttgattgaatcaccctatgaagagaaagagatagtaaaggaaatagtaaaatcggagatggaaaatgcggttttattgaaagttcctttggtagttgaagtgaaagaaggttcaaattggtatgaaacaaagtaaaggatcc

SEQ ID NO: 1702 - DNA, 2623 bp, Artificial Sequence
  Description of Artificial Sequence: Synthetic DNA sequence of Caldicellulosiruptor TOK13B DNA Polymerase L778M
atgaaatacctgctgccgaccgctgctgctggtctgctgctcctcgctgcccagccggcgatggccatggaatttgttatttttgatgggaatagtattctgtatagagctttttttgccttgccacagcttactacctcaacaggcatacctacaaatgctatatatggttttttgaatgtgctgttaaaatacttagattctgaaaaaccggattatgtagcagtagcttttgacaaaaaaggcagagctgtccgaaaaagtgaatatgaagaatacaaggctaacagaaaaccgatgccagattctcttcaggttcagataccttacgtaagagaaatacttgctgctctgaacattcctgtactgaaatgtgaagggtatgaagctgatgacgttataggcacacttgtaaatagatttaaagcccaggatttagagattgtgataataaccggagacagagatacacttcagttacttgataaaaatgtaattgtcaaaatagtcacaacaaggtttgacaggacaactgaagatttgtatgctgtagaaaatgtaaaagaaaaatatggtgtttttgcgcatcaggttgttgactataaagcattagtaggtgatgcgtcagacaatataccaggtgttaagggaattggagataaaactgccataaagctgttagaagagtaccagactctggagaatatatatcagaatctaaataacattaaaggagcgctaaaagagaagttggaatcaggaaaagacatggcatttttatcaaaaagactggctactatcatatgcgatttaccaattgaggtgaatcttgaagaattaaaaaccaaagaatgggacaaagaaagactttatcagattttacttcaacttgagtttaaaagctttattaaaagactgggcttttcagaagagattaactatgcaaggcagaactttcagctacctgaatttagtattaaagaacttcgtgatgtttcagcaatagggggcaaagaaatctatctattgtactcagatgaagaaggacttttttatatttatgaccatcaaacctcaaccatttttacaacttctgataaggaagctattaaagatcttttaacactccaaagcattcaaaaggttgtatatgatttaaaaaatatactccataaggtggactttgatgaagctaatcagataaaaaattgtaatgatgttatgttggcttcatatgttttggacagtacacgcagttcgtacgatttggaaacattgtttatttcttatctcaacactgatatagctgcaatcaaagagaatagatgggctggtgctacagttttattaagaaatctttgggatgaactttcaaaactcattgatttaaactcggcccaatacgtttatgagagcatagagatgcctcttgttcccattttatatgaaatggagaaaatcggttttaaggttgacaaaaacactttgcaggagtatacaaaagagattgagagcaagcttttaaagttggaatcacagatttatcaaatagccggtgaatggtttaacataaactcgccaaaacaactctcatatatattattcgaaaaactgaagcttccggttgttaaaaagaccaaaacaggatattcaacagatgccgaggtattagaagagctgtatgataaacatgacataataccgcttattctggattatagaatgtatacgaaaatactgacaacttactgtcagggactggttcaggcaataaatcctgcaactggaagaattcataccaactttattcagacaggtacggcaactggaagacttgcaagtgcagagcccaatctgcaaaatattcctgtaaaatatgatgagggaaagctaataagaaaggcatttgttccagatgaaggttatgtgttgatagatgctgattattctcagattgagcttagaatacttgcacatatctctgaggatgaacgactgataaatgcttttaaaaataaccttgatattcattcacagacggcggcagagatctttggtgtggatataagtcaggttacaccaattatgcgaagccaggcaaaagcagttaactttggaattgtatatggtatatctgattatggactttcacgggatataaagatttcaagaaaagaagcagccgagtttattaatcgttattttgaaaagtatcccagagtaaaagaatatttggacaatgtcgtcaagtttgcccgtgaaaacggatttgttttgacaatatttaacaggaaaaggtatatcaaggatataaagtctactaataaaaacatgagaaactatgcagagagaatagcaatgaattcacctatccagggaagtgctgcagatattatgaaaatagcaatgataagagtttataaaaagctaaaagaaaacaatttaaaatcaagaattattctgcaggtccatgacgaacttttgattgaatcaccctatgaagagaaagagatagtaaaggaaatagtaaaatcggagatggaaaatgcggttttattgaaagttcctttggtagttgaagtgaaagaaggttcaaattggtatgaaacaaagtaaaggatcc

SEQ ID NO: 1703 - DNA, 2623 bp, Artificial Sequence
  Description of Artificial Sequence: Synthetic DNA sequence of Caldicellulosiruptor TOK13B DNA Polymerase L778F
atgaaatacctgctgccgaccgctgctgctggtctgctgctcctcgctgcccagccggcgatggccatggaatttgttatttttgatgggaatagtattctgtatagagctttttttgccttgccacagcttactacctcaacaggcatacctacaaatgctatatatggttttttgaatgtgctgttaaaatacttagattctgaaaaaccggattatgtagcagtagcttttgacaaaaaaggcagagctgtccgaaaaagtgaatatgaagaatacaaggctaacagaaaaccgatgccagattctcttcaggttcagataccttacgtaagagaaatacttgctgctctgaacattcctgtactgaaatgtgaagggtatgaagctgatgacgttataggcacacttgtaaatagatttaaagcccaggatttagagattgtgataataaccggagacagagatacacttcagttacttgataaaaatgtaattgtcaaaatagtcacaacaaggtttgacaggacaactgaagatttgtatgctgtagaaaatgtaaaagaaaaatatggtgtttttgcgcatcaggttgttgactataaagcattagtaggtgatgcgtcagacaatataccaggtgttaagggaattggagataaaactgccataaagctgttagaagagtaccagactctggagaatatatatcagaatctaaataacattaaaggagcgctaaaagagaagttggaatcaggaaaagacatggcatttttatcaaaaagactggctactatcatatgcgatttaccaattgaggtgaatcttgaagaattaaaaaccaaagaatgggacaaagaaagactttatcagattttacttcaacttgagtttaaaagctttattaaaagactgggcttttcagaagagattaactatgcaaggcagaactttcagctacctgaatttagtattaaagaacttcgtgatgtttcagcaatagggggcaaagaaatctatctattgtactcagatgaagaaggacttttttatatttatgaccatcaaacctcaaccatttttacaacttctgataaggaagctattaaagatcttttaacactccaaagcattcaaaaggttgtatatgatttaaaaaatatactccataaggtggactttgatgaagctaatcagataaaaaattgtaatgatgttatgttggcttcatatgttttggacagtacacgcagttcgtacgatttggaaacattgtttatttcttatctcaacactgatatagctgcaatcaaagagaatagatgggctggtgctacagttttattaagaaatctttgggatgaactttcaaaactcattgatttaaactcggcccaatacgtttatgagagcatagagatgcctcttgttcccattttatatgaaatggagaaaatcggttttaaggttgacaaaaacactttgcaggagtatacaaaagagattgagagcaagcttttaaagttggaatcacagatttatcaaatagccggtgaatggtttaacataaactcgccaaaacaactctcatatatattattcgaaaaactgaagcttccggttgttaaaaagaccaaaacaggatattcaacagatgccgaggtattagaagagctgtatgataaacatgacataataccgcttattctggattatagaatgtatacgaaaatactgacaacttactgtcagggactggttcaggcaataaatcctgcaactggaagaattcataccaactttattcagacaggtacggcaactggaagacttgcaagtgcagagcccaatctgcaaaatattcctgtaaaatatgatgagggaaagctaataagaaaggcatttgttccagatgaaggttatgtgttgatagatgctgattattctcagattgagcttagaatacttgcacatatctctgaggatgaacgactgataaatgcttttaaaaataaccttgatattcattcacagacggcggcagagatctttggtgtggatataagtcaggttacaccaattatgcgaagccaggcaaaagcagttaactttggaattgtatatggtatatctgattatggactttcacgggatataaagatttcaagaaaagaagcagccgagtttattaatcgttattttgaaaagtatcccagagtaaaagaatatttggacaatgtcgtcaagtttgcccgtgaaaacggatttgttttgacaatatttaacaggaaaaggtatatcaaggatataaagtctactaataaaaactttagaaactatgcagagagaatagcaatgaattcacctatccagggaagtgctgcagatattatgaaaatagcaatgataagagtttataaaaagctaaaagaaaacaatttaaaatcaagaattattctgcaggtccatgacgaacttttgattgaatcaccctatgaagagaaagagatagtaaaggaaatagtaaaatcggagatggaaaatgcggttttattgaaagttcctttggtagttgaagtgaaagaaggttcaaattggtatgaaacaaagtaaaggatcc

SEQ ID NO: 1704 - DNA, 2623 bp, Artificial Sequence
  Description of Artificial Sequence: Synthetic DNA sequence of Caldicellulosiruptor TOK13B DNA Polymerase L778P
atgaaatacctgctgccgaccgctgctgctggtctgctgctcctcgctgcccagccggcgatggccatggaatttgttatttttgatgggaatagtattctgtatagagctttttttgccttgccacagcttactacctcaacaggcatacctacaaatgctatatatggttttttgaatgtgctgttaaaatacttagattctgaaaaaccggattatgtagcagtagcttttgacaaaaaaggcagagctgtccgaaaaagtgaatatgaagaatacaaggctaacagaaaaccgatgccagattctcttcaggttcagataccttacgtaagagaaatacttgctgctctgaacattcctgtactgaaatgtgaagggtatgaagctgatgacgttataggcacacttgtaaatagatttaaagcccaggatttagagattgtgataataaccggagacagagatacacttcagttacttgataaaaatgtaattgtcaaaatagtcacaacaaggtttgacaggacaactgaagatttgtatgctgtagaaaatgtaaaagaaaaatatggtgtttttgcgcatcaggttgttgactataaagcattagtaggtgatgcgtcagacaatataccaggtgttaagggaattggagataaaactgccataaagctgttagaagagtaccagactctggagaatatatatcagaatctaaataacattaaaggagcgctaaaagagaagttggaatcaggaaaagacatggcatttttatcaaaaagactggctactatcatatgcgatttaccaattgaggtgaatcttgaagaattaaaaaccaaagaatgggacaaagaaagactttatcagattttacttcaacttgagtttaaaagctttattaaaagactgggcttttcagaagagattaactatgcaaggcagaactttcagctacctgaatttagtattaaagaacttcgtgatgtttcagcaatagggggcaaagaaatctatctattgtactcagatgaagaaggacttttttatatttatgaccatcaaacctcaaccatttttacaacttctgataaggaagctattaaagatcttttaacactccaaagcattcaaaaggttgtatatgatttaaaaaatatactccataaggtggactttgatgaagctaatcagataaaaaattgtaatgatgttatgttggcttcatatgttttggacagtacacgcagttcgtacgatttggaaacattgtttatttcttatctcaacactgatatagctgcaatcaaagagaatagatgggctggtgctacagttttattaagaaatctttgggatgaactttcaaaactcattgatttaaactcggcccaatacgtttatgagagcatagagatgcctcttgttcccattttatatgaaatggagaaaatcggttttaaggttgacaaaaacactttgcaggagtatacaaaagagattgagagcaagcttttaaagttggaatcacagatttatcaaatagccggtgaatggtttaacataaactcgccaaaacaactctcatatatattattcgaaaaactgaagcttccggttgttaaaaagaccaaaacaggatattcaacagatgccgaggtattagaagagctgtatgataaacatgacataataccgcttattctggattatagaatgtatacgaaaatactgacaacttactgtcagggactggttcaggcaataaatcctgcaactggaagaattcataccaactttattcagacaggtacggcaactggaagacttgcaagtgcagagcccaatctgcaaaatattcctgtaaaatatgatgagggaaagctaataagaaaggcatttgttccagatgaaggttatgtgttgatagatgctgattattctcagattgagcttagaatacttgcacatatctctgaggatgaacgactgataaatgcttttaaaaataaccttgatattcattcacagacggcggcagagatctttggtgtggatataagtcaggttacaccaattatgcgaagccaggcaaaagcagttaactttggaattgtatatggtatatctgattatggactttcacgggatataaagatttcaagaaaagaagcagccgagtttattaatcgttattttgaaaagtatcccagagtaaaagaatatttggacaatgtcgtcaagtttgcccgtgaaaacggatttgttttgacaatatttaacaggaaaaggtatatcaaggatataaagtctactaataaaaaccctagaaactatgcagagagaatagcaatgaattcacctatccagggaagtgctgcagatattatgaaaatagcaatgataagagtttataaaaagctaaaagaaaacaatttaaaatcaagaattattctgcaggtccatgacgaacttttgattgaatcaccctatgaagagaaagagatagtaaaggaaatagtaaaatcggagatggaaaatgcggttttattgaaagttcctttggtagttgaagtgaaagaaggttcaaattggtatgaaacaaagtaaaggatcc

SEQ ID NO: 1705 - DNA, 2623 bp, Artificial Sequence
  Description of Artificial Sequence: Synthetic DNA sequence of Caldicellulosiruptor TOK13B DNA Polymerase L778S
atgaaatacctgctgccgaccgctgctgctggtctgctgctcctcgctgcccagccggcgatggccatggaatttgttatttttgatgggaatagtattctgtatagagctttttttgccttgccacagcttactacctcaacaggcatacctacaaatgctatatatggttttttgaatgtgctgttaaaatacttagattctgaaaaaccggattatgtagcagtagcttttgacaaaaaaggcagagctgtccgaaaaagtgaatatgaagaatacaaggctaacagaaaaccgatgccagattctcttcaggttcagataccttacgtaagagaaatacttgctgctctgaacattcctgtactgaaatgtgaagggtatgaagctgatgacgttataggcacacttgtaaatagatttaaagcccaggatttagagattgtgataataaccggagacagagatacacttcagttacttgataaaaatgtaattgtcaaaatagtcacaacaaggtttgacaggacaactgaagatttgtatgctgtagaaaatgtaaaagaaaaatatggtgtttttgcgcatcaggttgttgactataaagcattagtaggtgatgcgtcagacaatataccaggtgttaagggaattggagataaaactgccataaagctgttagaagagtaccagactctggagaatatatatcagaatctaaataacattaaaggagcgctaaaagagaagttggaatcaggaaaagacatggcatttttatcaaaaagactggctactatcatatgcgatttaccaattgaggtgaatcttgaagaattaaaaaccaaagaatgggacaaagaaagactttatcagattttacttcaacttgagtttaaaagctttattaaaagactgggcttttcagaagagattaactatgcaaggcagaactttcagctacctgaatttagtattaaagaacttcgtgatgtttcagcaatagggggcaaagaaatctatctattgtactcagatgaagaaggacttttttatatttatgaccatcaaacctcaaccatttttacaacttctgataaggaagctattaaagatcttttaacactccaaagcattcaaaaggttgtatatgatttaaaaaatatactccataaggtggactttgatgaagctaatcagataaaaaattgtaatgatgttatgttggcttcatatgttttggacagtacacgcagttcgtacgatttggaaacattgtttatttcttatctcaacactgatatagctgcaatcaaagagaatagatgggctggtgctacagttttattaagaaatctttgggatgaactttcaaaactcattgatttaaactcggcccaatacgtttatgagagcatagagatgcctcttgttcccattttatatgaaatggagaaaatcggttttaaggttgacaaaaacactttgcaggagtatacaaaagagattgagagcaagcttttaaagttggaatcacagatttatcaaatagccggtgaatggtttaacataaactcgccaaaacaactctcatatatattattcgaaaaactgaagcttccggttgttaaaaagaccaaaacaggatattcaacagatgccgaggtattagaagagctgtatgataaacatgacataataccgcttattctggattatagaatgtatacgaaaatactgacaacttactgtcagggactggttcaggcaataaatcctgcaactggaagaattcataccaactttattcagacaggtacggcaactggaagacttgcaagtgcagagcccaatctgcaaaatattcctgtaaaatatgatgagggaaagctaataagaaaggcatttgttccagatgaaggttatgtgttgatagatgctgattattctcagattgagcttagaatacttgcacatatctctgaggatgaacgactgataaatgcttttaaaaataaccttgatattcattcacagacggcggcagagatctttggtgtggatataagtcaggttacaccaattatgcgaagccaggcaaaagcagttaactttggaattgtatatggtatatctgattatggactttcacgggatataaagatttcaagaaaagaagcagccgagtttattaatcgttattttgaaaagtatcccagagtaaaagaatatttggacaatgtcgtcaagtttgcccgtgaaaacggatttgttttgacaatatttaacaggaaaaggtatatcaaggatataaagtctactaataaaaactctagaaactatgcagagagaatagcaatgaattcacctatccagggaagtgctgcagatattatgaaaatagcaatgataagagtttataaaaagctaaaagaaaacaatttaaaatcaagaattattctgcaggtccatgacgaacttttgattgaatcaccctatgaagagaaagagatagtaaaggaaatagtaaaatcggagatggaaaatgcggttttattgaaagttcctttggtagttgaagtgaaagaaggttcaaattggtatgaaacaaagtaaaggatcc

SEQ ID NO: 1706 - DNA, 2623 bp, Artificial Sequence
  Description of Artificial Sequence: Synthetic DNA sequence of Caldicellulosiruptor TOK13B DNA Polymerase L778T
atgaaatacctgctgccgaccgctgctgctggtctgctgctcctcgctgcccagccggcgatggccatggaatttgttatttttgatgggaatagtattctgtatagagctttttttgccttgccacagcttactacctcaacaggcatacctacaaatgctatatatggttttttgaatgtgctgttaaaatacttagattctgaaaaaccggattatgtagcagtagcttttgacaaaaaaggcagagctgtccgaaaaagtgaatatgaagaatacaaggctaacagaaaaccgatgccagattctcttcaggttcagataccttacgtaagagaaatacttgctgctctgaacattcctgtactgaaatgtgaagggtatgaagctgatgacgttataggcacacttgtaaatagatttaaagcccaggatttagagattgtgataataaccggagacagagatacacttcagttacttgataaaaatgtaattgtcaaaatagtcacaacaaggtttgacaggacaactgaagatttgtatgctgtagaaaatgtaaaagaaaaatatggtgtttttgcgcatcaggttgttgactataaagcattagtaggtgatgcgtcagacaatataccaggtgttaagggaattggagataaaactgccataaagctgttagaagagtaccagactctggagaatatatatcagaatctaaataacattaaaggagcgctaaaagagaagttggaatcaggaaaagacatggcatttttatcaaaaagactggctactatcatatgcgatttaccaattgaggtgaatcttgaagaattaaaaaccaaagaatgggacaaagaaagactttatcagattttacttcaacttgagtttaaaagctttattaaaagactgggcttttcagaagagattaactatgcaaggcagaactttcagctacctgaatttagtattaaagaacttcgtgatgtttcagcaatagggggcaaagaaatctatctattgtactcagatgaagaaggacttttttatatttatgaccatcaaacctcaaccatttttacaacttctgataaggaagctattaaagatcttttaacactccaaagcattcaaaaggttgtatatgatttaaaaaatatactccataaggtggactttgatgaagctaatcagataaaaaattgtaatgatgttatgttggcttcatatgttttggacagtacacgcagttcgtacgatttggaaacattgtttatttcttatctcaacactgatatagctgcaatcaaagagaatagatgggctggtgctacagttttattaagaaatctttgggatgaactttcaaaactcattgatttaaactcggcccaatacgtttatgagagcatagagatgcctcttgttcccattttatatgaaatggagaaaatcggttttaaggttgacaaaaacactttgcaggagtatacaaaagagattgagagcaagcttttaaagttggaatcacagatttatcaaatagccggtgaatggtttaacataaactcgccaaaacaactctcatatatattattcgaaaaactgaagcttccggttgttaaaaagaccaaaacaggatattcaacagatgccgaggtattagaagagctgtatgataaacatgacataataccgcttattctggattatagaatgtatacgaaaatactgacaacttactgtcagggactggttcaggcaataaatcctgcaactggaagaattcataccaactttattcagacaggtacggcaactggaagacttgcaagtgcagagcccaatctgcaaaatattcctgtaaaatatgatgagggaaagctaataagaaaggcatttgttccagatgaaggttatgtgttgatagatgctgattattctcagattgagcttagaatacttgcacatatctctgaggatgaacgactgataaatgcttttaaaaataaccttgatattcattcacagacggcggcagagatctttggtgtggatataagtcaggttacaccaattatgcgaagccaggcaaaagcagttaactttggaattgtatatggtatatctgattatggactttcacgggatataaagatttcaagaaaagaagcagccgagtttattaatcgttattttgaaaagtatcccagagtaaaagaatatttggacaatgtcgtcaagtttgcccgtgaaaacggatttgttttgacaatatttaacaggaaaaggtatatcaaggatataaagtctactaataaaaacactagaaactatgcagagagaatagcaatgaattcacctatccagggaagtgctgcagatattatgaaaatagcaatgataagagtttataaaaagctaaaagaaaacaatttaaaatcaagaattattctgcaggtccatgacgaacttttgattgaatcaccctatgaagagaaagagatagtaaaggaaatagtaaaatcggagatggaaaatgcggttttattgaaagttcctttggtagttgaagtgaaagaaggttcaaattggtatgaaacaaagtaaaggatcc

SEQ ID NO: 1707 - DNA, 2623 bp, Artificial Sequence
  Description of Artificial Sequence: Synthetic DNA sequence of Caldicellulosiruptor TOK13B DNA Polymerase L778W
atgaaatacctgctgccgaccgctgctgctggtctgctgctcctcgctgcccagccggcgatggccatggaatttgttatttttgatgggaatagtattctgtatagagctttttttgccttgccacagcttactacctcaacaggcatacctacaaatgctatatatggttttttgaatgtgctgttaaaatacttagattctgaaaaaccggattatgtagcagtagcttttgacaaaaaaggcagagctgtccgaaaaagtgaatatgaagaatacaaggctaacagaaaaccgatgccagattctcttcaggttcagataccttacgtaagagaaatacttgctgctctgaacattcctgtactgaaatgtgaagggtatgaagctgatgacgttataggcacacttgtaaatagatttaaagcccaggatttagagattgtgataataaccggagacagagatacacttcagttacttgataaaaatgtaattgtcaaaatagtcacaacaaggtttgacaggacaactgaagatttgtatgctgtagaaaatgtaaaagaaaaatatggtgtttttgcgcatcaggttgttgactataaagcattagtaggtgatgcgtcagacaatataccaggtgttaagggaattggagataaaactgccataaagctgttagaagagtaccagactctggagaatatatatcagaatctaaataacattaaaggagcgctaaaagagaagttggaatcaggaaaagacatggcatttttatcaaaaagactggctactatcatatgcgatttaccaattgaggtgaatcttgaagaattaaaaaccaaagaatgggacaaagaaagactttatcagattttacttcaacttgagtttaaaagctttattaaaagactgggcttttcagaagagattaactatgcaaggcagaactttcagctacctgaatttagtattaaagaacttcgtgatgtttcagcaatagggggcaaagaaatctatctattgtactcagatgaagaaggacttttttatatttatgaccatcaaacctcaaccatttttacaacttctgataaggaagctattaaagatcttttaacactccaaagcattcaaaaggttgtatatgatttaaaaaatatactccataaggtggactttgatgaagctaatcagataaaaaattgtaatgatgttatgttggcttcatatgttttggacagtacacgcagttcgtacgatttggaaacattgtttatttcttatctcaacactgatatagctgcaatcaaagagaatagatgggctggtgctacagttttattaagaaatctttgggatgaactttcaaaactcattgatttaaactcggcccaatacgtttatgagagcatagagatgcctcttgttcccattttatatgaaatggagaaaatcggttttaaggttgacaaaaacactttgcaggagtatacaaaagagattgagagcaagcttttaaagttggaatcacagatttatcaaatagccggtgaatggtttaacataaactcgccaaaacaactctcatatatattattcgaaaaactgaagcttccggttgttaaaaagaccaaaacaggatattcaacagatgccgaggtattagaagagctgtatgataaacatgacataataccgcttattctggattatagaatgtatacgaaaatactgacaacttactgtcagggactggttcaggcaataaatcctgcaactggaagaattcataccaactttattcagacaggtacggcaactggaagacttgcaagtgcagagcccaatctgcaaaatattcctgtaaaatatgatgagggaaagctaataagaaaggcatttgttccagatgaaggttatgtgttgatagatgctgattattctcagattgagcttagaatacttgcacatatctctgaggatgaacgactgataaatgcttttaaaaataaccttgatattcattcacagacggcggcagagatctttggtgtggatataagtcaggttacaccaattatgcgaagccaggcaaaagcagttaactttggaattgtatatggtatatctgattatggactttcacgggatataaagatttcaagaaaagaagcagccgagtttattaatcgttattttgaaaagtatcccagagtaaaagaatatttggacaatgtcgtcaagtttgcccgtgaaaacggatttgttttgacaatatttaacaggaaaaggtatatcaaggatataaagtctactaataaaaactggagaaactatgcagagagaatagcaatgaattcacctatccagggaagtgctgcagatattatgaaaatagcaatgataagagtttataaaaagctaaaagaaaacaatttaaaatcaagaattattctgcaggtccatgacgaacttttgattgaatcaccctatgaagagaaagagatagtaaaggaaatagtaaaatcggagatggaaaatgcggttttattgaaagttcctttggtagttgaagtgaaagaaggttcaaattggtatgaaacaaagtaaaggatcc

SEQ ID NO: 1708 - DNA, 2623 bp, Artificial Sequence
  Description of Artificial Sequence: Synthetic DNA sequence of Caldicellulosiruptor TOK13B DNA Polymerase L778Y
atgaaatacctgctgccgaccgctgctgctggtctgctgctcctcgctgcccagccggcgatggccatggaatttgttatttttgatgggaatagtattctgtatagagctttttttgccttgccacagcttactacctcaacaggcatacctacaaatgctatatatggttttttgaatgtgctgttaaaatacttagattctgaaaaaccggattatgtagcagtagcttttgacaaaaaaggcagagctgtccgaaaaagtgaatatgaagaatacaaggctaacagaaaaccgatgccagattctcttcaggttcagataccttacgtaagagaaatacttgctgctctgaacattcctgtactgaaatgtgaagggtatgaagctgatgacgttataggcacacttgtaaatagatttaaagcccaggatttagagattgtgataataaccggagacagagatacacttcagttacttgataaaaatgtaattgtcaaaatagtcacaacaaggtttgacaggacaactgaagatttgtatgctgtagaaaatgtaaaagaaaaatatggtgtttttgcgcatcaggttgttgactataaagcattagtaggtgatgcgtcagacaatataccaggtgttaagggaattggagataaaactgccataaagctgttagaagagtaccagactctggagaatatatatcagaatctaaataacattaaaggagcgctaaaagagaagttggaatcaggaaaagacatggcatttttatcaaaaagactggctactatcatatgcgatttaccaattgaggtgaatcttgaagaattaaaaaccaaagaatgggacaaagaaagactttatcagattttacttcaacttgagtttaaaagctttattaaaagactgggcttttcagaagagattaactatgcaaggcagaactttcagctacctgaatttagtattaaagaacttcgtgatgtttcagcaatagggggcaaagaaatctatctattgtactcagatgaagaaggacttttttatatttatgaccatcaaacctcaaccatttttacaacttctgataaggaagctattaaagatcttttaacactccaaagcattcaaaaggttgtatatgatttaaaaaatatactccataaggtggactttgatgaagctaatcagataaaaaattgtaatgatgttatgttggcttcatatgttttggacagtacacgcagttcgtacgatttggaaacattgtttatttcttatctcaacactgatatagctgcaatcaaagagaatagatgggctggtgctacagttttattaagaaatctttgggatgaactttcaaaactcattgatttaaactcggcccaatacgtttatgagagcatagagatgcctcttgttcccattttatatgaaatggagaaaatcggttttaaggttgacaaaaacactttgcaggagtatacaaaagagattgagagcaagcttttaaagttggaatcacagatttatcaaatagccggtgaatggtttaacataaactcgccaaaacaactctcatatatattattcgaaaaactgaagcttccggttgttaaaaagaccaaaacaggatattcaacagatgccgaggtattagaagagctgtatgataaacatgacataataccgcttattctggattatagaatgtatacgaaaatactgacaacttactgtcagggactggttcaggcaataaatcctgcaactggaagaattcataccaactttattcagacaggtacggcaactggaagacttgcaagtgcagagcccaatctgcaaaatattcctgtaaaatatgatgagggaaagctaataagaaaggcatttgttccagatgaaggttatgtgttgatagatgctgattattctcagattgagcttagaatacttgcacatatctctgaggatgaacgactgataaatgcttttaaaaataaccttgatattcattcacagacggcggcagagatctttggtgtggatataagtcaggttacaccaattatgcgaagccaggcaaaagcagttaactttggaattgtatatggtatatctgattatggactttcacgggatataaagatttcaagaaaagaagcagccgagtttattaatcgttattttgaaaagtatcccagagtaaaagaatatttggacaatgtcgtcaagtttgcccgtgaaaacggatttgttttgacaatatttaacaggaaaaggtatatcaaggatataaagtctactaataaaaactatagaaactatgcagagagaatagcaatgaattcacctatccagggaagtgctgcagatattatgaaaatagcaatgataagagtttataaaaagctaaaagaaaacaatttaaaatcaagaattattctgcaggtccatgacgaacttttgattgaatcaccctatgaagagaaagagatagtaaaggaaatagtaaaatcggagatggaaaatgcggttttattgaaagttcctttggtagttgaagtgaaagaaggttcaaattggtatgaaacaaagtaaaggatcc

SEQ ID NO: 1709 - DNA, 2623 bp, Artificial Sequence
  Description of Artificial Sequence: Synthetic DNA sequence of Caldicellulosiruptor TOK13B DNA Polymerase L778V
atgaaatacctgctgccgaccgctgctgctggtctgctgctcctcgctgcccagccggcgatggccatggaatttgttatttttgatgggaatagtattctgtatagagctttttttgccttgccacagcttactacctcaacaggcatacctacaaatgctatatatggttttttgaatgtgctgttaaaatacttagattctgaaaaaccggattatgtagcagtagcttttgacaaaaaaggcagagctgtccgaaaaagtgaatatgaagaatacaaggctaacagaaaaccgatgccagattctcttcaggttcagataccttacgtaagagaaatacttgctgctctgaacattcctgtactgaaatgtgaagggtatgaagctgatgacgttataggcacacttgtaaatagatttaaagcccaggatttagagattgtgataataaccggagacagagatacacttcagttacttgataaaaatgtaattgtcaaaatagtcacaacaaggtttgacaggacaactgaagatttgtatgctgtagaaaatgtaaaagaaaaatatggtgtttttgcgcatcaggttgttgactataaagcattagtaggtgatgcgtcagacaatataccaggtgttaagggaattggagataaaactgccataaagctgttagaagagtaccagactctggagaatatatatcagaatctaaataacattaaaggagcgctaaaagagaagttggaatcaggaaaagacatggcatttttatcaaaaagactggctactatcatatgcgatttaccaattgaggtgaatcttgaagaattaaaaaccaaagaatgggacaaagaaagactttatcagattttacttcaacttgagtttaaaagctttattaaaagactgggcttttcagaagagattaactatgcaaggcagaactttcagctacctgaatttagtattaaagaacttcgtgatgtttcagcaatagggggcaaagaaatctatctattgtactcagatgaagaaggacttttttatatttatgaccatcaaacctcaaccatttttacaacttctgataaggaagctattaaagatcttttaacactccaaagcattcaaaaggttgtatatgatttaaaaaatatactccataaggtggactttgatgaagctaatcagataaaaaattgtaatgatgttatgttggcttcatatgttttggacagtacacgcagttcgtacgatttggaaacattgtttatttcttatctcaacactgatatagctgcaatcaaagagaatagatgggctggtgctacagttttattaagaaatctttgggatgaactttcaaaactcattgatttaaactcggcccaatacgtttatgagagcatagagatgcctcttgttcccattttatatgaaatggagaaaatcggttttaaggttgacaaaaacactttgcaggagtatacaaaagagattgagagcaagcttttaaagttggaatcacagatttatcaaatagccggtgaatggtttaacataaactcgccaaaacaactctcatatatattattcgaaaaactgaagcttccggttgttaaaaagaccaaaacaggatattcaacagatgccgaggtattagaagagctgtatgataaacatgacataataccgcttattctggattatagaatgtatacgaaaatactgacaacttactgtcagggactggttcaggcaataaatcctgcaactggaagaattcataccaactttattcagacaggtacggcaactggaagacttgcaagtgcagagcccaatctgcaaaatattcctgtaaaatatgatgagggaaagctaataagaaaggcatttgttccagatgaaggttatgtgttgatagatgctgattattctcagattgagcttagaatacttgcacatatctctgaggatgaacgactgataaatgcttttaaaaataaccttgatattcattcacagacggcggcagagatctttggtgtggatataagtcaggttacaccaattatgcgaagccaggcaaaagcagttaactttggaattgtatatggtatatctgattatggactttcacgggatataaagatttcaagaaaagaagcagccgagtttattaatcgttattttgaaaagtatcccagagtaaaagaatatttggacaatgtcgtcaagtttgcccgtgaaaacggatttgttttgacaatatttaacaggaaaaggtatatcaaggatataaagtctactaataaaaacgttagaaactatgcagagagaatagcaatgaattcacctatccagggaagtgctgcagatattatgaaaatagcaatgataagagtttataaaaagctaaaagaaaacaatttaaaatcaagaattattctgcaggtccatgacgaacttttgattgaatcaccctatgaagagaaagagatagtaaaggaaatagtaaaatcggagatggaaaatgcggttttattgaaagttcctttggtagttgaagtgaaagaaggttcaaattggtatgaaacaaagtaaaggatcc

SEQ ID NO: 1710 - DNA, 2623 bp, Artificial Sequence
  Description of Artificial Sequence: Synthetic DNA sequence of Caldicellulosiruptor TOK13B DNA Polymerase R779A
atgaaatacctgctgccgaccgctgctgctggtctgctgctcctcgctgcccagccggcgatggccatggaatttgttatttttgatgggaatagtattctgtatagagctttttttgccttgccacagcttactacctcaacaggcatacctacaaatgctatatatggttttttgaatgtgctgttaaaatacttagattctgaaaaaccggattatgtagcagtagcttttgacaaaaaaggcagagctgtccgaaaaagtgaatatgaagaatacaaggctaacagaaaaccgatgccagattctcttcaggttcagataccttacgtaagagaaatacttgctgctctgaacattcctgtactgaaatgtgaagggtatgaagctgatgacgttataggcacacttgtaaatagatttaaagcccaggatttagagattgtgataataaccggagacagagatacacttcagttacttgataaaaatgtaattgtcaaaatagtcacaacaaggtttgacaggacaactgaagatttgtatgctgtagaaaatgtaaaagaaaaatatggtgtttttgcgcatcaggttgttgactataaagcattagtaggtgatgcgtcagacaatataccaggtgttaagggaattggagataaaactgccataaagctgttagaagagtaccagactctggagaatatatatcagaatctaaataacattaaaggagcgctaaaagagaagttggaatcaggaaaagacatggcatttttatcaaaaagactggctactatcatatgcgatttaccaattgaggtgaatcttgaagaattaaaaaccaaagaatgggacaaagaaagactttatcagattttacttcaacttgagtttaaaagctttattaaaagactgggcttttcagaagagattaactatgcaaggcagaactttcagctacctgaatttagtattaaagaacttcgtgatgtttcagcaatagggggcaaagaaatctatctattgtactcagatgaagaaggacttttttatatttatgaccatcaaacctcaaccatttttacaacttctgataaggaagctattaaagatcttttaacactccaaagcattcaaaaggttgtatatgatttaaaaaatatactccataaggtggactttgatgaagctaatcagataaaaaattgtaatgatgttatgttggcttcatatgttttggacagtacacgcagttcgtacgatttggaaacattgtttatttcttatctcaacactgatatagctgcaatcaaagagaatagatgggctggtgctacagttttattaagaaatctttgggatgaactttcaaaactcattgatttaaactcggcccaatacgtttatgagagcatagagatgcctcttgttcccattttatatgaaatggagaaaatcggttttaaggttgacaaaaacactttgcaggagtatacaaaagagattgagagcaagcttttaaagttggaatcacagatttatcaaatagccggtgaatggtttaacataaactcgccaaaacaactctcatatatattattcgaaaaactgaagcttccggttgttaaaaagaccaaaacaggatattcaacagatgccgaggtattagaagagctgtatgataaacatgacataataccgcttattctggattatagaatgtatacgaaaatactgacaacttactgtcagggactggttcaggcaataaatcctgcaactggaagaattcataccaactttattcagacaggtacggcaactggaagacttgcaagtgcagagcccaatctgcaaaatattcctgtaaaatatgatgagggaaagctaataagaaaggcatttgttccagatgaaggttatgtgttgatagatgctgattattctcagattgagcttagaatacttgcacatatctctgaggatgaacgactgataaatgcttttaaaaataaccttgatattcattcacagacggcggcagagatctttggtgtggatataagtcaggttacaccaattatgcgaagccaggcaaaagcagttaactttggaattgtatatggtatatctgattatggactttcacgggatataaagatttcaagaaaagaagcagccgagtttattaatcgttattttgaaaagtatcccagagtaaaagaatatttggacaatgtcgtcaagtttgcccgtgaaaacggatttgttttgacaatatttaacaggaaaaggtatatcaaggatataaagtctactaataaaaacctggctaactatgcagagagaatagcaatgaattcacctatccagggaagtgctgcagatattatgaaaatagcaatgataagagtttataaaaagctaaaagaaaacaatttaaaatcaagaattattctgcaggtccatgacgaacttttgattgaatcaccctatgaagagaaagagatagtaaaggaaatagtaaaatcggagatggaaaatgcggttttattgaaagttcctttggtagttgaagtgaaagaaggttcaaattggtatgaaacaaagtaaaggatcc

SEQ ID NO: 1711 - DNA, 2623 bp, Artificial Sequence
  Description of Artificial Sequence: Synthetic DNA sequence of Caldicellulosiruptor TOK13B DNA Polymerase R779N
atgaaatacctgctgccgaccgctgctgctggtctgctgctcctcgctgcccagccggcgatggccatggaatttgttatttttgatgggaatagtattctgtatagagctttttttgccttgccacagcttactacctcaacaggcatacctacaaatgctatatatggttttttgaatgtgctgttaaaatacttagattctgaaaaaccggattatgtagcagtagcttttgacaaaaaaggcagagctgtccgaaaaagtgaatatgaagaatacaaggctaacagaaaaccgatgccagattctcttcaggttcagataccttacgtaagagaaatacttgctgctctgaacattcctgtactgaaatgtgaagggtatgaagctgatgacgttataggcacacttgtaaatagatttaaagcccaggatttagagattgtgataataaccggagacagagatacacttcagttacttgataaaaatgtaattgtcaaaatagtcacaacaaggtttgacaggacaactgaagatttgtatgctgtagaaaatgtaaaagaaaaatatggtgtttttgcgcatcaggttgttgactataaagcattagtaggtgatgcgtcagacaatataccaggtgttaagggaattggagataaaactgccataaagctgttagaagagtaccagactctggagaatatatatcagaatctaaataacattaaaggagcgctaaaagagaagttggaatcaggaaaagacatggcatttttatcaaaaagactggctactatcatatgcgatttaccaattgaggtgaatcttgaagaattaaaaaccaaagaatgggacaaagaaagactttatcagattttacttcaacttgagtttaaaagctttattaaaagactgggcttttcagaagagattaactatgcaaggcagaactttcagctacctgaatttagtattaaagaacttcgtgatgtttcagcaatagggggcaaagaaatctatctattgtactcagatgaagaaggacttttttatatttatgaccatcaaacctcaaccatttttacaacttctgataaggaagctattaaagatcttttaacactccaaagcattcaaaaggttgtatatgatttaaaaaatatactccataaggtggactttgatgaagctaatcagataaaaaattgtaatgatgttatgttggcttcatatgttttggacagtacacgcagttcgtacgatttggaaacattgtttatttcttatctcaacactgatatagctgcaatcaaagagaatagatgggctggtgctacagttttattaagaaatctttgggatgaactttcaaaactcattgatttaaactcggcccaatacgtttatgagagcatagagatgcctcttgttcccattttatatgaaatggagaaaatcggttttaaggttgacaaaaacactttgcaggagtatacaaaagagattgagagcaagcttttaaagttggaatcacagatttatcaaatagccggtgaatggtttaacataaactcgccaaaacaactctcatatatattattcgaaaaactgaagcttccggttgttaaaaagaccaaaacaggatattcaacagatgccgaggtattagaagagctgtatgataaacatgacataataccgcttattctggattatagaatgtatacgaaaatactgacaacttactgtcagggactggttcaggcaataaatcctgcaactggaagaattcataccaactttattcagacaggtacggcaactggaagacttgcaagtgcagagcccaatctgcaaaatattcctgtaaaatatgatgagggaaagctaataagaaaggcatttgttccagatgaaggttatgtgttgatagatgctgattattctcagattgagcttagaatacttgcacatatctctgaggatgaacgactgataaatgcttttaaaaataaccttgatattcattcacagacggcggcagagatctttggtgtggatataagtcaggttacaccaattatgcgaagccaggcaaaagcagttaactttggaattgtatatggtatatctgattatggactttcacgggatataaagatttcaagaaaagaagcagccgagtttattaatcgttattttgaaaagtatcccagagtaaaagaatatttggacaatgtcgtcaagtttgcccgtgaaaacggatttgttttgacaatatttaacaggaaaaggtatatcaaggatataaagtctactaataaaaacctgaataactatgcagagagaatagcaatgaattcacctatccagggaagtgctgcagatattatgaaaatagcaatgataagagtttataaaaagctaaaagaaaacaatttaaaatcaagaattattctgcaggtccatgacgaacttttgattgaatcaccctatgaagagaaagagatagtaaaggaaatagtaaaatcggagatggaaaatgcggttttattgaaagttcctttggtagttgaagtgaaagaaggttcaaattggtatgaaacaaagtaaaggatcc

SEQ ID NO: 1712 - DNA, 2623 bp, Artificial Sequence
  Description of Artificial Sequence: Synthetic DNA sequence of Caldicellulosiruptor TOK13B DNA Polymerase R779D
atgaaatacctgctgccgaccgctgctgctggtctgctgctcctcgctgcccagccggcgatggccatggaatttgttatttttgatgggaatagtattctgtatagagctttttttgccttgccacagcttactacctcaacaggcatacctacaaatgctatatatggttttttgaatgtgctgttaaaatacttagattctgaaaaaccggattatgtagcagtagcttttgacaaaaaaggcagagctgtccgaaaaagtgaatatgaagaatacaaggctaacagaaaaccgatgccagattctcttcaggttcagataccttacgtaagagaaatacttgctgctctgaacattcctgtactgaaatgtgaagggtatgaagctgatgacgttataggcacacttgtaaatagatttaaagcccaggatttagagattgtgataataaccggagacagagatacacttcagttacttgataaaaatgtaattgtcaaaatagtcacaacaaggtttgacaggacaactgaagatttgtatgctgtagaaaatgtaaaagaaaaatatggtgtttttgcgcatcaggttgttgactataaagcattagtaggtgatgcgtcagacaatataccaggtgttaagggaattggagataaaactgccataaagctgttagaagagtaccagactctggagaatatatatcagaatctaaataacattaaaggagcgctaaaagagaagttggaatcaggaaaagacatggcatttttatcaaaaagactggctactatcatatgcgatttaccaattgaggtgaatcttgaagaattaaaaaccaaagaatgggacaaagaaagactttatcagattttacttcaacttgagtttaaaagctttattaaaagactgggcttttcagaagagattaactatgcaaggcagaactttcagctacctgaatttagtattaaagaacttcgtgatgtttcagcaatagggggcaaagaaatctatctattgtactcagatgaagaaggacttttttatatttatgaccatcaaacctcaaccatttttacaacttctgataaggaagctattaaagatcttttaacactccaaagcattcaaaaggttgtatatgatttaaaaaatatactccataaggtggactttgatgaagctaatcagataaaaaattgtaatgatgttatgttggcttcatatgttttggacagtacacgcagttcgtacgatttggaaacattgtttatttcttatctcaacactgatatagctgcaatcaaagagaatagatgggctggtgctacagttttattaagaaatctttgggatgaactttcaaaactcattgatttaaactcggcccaatacgtttatgagagcatagagatgcctcttgttcccattttatatgaaatggagaaaatcggttttaaggttgacaaaaacactttgcaggagtatacaaaagagattgagagcaagcttttaaagttggaatcacagatttatcaaatagccggtgaatggtttaacataaactcgccaaaacaactctcatatatattattcgaaaaactgaagcttccggttgttaaaaagaccaaaacaggatattcaacagatgccgaggtattagaagagctgtatgataaacatgacataataccgcttattctggattatagaatgtatacgaaaatactgacaacttactgtcagggactggttcaggcaataaatcctgcaactggaagaattcataccaactttattcagacaggtacggcaactggaagacttgcaagtgcagagcccaatctgcaaaatattcctgtaaaatatgatgagggaaagctaataagaaaggcatttgttccagatgaaggttatgtgttgatagatgctgattattctcagattgagcttagaatacttgcacatatctctgaggatgaacgactgataaatgcttttaaaaataaccttgatattcattcacagacggcggcagagatctttggtgtggatataagtcaggttacaccaattatgcgaagccaggcaaaagcagttaactttggaattgtatatggtatatctgattatggactttcacgggatataaagatttcaagaaaagaagcagccgagtttattaatcgttattttgaaaagtatcccagagtaaaagaatatttggacaatgtcgtcaagtttgcccgtgaaaacggatttgttttgacaatatttaacaggaaaaggtatatcaaggatataaagtctactaataaaaacctggataactatgcagagagaatagcaatgaattcacctatccagggaagtgctgcagatattatgaaaatagcaatgataagagtttataaaaagctaaaagaaaacaatttaaaatcaagaattattctgcaggtccatgacgaacttttgattgaatcaccctatgaagagaaagagatagtaaaggaaatagtaaaatcggagatggaaaatgcggttttattgaaagttcctttggtagttgaagtgaaagaaggttcaaattggtatgaaacaaagtaaaggatcc

SEQ ID NO: 1713 - DNA, 2623 bp, Artificial Sequence
  Description of Artificial Sequence: Synthetic DNA sequence of Caldicellulosiruptor TOK13B DNA Polymerase R779C
atgaaatacctgctgccgaccgctgctgctggtctgctgctcctcgctgcccagccggcgatggccatggaatttgttatttttgatgggaatagtattctgtatagagctttttttgccttgccacagcttactacctcaacaggcatacctacaaatgctatatatggttttttgaatgtgctgttaaaatacttagattctgaaaaaccggattatgtagcagtagcttttgacaaaaaaggcagagctgtccgaaaaagtgaatatgaagaatacaaggctaacagaaaaccgatgccagattctcttcaggttcagataccttacgtaagagaaatacttgctgctctgaacattcctgtactgaaatgtgaagggtatgaagctgatgacgttataggcacacttgtaaatagatttaaagcccaggatttagagattgtgataataaccggagacagagatacacttcagttacttgataaaaatgtaattgtcaaaatagtcacaacaaggtttgacaggacaactgaagatttgtatgctgtagaaaatgtaaaagaaaaatatggtgtttttgcgcatcaggttgttgactataaagcattagtaggtgatgcgtcagacaatataccaggtgttaagggaattggagataaaactgccataaagctgttagaagagtaccagactctggagaatatatatcagaatctaaataacattaaaggagcgctaaaagagaagttggaatcaggaaaagacatggcatttttatcaaaaagactggctactatcatatgcgatttaccaattgaggtgaatcttgaagaattaaaaaccaaagaatgggacaaagaaagactttatcagattttacttcaacttgagtttaaaagctttattaaaagactgggcttttcagaagagattaactatgcaaggcagaactttcagctacctgaatttagtattaaagaacttcgtgatgtttcagcaatagggggcaaagaaatctatctattgtactcagatgaagaaggacttttttatatttatgaccatcaaacctcaaccatttttacaacttctgataaggaagctattaaagatcttttaacactccaaagcattcaaaaggttgtatatgatttaaaaaatatactccataaggtggactttgatgaagctaatcagataaaaaattgtaatgatgttatgttggcttcatatgttttggacagtacacgcagttcgtacgatttggaaacattgtttatttcttatctcaacactgatatagctgcaatcaaagagaatagatgggctggtgctacagttttattaagaaatctttgggatgaactttcaaaactcattgatttaaactcggcccaatacgtttatgagagcatagagatgcctcttgttcccattttatatgaaatggagaaaatcggttttaaggttgacaaaaacactttgcaggagtatacaaaagagattgagagcaagcttttaaagttggaatcacagatttatcaaatagccggtgaatggtttaacataaactcgccaaaacaactctcatatatattattcgaaaaactgaagcttccggttgttaaaaagaccaaaacaggatattcaacagatgccgaggtattagaagagctgtatgataaacatgacataataccgcttattctggattatagaatgtatacgaaaatactgacaacttactgtcagggactggttcaggcaataaatcctgcaactggaagaattcataccaactttattcagacaggtacggcaactggaagacttgcaagtgcagagcccaatctgcaaaatattcctgtaaaatatgatgagggaaagctaataagaaaggcatttgttccagatgaaggttatgtgttgatagatgctgattattctcagattgagcttagaatacttgcacatatctctgaggatgaacgactgataaatgcttttaaaaataaccttgatattcattcacagacggcggcagagatctttggtgtggatataagtcaggttacaccaattatgcgaagccaggcaaaagcagttaactttggaattgtatatggtatatctgattatggactttcacgggatataaagatttcaagaaaagaagcagccgagtttattaatcgttattttgaaaagtatcccagagtaaaagaatatttggacaatgtcgtcaagtttgcccgtgaaaacggatttgttttgacaatatttaacaggaaaaggtatatcaaggatataaagtctactaataaaaacctgtgtaactatgcagagagaatagcaatgaattcacctatccagggaagtgctgcagatattatgaaaatagcaatgataagagtttataaaaagctaaaagaaaacaatttaaaatcaagaattattctgcaggtccatgacgaacttttgattgaatcaccctatgaagagaaagagatagtaaaggaaatagtaaaatcggagatggaaaatgcggttttattgaaagttcctttggtagttgaagtgaaagaaggttcaaattggtatgaaacaaagtaaaggatcc

SEQ ID NO: 1714 - DNA, 2623 bp, Artificial Sequence
  Description of Artificial Sequence: Synthetic DNA sequence of Caldicellulosiruptor TOK13B DNA Polymerase R779E
atgaaatacctgctgccgaccgctgctgctggtctgctgctcctcgctgcccagccggcgatggccatggaatttgttatttttgatgggaatagtattctgtatagagctttttttgccttgccacagcttactacctcaacaggcatacctacaaatgctatatatggttttttgaatgtgctgttaaaatacttagattctgaaaaaccggattatgtagcagtagcttttgacaaaaaaggcagagctgtccgaaaaagtgaatatgaagaatacaaggctaacagaaaaccgatgccagattctcttcaggttcagataccttacgtaagagaaatacttgctgctctgaacattcctgtactgaaatgtgaagggtatgaagctgatgacgttataggcacacttgtaaatagatttaaagcccaggatttagagattgtgataataaccggagacagagatacacttcagttacttgataaaaatgtaattgtcaaaatagtcacaacaaggtttgacaggacaactgaagatttgtatgctgtagaaaatgtaaaagaaaaatatggtgtttttgcgcatcaggttgttgactataaagcattagtaggtgatgcgtcagacaatataccaggtgttaagggaattggagataaaactgccataaagctgttagaagagtaccagactctggagaatatatatcagaatctaaataacattaaaggagcgctaaaagagaagttggaatcaggaaaagacatggcatttttatcaaaaagactggctactatcatatgcgatttaccaattgaggtgaatcttgaagaattaaaaaccaaagaatgggacaaagaaagactttatcagattttacttcaacttgagtttaaaagctttattaaaagactgggcttttcagaagagattaactatgcaaggcagaactttcagctacctgaatttagtattaaagaacttcgtgatgtttcagcaatagggggcaaagaaatctatctattgtactcagatgaagaaggacttttttatatttatgaccatcaaacctcaaccatttttacaacttctgataaggaagctattaaagatcttttaacactccaaagcattcaaaaggttgtatatgatttaaaaaatatactccataaggtggactttgatgaagctaatcagataaaaaattgtaatgatgttatgttggcttcatatgttttggacagtacacgcagttcgtacgatttggaaacattgtttatttcttatctcaacactgatatagctgcaatcaaagagaatagatgggctggtgctacagttttattaagaaatctttgggatgaactttcaaaactcattgatttaaactcggcccaatacgtttatgagagcatagagatgcctcttgttcccattttatatgaaatggagaaaatcggttttaaggttgacaaaaacactttgcaggagtatacaaaagagattgagagcaagcttttaaagttggaatcacagatttatcaaatagccggtgaatggtttaacataaactcgccaaaacaactctcatatatattattcgaaaaactgaagcttccggttgttaaaaagaccaaaacaggatattcaacagatgccgaggtattagaagagctgtatgataaacatgacataataccgcttattctggattatagaatgtatacgaaaatactgacaacttactgtcagggactggttcaggcaataaatcctgcaactggaagaattcataccaactttattcagacaggtacggcaactggaagacttgcaagtgcagagcccaatctgcaaaatattcctgtaaaatatgatgagggaaagctaataagaaaggcatttgttccagatgaaggttatgtgttgatagatgctgattattctcagattgagcttagaatacttgcacatatctctgaggatgaacgactgataaatgcttttaaaaataaccttgatattcattcacagacggcggcagagatctttggtgtggatataagtcaggttacaccaattatgcgaagccaggcaaaagcagttaactttggaattgtatatggtatatctgattatggactttcacgggatataaagatttcaagaaaagaagcagccgagtttattaatcgttattttgaaaagtatcccagagtaaaagaatatttggacaatgtcgtcaagtttgcccgtgaaaacggatttgttttgacaatatttaacaggaaaaggtatatcaaggatataaagtctactaataaaaacctggaaaactatgcagagagaatagcaatgaattcacctatccagggaagtgctgcagatattatgaaaatagcaatgataagagtttataaaaagctaaaagaaaacaatttaaaatcaagaattattctgcaggtccatgacgaacttttgattgaatcaccctatgaagagaaagagatagtaaaggaaatagtaaaatcggagatggaaaatgcggttttattgaaagttcctttggtagttgaagtgaaagaaggttcaaattggtatgaaacaaagtaaaggatcc

SEQ ID NO: 1715 - DNA, 2623 bp, Artificial Sequence
  Description of Artificial Sequence: Synthetic DNA sequence of Caldicellulosiruptor TOK13B DNA Polymerase R779Q
atgaaatacctgctgccgaccgctgctgctggtctgctgctcctcgctgcccagccggcgatggccatggaatttgttatttttgatgggaatagtattctgtatagagctttttttgccttgccacagcttactacctcaacaggcatacctacaaatgctatatatggttttttgaatgtgctgttaaaatacttagattctgaaaaaccggattatgtagcagtagcttttgacaaaaaaggcagagctgtccgaaaaagtgaatatgaagaatacaaggctaacagaaaaccgatgccagattctcttcaggttcagataccttacgtaagagaaatacttgctgctctgaacattcctgtactgaaatgtgaagggtatgaagctgatgacgttataggcacacttgtaaatagatttaaagcccaggatttagagattgtgataataaccggagacagagatacacttcagttacttgataaaaatgtaattgtcaaaatagtcacaacaaggtttgacaggacaactgaagatttgtatgctgtagaaaatgtaaaagaaaaatatggtgtttttgcgcatcaggttgttgactataaagcattagtaggtgatgcgtcagacaatataccaggtgttaagggaattggagataaaactgccataaagctgttagaagagtaccagactctggagaatatatatcagaatctaaataacattaaaggagcgctaaaagagaagttggaatcaggaaaagacatggcatttttatcaaaaagactggctactatcatatgcgatttaccaattgaggtgaatcttgaagaattaaaaaccaaagaatgggacaaagaaagactttatcagattttacttcaacttgagtttaaaagctttattaaaagactgggcttttcagaagagattaactatgcaaggcagaactttcagctacctgaatttagtattaaagaacttcgtgatgtttcagcaatagggggcaaagaaatctatctattgtactcagatgaagaaggacttttttatatttatgaccatcaaacctcaaccatttttacaacttctgataaggaagctattaaagatcttttaacactccaaagcattcaaaaggttgtatatgatttaaaaaatatactccataaggtggactttgatgaagctaatcagataaaaaattgtaatgatgttatgttggcttcatatgttttggacagtacacgcagttcgtacgatttggaaacattgtttatttcttatctcaacactgatatagctgcaatcaaagagaatagatgggctggtgctacagttttattaagaaatctttgggatgaactttcaaaactcattgatttaaactcggcccaatacgtttatgagagcatagagatgcctcttgttcccattttatatgaaatggagaaaatcggttttaaggttgacaaaaacactttgcaggagtatacaaaagagattgagagcaagcttttaaagttggaatcacagatttatcaaatagccggtgaatggtttaacataaactcgccaaaacaactctcatatatattattcgaaaaactgaagcttccggttgttaaaaagaccaaaacaggatattcaacagatgccgaggtattagaagagctgtatgataaacatgacataataccgcttattctggattatagaatgtatacgaaaatactgacaacttactgtcagggactggttcaggcaataaatcctgcaactggaagaattcataccaactttattcagacaggtacggcaactggaagacttgcaagtgcagagcccaatctgcaaaatattcctgtaaaatatgatgagggaaagctaataagaaaggcatttgttccagatgaaggttatgtgttgatagatgctgattattctcagattgagcttagaatacttgcacatatctctgaggatgaacgactgataaatgcttttaaaaataaccttgatattcattcacagacggcggcagagatctttggtgtggatataagtcaggttacaccaattatgcgaagccaggcaaaagcagttaactttggaattgtatatggtatatctgattatggactttcacgggatataaagatttcaagaaaagaagcagccgagtttattaatcgttattttgaaaagtatcccagagtaaaagaatatttggacaatgtcgtcaagtttgcccgtgaaaacggatttgttttgacaatatttaacaggaaaaggtatatcaaggatataaagtctactaataaaaacctgcaaaactatgcagagagaatagcaatgaattcacctatccagggaagtgctgcagatattatgaaaatagcaatgataagagtttataaaaagctaaaagaaaacaatttaaaatcaagaattattctgcaggtccatgacgaacttttgattgaatcaccctatgaagagaaagagatagtaaaggaaatagtaaaatcggagatggaaaatgcggttttattgaaagttcctttggtagttgaagtgaaagaaggttcaaattggtatgaaacaaagtaaaggatcc

SEQ ID NO: 1716 - DNA, 2623 bp, Artificial Sequence
  Description of Artificial Sequence: Synthetic DNA sequence of Caldicellulosiruptor TOK13B DNA Polymerase R779G
atgaaatacctgctgccgaccgctgctgctggtctgctgctcctcgctgcccagccggcgatggccatggaatttgttatttttgatgggaatagtattctgtatagagctttttttgccttgccacagcttactacctcaacaggcatacctacaaatgctatatatggttttttgaatgtgctgttaaaatacttagattctgaaaaaccggattatgtagcagtagcttttgacaaaaaaggcagagctgtccgaaaaagtgaatatgaagaatacaaggctaacagaaaaccgatgccagattctcttcaggttcagataccttacgtaagagaaatacttgctgctctgaacattcctgtactgaaatgtgaagggtatgaagctgatgacgttataggcacacttgtaaatagatttaaagcccaggatttagagattgtgataataaccggagacagagatacacttcagttacttgataaaaatgtaattgtcaaaatagtcacaacaaggtttgacaggacaactgaagatttgtatgctgtagaaaatgtaaaagaaaaatatggtgtttttgcgcatcaggttgttgactataaagcattagtaggtgatgcgtcagacaatataccaggtgttaagggaattggagataaaactgccataaagctgttagaagagtaccagactctggagaatatatatcagaatctaaataacattaaaggagcgctaaaagagaagttggaatcaggaaaagacatggcatttttatcaaaaagactggctactatcatatgcgatttaccaattgaggtgaatcttgaagaattaaaaaccaaagaatgggacaaagaaagactttatcagattttacttcaacttgagtttaaaagctttattaaaagactgggcttttcagaagagattaactatgcaaggcagaactttcagctacctgaatttagtattaaagaacttcgtgatgtttcagcaatagggggcaaagaaatctatctattgtactcagatgaagaaggacttttttatatttatgaccatcaaacctcaaccatttttacaacttctgataaggaagctattaaagatcttttaacactccaaagcattcaaaaggttgtatatgatttaaaaaatatactccataaggtggactttgatgaagctaatcagataaaaaattgtaatgatgttatgttggcttcatatgttttggacagtacacgcagttcgtacgatttggaaacattgtttatttcttatctcaacactgatatagctgcaatcaaagagaatagatgggctggtgctacagttttattaagaaatctttgggatgaactttcaaaactcattgatttaaactcggcccaatacgtttatgagagcatagagatgcctcttgttcccattttatatgaaatggagaaaatcggttttaaggttgacaaaaacactttgcaggagtatacaaaagagattgagagcaagcttttaaagttggaatcacagatttatcaaatagccggtgaatggtttaacataaactcgccaaaacaactctcatatatattattcgaaaaactgaagcttccggttgttaaaaagaccaaaacaggatattcaacagatgccgaggtattagaagagctgtatgataaacatgacataataccgcttattctggattatagaatgtatacgaaaatactgacaacttactgtcagggactggttcaggcaataaatcctgcaactggaagaattcataccaactttattcagacaggtacggcaactggaagacttgcaagtgcagagcccaatctgcaaaatattcctgtaaaatatgatgagggaaagctaataagaaaggcatttgttccagatgaaggttatgtgttgatagatgctgattattctcagattgagcttagaatacttgcacatatctctgaggatgaacgactgataaatgcttttaaaaataaccttgatattcattcacagacggcggcagagatctttggtgtggatataagtcaggttacaccaattatgcgaagccaggcaaaagcagttaactttggaattgtatatggtatatctgattatggactttcacgggatataaagatttcaagaaaagaagcagccgagtttattaatcgttattttgaaaagtatcccagagtaaaagaatatttggacaatgtcgtcaagtttgcccgtgaaaacggatttgttttgacaatatttaacaggaaaaggtatatcaaggatataaagtctactaataaaaacctgggtaactatgcagagagaatagcaatgaattcacctatccagggaagtgctgcagatattatgaaaatagcaatgataagagtttataaaaagctaaaagaaaacaatttaaaatcaagaattattctgcaggtccatgacgaacttttgattgaatcaccctatgaagagaaagagatagtaaaggaaatagtaaaatcggagatggaaaatgcggttttattgaaagttcctttggtagttgaagtgaaagaaggttcaaattggtatgaaacaaagtaaaggatcc

SEQ ID NO: 1717 - DNA, 2623 bp, Artificial Sequence
  Description of Artificial Sequence: Synthetic DNA sequence of Caldicellulosiruptor TOK13B DNA Polymerase R779H
atgaaatacctgctgccgaccgctgctgctggtctgctgctcctcgctgcccagccggcgatggccatggaatttgttatttttgatgggaatagtattctgtatagagctttttttgccttgccacagcttactacctcaacaggcatacctacaaatgctatatatggttttttgaatgtgctgttaaaatacttagattctgaaaaaccggattatgtagcagtagcttttgacaaaaaaggcagagctgtccgaaaaagtgaatatgaagaatacaaggctaacagaaaaccgatgccagattctcttcaggttcagataccttacgtaagagaaatacttgctgctctgaacattcctgtactgaaatgtgaagggtatgaagctgatgacgttataggcacacttgtaaatagatttaaagcccaggatttagagattgtgataataaccggagacagagatacacttcagttacttgataaaaatgtaattgtcaaaatagtcacaacaaggtttgacaggacaactgaagatttgtatgctgtagaaaatgtaaaagaaaaatatggtgtttttgcgcatcaggttgttgactataaagcattagtaggtgatgcgtcagacaatataccaggtgttaagggaattggagataaaactgccataaagctgttagaagagtaccagactctggagaatatatatcagaatctaaataacattaaaggagcgctaaaagagaagttggaatcaggaaaagacatggcatttttatcaaaaagactggctactatcatatgcgatttaccaattgaggtgaatcttgaagaattaaaaaccaaagaatgggacaaagaaagactttatcagattttacttcaacttgagtttaaaagctttattaaaagactgggcttttcagaagagattaactatgcaaggcagaactttcagctacctgaatttagtattaaagaacttcgtgatgtttcagcaatagggggcaaagaaatctatctattgtactcagatgaagaaggacttttttatatttatgaccatcaaacctcaaccatttttacaacttctgataaggaagctattaaagatcttttaacactccaaagcattcaaaaggttgtatatgatttaaaaaatatactccataaggtggactttgatgaagctaatcagataaaaaattgtaatgatgttatgttggcttcatatgttttggacagtacacgcagttcgtacgatttggaaacattgtttatttcttatctcaacactgatatagctgcaatcaaagagaatagatgggctggtgctacagttttattaagaaatctttgggatgaactttcaaaactcattgatttaaactcggcccaatacgtttatgagagcatagagatgcctcttgttcccattttatatgaaatggagaaaatcggttttaaggttgacaaaaacactttgcaggagtatacaaaagagattgagagcaagcttttaaagttggaatcacagatttatcaaatagccggtgaatggtttaacataaactcgccaaaacaactctcatatatattattcgaaaaactgaagcttccggttgttaaaaagaccaaaacaggatattcaacagatgccgaggtattagaagagctgtatgataaacatgacataataccgcttattctggattatagaatgtatacgaaaatactgacaacttactgtcagggactggttcaggcaataaatcctgcaactggaagaattcataccaactttattcagacaggtacggcaactggaagacttgcaagtgcagagcccaatctgcaaaatattcctgtaaaatatgatgagggaaagctaataagaaaggcatttgttccagatgaaggttatgtgttgatagatgctgattattctcagattgagcttagaatacttgcacatatctctgaggatgaacgactgataaatgcttttaaaaataaccttgatattcattcacagacggcggcagagatctttggtgtggatataagtcaggttacaccaattatgcgaagccaggcaaaagcagttaactttggaattgtatatggtatatctgattatggactttcacgggatataaagatttcaagaaaagaagcagccgagtttattaatcgttattttgaaaagtatcccagagtaaaagaatatttggacaatgtcgtcaagtttgcccgtgaaaacggatttgttttgacaatatttaacaggaaaaggtatatcaaggatataaagtctactaataaaaacctgcataactatgcagagagaatagcaatgaattcacctatccagggaagtgctgcagatattatgaaaatagcaatgataagagtttataaaaagctaaaagaaaacaatttaaaatcaagaattattctgcaggtccatgacgaacttttgattgaatcaccctatgaagagaaagagatagtaaaggaaatagtaaaatcggagatggaaaatgcggttttattgaaagttcctttggtagttgaagtgaaagaaggttcaaattggtatgaaacaaagtaaaggatcc

SEQ ID NO: 1718 - DNA, 2623 bp, Artificial Sequence
  Description of Artificial Sequence: Synthetic DNA sequence of Caldicellulosiruptor TOK13B DNA Polymerase R779I
atgaaatacctgctgccgaccgctgctgctggtctgctgctcctcgctgcccagccggcgatggccatggaatttgttatttttgatgggaatagtattctgtatagagctttttttgccttgccacagcttactacctcaacaggcatacctacaaatgctatatatggttttttgaatgtgctgttaaaatacttagattctgaaaaaccggattatgtagcagtagcttttgacaaaaaaggcagagctgtccgaaaaagtgaatatgaagaatacaaggctaacagaaaaccgatgccagattctcttcaggttcagataccttacgtaagagaaatacttgctgctctgaacattcctgtactgaaatgtgaagggtatgaagctgatgacgttataggcacacttgtaaatagatttaaagcccaggatttagagattgtgataataaccggagacagagatacacttcagttacttgataaaaatgtaattgtcaaaatagtcacaacaaggtttgacaggacaactgaagatttgtatgctgtagaaaatgtaaaagaaaaatatggtgtttttgcgcatcaggttgttgactataaagcattagtaggtgatgcgtcagacaatataccaggtgttaagggaattggagataaaactgccataaagctgttagaagagtaccagactctggagaatatatatcagaatctaaataacattaaaggagcgctaaaagagaagttggaatcaggaaaagacatggcatttttatcaaaaagactggctactatcatatgcgatttaccaattgaggtgaatcttgaagaattaaaaaccaaagaatgggacaaagaaagactttatcagattttacttcaacttgagtttaaaagctttattaaaagactgggcttttcagaagagattaactatgcaaggcagaactttcagctacctgaatttagtattaaagaacttcgtgatgtttcagcaatagggggcaaagaaatctatctattgtactcagatgaagaaggacttttttatatttatgaccatcaaacctcaaccatttttacaacttctgataaggaagctattaaagatcttttaacactccaaagcattcaaaaggttgtatatgatttaaaaaatatactccataaggtggactttgatgaagctaatcagataaaaaattgtaatgatgttatgttggcttcatatgttttggacagtacacgcagttcgtacgatttggaaacattgtttatttcttatctcaacactgatatagctgcaatcaaagagaatagatgggctggtgctacagttttattaagaaatctttgggatgaactttcaaaactcattgatttaaactcggcccaatacgtttatgagagcatagagatgcctcttgttcccattttatatgaaatggagaaaatcggttttaaggttgacaaaaacactttgcaggagtatacaaaagagattgagagcaagcttttaaagttggaatcacagatttatcaaatagccggtgaatggtttaacataaactcgccaaaacaactctcatatatattattcgaaaaactgaagcttccggttgttaaaaagaccaaaacaggatattcaacagatgccgaggtattagaagagctgtatgataaacatgacataataccgcttattctggattatagaatgtatacgaaaatactgacaacttactgtcagggactggttcaggcaataaatcctgcaactggaagaattcataccaactttattcagacaggtacggcaactggaagacttgcaagtgcagagcccaatctgcaaaatattcctgtaaaatatgatgagggaaagctaataagaaaggcatttgttccagatgaaggttatgtgttgatagatgctgattattctcagattgagcttagaatacttgcacatatctctgaggatgaacgactgataaatgcttttaaaaataaccttgatattcattcacagacggcggcagagatctttggtgtggatataagtcaggttacaccaattatgcgaagccaggcaaaagcagttaactttggaattgtatatggtatatctgattatggactttcacgggatataaagatttcaagaaaagaagcagccgagtttattaatcgttattttgaaaagtatcccagagtaaaagaatatttggacaatgtcgtcaagtttgcccgtgaaaacggatttgttttgacaatatttaacaggaaaaggtatatcaaggatataaagtctactaataaaaacctgattaactatgcagagagaatagcaatgaattcacctatccagggaagtgctgcagatattatgaaaatagcaatgataagagtttataaaaagctaaaagaaaacaatttaaaatcaagaattattctgcaggtccatgacgaacttttgattgaatcaccctatgaagagaaagagatagtaaaggaaatagtaaaatcggagatggaaaatgcggttttattgaaagttcctttggtagttgaagtgaaagaaggttcaaattggtatgaaacaaagtaaaggatcc

SEQ ID NO: 1719 - DNA, 2623 bp, Artificial Sequence
  Description of Artificial Sequence: Synthetic DNA sequence of Caldicellulosiruptor TOK13B DNA Polymerase R779L
atgaaatacctgctgccgaccgctgctgctggtctgctgctcctcgctgcccagccggcgatggccatggaatttgttatttttgatgggaatagtattctgtatagagctttttttgccttgccacagcttactacctcaacaggcatacctacaaatgctatatatggttttttgaatgtgctgttaaaatacttagattctgaaaaaccggattatgtagcagtagcttttgacaaaaaaggcagagctgtccgaaaaagtgaatatgaagaatacaaggctaacagaaaaccgatgccagattctcttcaggttcagataccttacgtaagagaaatacttgctgctctgaacattcctgtactgaaatgtgaagggtatgaagctgatgacgttataggcacacttgtaaatagatttaaagcccaggatttagagattgtgataataaccggagacagagatacacttcagttacttgataaaaatgtaattgtcaaaatagtcacaacaaggtttgacaggacaactgaagatttgtatgctgtagaaaatgtaaaagaaaaatatggtgtttttgcgcatcaggttgttgactataaagcattagtaggtgatgcgtcagacaatataccaggtgttaagggaattggagataaaactgccataaagctgttagaagagtaccagactctggagaatatatatcagaatctaaataacattaaaggagcgctaaaagagaagttggaatcaggaaaagacatggcatttttatcaaaaagactggctactatcatatgcgatttaccaattgaggtgaatcttgaagaattaaaaaccaaagaatgggacaaagaaagactttatcagattttacttcaacttgagtttaaaagctttattaaaagactgggcttttcagaagagattaactatgcaaggcagaactttcagctacctgaatttagtattaaagaacttcgtgatgtttcagcaatagggggcaaagaaatctatctattgtactcagatgaagaaggacttttttatatttatgaccatcaaacctcaaccatttttacaacttctgataaggaagctattaaagatcttttaacactccaaagcattcaaaaggttgtatatgatttaaaaaatatactccataaggtggactttgatgaagctaatcagataaaaaattgtaatgatgttatgttggcttcatatgttttggacagtacacgcagttcgtacgatttggaaacattgtttatttcttatctcaacactgatatagctgcaatcaaagagaatagatgggctggtgctacagttttattaagaaatctttgggatgaactttcaaaactcattgatttaaactcggcccaatacgtttatgagagcatagagatgcctcttgttcccattttatatgaaatggagaaaatcggttttaaggttgacaaaaacactttgcaggagtatacaaaagagattgagagcaagcttttaaagttggaatcacagatttatcaaatagccggtgaatggtttaacataaactcgccaaaacaactctcatatatattattcgaaaaactgaagcttccggttgttaaaaagaccaaaacaggatattcaacagatgccgaggtattagaagagctgtatgataaacatgacataataccgcttattctggattatagaatgtatacgaaaatactgacaacttactgtcagggactggttcaggcaataaatcctgcaactggaagaattcataccaactttattcagacaggtacggcaactggaagacttgcaagtgcagagcccaatctgcaaaatattcctgtaaaatatgatgagggaaagctaataagaaaggcatttgttccagatgaaggttatgtgttgatagatgctgattattctcagattgagcttagaatacttgcacatatctctgaggatgaacgactgataaatgcttttaaaaataaccttgatattcattcacagacggcggcagagatctttggtgtggatataagtcaggttacaccaattatgcgaagccaggcaaaagcagttaactttggaattgtatatggtatatctgattatggactttcacgggatataaagatttcaagaaaagaagcagccgagtttattaatcgttattttgaaaagtatcccagagtaaaagaatatttggacaatgtcgtcaagtttgcccgtgaaaacggatttgttttgacaatatttaacaggaaaaggtatatcaaggatataaagtctactaataaaaacctgcttaactatgcagagagaatagcaatgaattcacctatccagggaagtgctgcagatattatgaaaatagcaatgataagagtttataaaaagctaaaagaaaacaatttaaaatcaagaattattctgcaggtccatgacgaacttttgattgaatcaccctatgaagagaaagagatagtaaaggaaatagtaaaatcggagatggaaaatgcggttttattgaaagttcctttggtagttgaagtgaaagaaggttcaaattggtatgaaacaaagtaaaggatcc

SEQ ID NO: 1720 - DNA, 2623 bp, Artificial Sequence
  Description of Artificial Sequence: Synthetic DNA sequence of Caldicellulosiruptor TOK13B DNA Polymerase R779K
atgaaatacctgctgccgaccgctgctgctggtctgctgctcctcgctgcccagccggcgatggccatggaatttgttatttttgatgggaatagtattctgtatagagctttttttgccttgccacagcttactacctcaacaggcatacctacaaatgctatatatggttttttgaatgtgctgttaaaatacttagattctgaaaaaccggattatgtagcagtagcttttgacaaaaaaggcagagctgtccgaaaaagtgaatatgaagaatacaaggctaacagaaaaccgatgccagattctcttcaggttcagataccttacgtaagagaaatacttgctgctctgaacattcctgtactgaaatgtgaagggtatgaagctgatgacgttataggcacacttgtaaatagatttaaagcccaggatttagagattgtgataataaccggagacagagatacacttcagttacttgataaaaatgtaattgtcaaaatagtcacaacaaggtttgacaggacaactgaagatttgtatgctgtagaaaatgtaaaagaaaaatatggtgtttttgcgcatcaggttgttgactataaagcattagtaggtgatgcgtcagacaatataccaggtgttaagggaattggagataaaactgccataaagctgttagaagagtaccagactctggagaatatatatcagaatctaaataacattaaaggagcgctaaaagagaagttggaatcaggaaaagacatggcatttttatcaaaaagactggctactatcatatgcgatttaccaattgaggtgaatcttgaagaattaaaaaccaaagaatgggacaaagaaagactttatcagattttacttcaacttgagtttaaaagctttattaaaagactgggcttttcagaagagattaactatgcaaggcagaactttcagctacctgaatttagtattaaagaacttcgtgatgtttcagcaatagggggcaaagaaatctatctattgtactcagatgaagaaggacttttttatatttatgaccatcaaacctcaaccatttttacaacttctgataaggaagctattaaagatcttttaacactccaaagcattcaaaaggttgtatatgatttaaaaaatatactccataaggtggactttgatgaagctaatcagataaaaaattgtaatgatgttatgttggcttcatatgttttggacagtacacgcagttcgtacgatttggaaacattgtttatttcttatctcaacactgatatagctgcaatcaaagagaatagatgggctggtgctacagttttattaagaaatctttgggatgaactttcaaaactcattgatttaaactcggcccaatacgtttatgagagcatagagatgcctcttgttcccattttatatgaaatggagaaaatcggttttaaggttgacaaaaacactttgcaggagtatacaaaagagattgagagcaagcttttaaagttggaatcacagatttatcaaatagccggtgaatggtttaacataaactcgccaaaacaactctcatatatattattcgaaaaactgaagcttccggttgttaaaaagaccaaaacaggatattcaacagatgccgaggtattagaagagctgtatgataaacatgacataataccgcttattctggattatagaatgtatacgaaaatactgacaacttactgtcagggactggttcaggcaataaatcctgcaactggaagaattcataccaactttattcagacaggtacggcaactggaagacttgcaagtgcagagcccaatctgcaaaatattcctgtaaaatatgatgagggaaagctaataagaaaggcatttgttccagatgaaggttatgtgttgatagatgctgattattctcagattgagcttagaatacttgcacatatctctgaggatgaacgactgataaatgcttttaaaaataaccttgatattcattcacagacggcggcagagatctttggtgtggatataagtcaggttacaccaattatgcgaagccaggcaaaagcagttaactttggaattgtatatggtatatctgattatggactttcacgggatataaagatttcaagaaaagaagcagccgagtttattaatcgttattttgaaaagtatcccagagtaaaagaatatttggacaatgtcgtcaagtttgcccgtgaaaacggatttgttttgacaatatttaacaggaaaaggtatatcaaggatataaagtctactaataaaaacctgaaaaactatgcagagagaatagcaatgaattcacctatccagggaagtgctgcagatattatgaaaatagcaatgataagagtttataaaaagctaaaagaaaacaatttaaaatcaagaattattctgcaggtccatgacgaacttttgattgaatcaccctatgaagagaaagagatagtaaaggaaatagtaaaatcggagatggaaaatgcggttttattgaaagttcctttggtagttgaagtgaaagaaggttcaaattggtatgaaacaaagtaaaggatcc

SEQ ID NO: 1721 - DNA, 2623 bp, Artificial Sequence
  Description of Artificial Sequence: Synthetic DNA sequence of Caldicellulosiruptor TOK13B DNA Polymerase R779M
atgaaatacctgctgccgaccgctgctgctggtctgctgctcctcgctgcccagccggcgatggccatggaatttgttatttttgatgggaatagtattctgtatagagctttttttgccttgccacagcttactacctcaacaggcatacctacaaatgctatatatggttttttgaatgtgctgttaaaatacttagattctgaaaaaccggattatgtagcagtagcttttgacaaaaaaggcagagctgtccgaaaaagtgaatatgaagaatacaaggctaacagaaaaccgatgccagattctcttcaggttcagataccttacgtaagagaaatacttgctgctctgaacattcctgtactgaaatgtgaagggtatgaagctgatgacgttataggcacacttgtaaatagatttaaagcccaggatttagagattgtgataataaccggagacagagatacacttcagttacttgataaaaatgtaattgtcaaaatagtcacaacaaggtttgacaggacaactgaagatttgtatgctgtagaaaatgtaaaagaaaaatatggtgtttttgcgcatcaggttgttgactataaagcattagtaggtgatgcgtcagacaatataccaggtgttaagggaattggagataaaactgccataaagctgttagaagagtaccagactctggagaatatatatcagaatctaaataacattaaaggagcgctaaaagagaagttggaatcaggaaaagacatggcatttttatcaaaaagactggctactatcatatgcgatttaccaattgaggtgaatcttgaagaattaaaaaccaaagaatgggacaaagaaagactttatcagattttacttcaacttgagtttaaaagctttattaaaagactgggcttttcagaagagattaactatgcaaggcagaactttcagctacctgaatttagtattaaagaacttcgtgatgtttcagcaatagggggcaaagaaatctatctattgtactcagatgaagaaggacttttttatatttatgaccatcaaacctcaaccatttttacaacttctgataaggaagctattaaagatcttttaacactccaaagcattcaaaaggttgtatatgatttaaaaaatatactccataaggtggactttgatgaagctaatcagataaaaaattgtaatgatgttatgttggcttcatatgttttggacagtacacgcagttcgtacgatttggaaacattgtttatttcttatctcaacactgatatagctgcaatcaaagagaatagatgggctggtgctacagttttattaagaaatctttgggatgaactttcaaaactcattgatttaaactcggcccaatacgtttatgagagcatagagatgcctcttgttcccattttatatgaaatggagaaaatcggttttaaggttgacaaaaacactttgcaggagtatacaaaagagattgagagcaagcttttaaagttggaatcacagatttatcaaatagccggtgaatggtttaacataaactcgccaaaacaactctcatatatattattcgaaaaactgaagcttccggttgttaaaaagaccaaaacaggatattcaacagatgccgaggtattagaagagctgtatgataaacatgacataataccgcttattctggattatagaatgtatacgaaaatactgacaacttactgtcagggactggttcaggcaataaatcctgcaactggaagaattcataccaactttattcagacaggtacggcaactggaagacttgcaagtgcagagcccaatctgcaaaatattcctgtaaaatatgatgagggaaagctaataagaaaggcatttgttccagatgaaggttatgtgttgatagatgctgattattctcagattgagcttagaatacttgcacatatctctgaggatgaacgactgataaatgcttttaaaaataaccttgatattcattcacagacggcggcagagatctttggtgtggatataagtcaggttacaccaattatgcgaagccaggcaaaagcagttaactttggaattgtatatggtatatctgattatggactttcacgggatataaagatttcaagaaaagaagcagccgagtttattaatcgttattttgaaaagtatcccagagtaaaagaatatttggacaatgtcgtcaagtttgcccgtgaaaacggatttgttttgacaatatttaacaggaaaaggtatatcaaggatataaagtctactaataaaaacctgatgaactatgcagagagaatagcaatgaattcacctatccagggaagtgctgcagatattatgaaaatagcaatgataagagtttataaaaagctaaaagaaaacaatttaaaatcaagaattattctgcaggtccatgacgaacttttgattgaatcaccctatgaagagaaagagatagtaaaggaaatagtaaaatcggagatggaaaatgcggttttattgaaagttcctttggtagttgaagtgaaagaaggttcaaattggtatgaaacaaagtaaaggatcc

SEQ ID NO: 1722 - DNA, 2623 bp, Artificial Sequence
  Description of Artificial Sequence: Synthetic DNA sequence of Caldicellulosiruptor TOK13B DNA Polymerase R779F
atgaaatacctgctgccgaccgctgctgctggtctgctgctcctcgctgcccagccggcgatggccatggaatttgttatttttgatgggaatagtattctgtatagagctttttttgccttgccacagcttactacctcaacaggcatacctacaaatgctatatatggttttttgaatgtgctgttaaaatacttagattctgaaaaaccggattatgtagcagtagcttttgacaaaaaaggcagagctgtccgaaaaagtgaatatgaagaatacaaggctaacagaaaaccgatgccagattctcttcaggttcagataccttacgtaagagaaatacttgctgctctgaacattcctgtactgaaatgtgaagggtatgaagctgatgacgttataggcacacttgtaaatagatttaaagcccaggatttagagattgtgataataaccggagacagagatacacttcagttacttgataaaaatgtaattgtcaaaatagtcacaacaaggtttgacaggacaactgaagatttgtatgctgtagaaaatgtaaaagaaaaatatggtgtttttgcgcatcaggttgttgactataaagcattagtaggtgatgcgtcagacaatataccaggtgttaagggaattggagataaaactgccataaagctgttagaagagtaccagactctggagaatatatatcagaatctaaataacattaaaggagcgctaaaagagaagttggaatcaggaaaagacatggcatttttatcaaaaagactggctactatcatatgcgatttaccaattgaggtgaatcttgaagaattaaaaaccaaagaatgggacaaagaaagactttatcagattttacttcaacttgagtttaaaagctttattaaaagactgggcttttcagaagagattaactatgcaaggcagaactttcagctacctgaatttagtattaaagaacttcgtgatgtttcagcaatagggggcaaagaaatctatctattgtactcagatgaagaaggacttttttatatttatgaccatcaaacctcaaccatttttacaacttctgataaggaagctattaaagatcttttaacactccaaagcattcaaaaggttgtatatgatttaaaaaatatactccataaggtggactttgatgaagctaatcagataaaaaattgtaatgatgttatgttggcttcatatgttttggacagtacacgcagttcgtacgatttggaaacattgtttatttcttatctcaacactgatatagctgcaatcaaagagaatagatgggctggtgctacagttttattaagaaatctttgggatgaactttcaaaactcattgatttaaactcggcccaatacgtttatgagagcatagagatgcctcttgttcccattttatatgaaatggagaaaatcggttttaaggttgacaaaaacactttgcaggagtatacaaaagagattgagagcaagcttttaaagttggaatcacagatttatcaaatagccggtgaatggtttaacataaactcgccaaaacaactctcatatatattattcgaaaaactgaagcttccggttgttaaaaagaccaaaacaggatattcaacagatgccgaggtattagaagagctgtatgataaacatgacataataccgcttattctggattatagaatgtatacgaaaatactgacaacttactgtcagggactggttcaggcaataaatcctgcaactggaagaattcataccaactttattcagacaggtacggcaactggaagacttgcaagtgcagagcccaatctgcaaaatattcctgtaaaatatgatgagggaaagctaataagaaaggcatttgttccagatgaaggttatgtgttgatagatgctgattattctcagattgagcttagaatacttgcacatatctctgaggatgaacgactgataaatgcttttaaaaataaccttgatattcattcacagacggcggcagagatctttggtgtggatataagtcaggttacaccaattatgcgaagccaggcaaaagcagttaactttggaattgtatatggtatatctgattatggactttcacgggatataaagatttcaagaaaagaagcagccgagtttattaatcgttattttgaaaagtatcccagagtaaaagaatatttggacaatgtcgtcaagtttgcccgtgaaaacggatttgttttgacaatatttaacaggaaaaggtatatcaaggatataaagtctactaataaaaacctgtttaactatgcagagagaatagcaatgaattcacctatccagggaagtgctgcagatattatgaaaatagcaatgataagagtttataaaaagctaaaagaaaacaatttaaaatcaagaattattctgcaggtccatgacgaacttttgattgaatcaccctatgaagagaaagagatagtaaaggaaatagtaaaatcggagatggaaaatgcggttttattgaaagttcctttggtagttgaagtgaaagaaggttcaaattggtatgaaacaaagtaaaggatcc

SEQ ID NO: 1723 - DNA, 2623 bp, Artificial Sequence
  Description of Artificial Sequence: Synthetic DNA sequence of Caldicellulosiruptor TOK13B DNA Polymerase R779P
atgaaatacctgctgccgaccgctgctgctggtctgctgctcctcgctgcccagccggcgatggccatggaatttgttatttttgatgggaatagtattctgtatagagctttttttgccttgccacagcttactacctcaacaggcatacctacaaatgctatatatggttttttgaatgtgctgttaaaatacttagattctgaaaaaccggattatgtagcagtagcttttgacaaaaaaggcagagctgtccgaaaaagtgaatatgaagaatacaaggctaacagaaaaccgatgccagattctcttcaggttcagataccttacgtaagagaaatacttgctgctctgaacattcctgtactgaaatgtgaagggtatgaagctgatgacgttataggcacacttgtaaatagatttaaagcccaggatttagagattgtgataataaccggagacagagatacacttcagttacttgataaaaatgtaattgtcaaaatagtcacaacaaggtttgacaggacaactgaagatttgtatgctgtagaaaatgtaaaagaaaaatatggtgtttttgcgcatcaggttgttgactataaagcattagtaggtgatgcgtcagacaatataccaggtgttaagggaattggagataaaactgccataaagctgttagaagagtaccagactctggagaatatatatcagaatctaaataacattaaaggagcgctaaaagagaagttggaatcaggaaaagacatggcatttttatcaaaaagactggctactatcatatgcgatttaccaattgaggtgaatcttgaagaattaaaaaccaaagaatgggacaaagaaagactttatcagattttacttcaacttgagtttaaaagctttattaaaagactgggcttttcagaagagattaactatgcaaggcagaactttcagctacctgaatttagtattaaagaacttcgtgatgtttcagcaatagggggcaaagaaatctatctattgtactcagatgaagaaggacttttttatatttatgaccatcaaacctcaaccatttttacaacttctgataaggaagctattaaagatcttttaacactccaaagcattcaaaaggttgtatatgatttaaaaaatatactccataaggtggactttgatgaagctaatcagataaaaaattgtaatgatgttatgttggcttcatatgttttggacagtacacgcagttcgtacgatttggaaacattgtttatttcttatctcaacactgatatagctgcaatcaaagagaatagatgggctggtgctacagttttattaagaaatctttgggatgaactttcaaaactcattgatttaaactcggcccaatacgtttatgagagcatagagatgcctcttgttcccattttatatgaaatggagaaaatcggttttaaggttgacaaaaacactttgcaggagtatacaaaagagattgagagcaagcttttaaagttggaatcacagatttatcaaatagccggtgaatggtttaacataaactcgccaaaacaactctcatatatattattcgaaaaactgaagcttccggttgttaaaaagaccaaaacaggatattcaacagatgccgaggtattagaagagctgtatgataaacatgacataataccgcttattctggattatagaatgtatacgaaaatactgacaacttactgtcagggactggttcaggcaataaatcctgcaactggaagaattcataccaactttattcagacaggtacggcaactggaagacttgcaagtgcagagcccaatctgcaaaatattcctgtaaaatatgatgagggaaagctaataagaaaggcatttgttccagatgaaggttatgtgttgatagatgctgattattctcagattgagcttagaatacttgcacatatctctgaggatgaacgactgataaatgcttttaaaaataaccttgatattcattcacagacggcggcagagatctttggtgtggatataagtcaggttacaccaattatgcgaagccaggcaaaagcagttaactttggaattgtatatggtatatctgattatggactttcacgggatataaagatttcaagaaaagaagcagccgagtttattaatcgttattttgaaaagtatcccagagtaaaagaatatttggacaatgtcgtcaagtttgcccgtgaaaacggatttgttttgacaatatttaacaggaaaaggtatatcaaggatataaagtctactaataaaaacctgcctaactatgcagagagaatagcaatgaattcacctatccagggaagtgctgcagatattatgaaaatagcaatgataagagtttataaaaagctaaaagaaaacaatttaaaatcaagaattattctgcaggtccatgacgaacttttgattgaatcaccctatgaagagaaagagatagtaaaggaaatagtaaaatcggagatggaaaatgcggttttattgaaagttcctttggtagttgaagtgaaagaaggttcaaattggtatgaaacaaagtaaaggatcc

SEQ ID NO: 1724 - DNA, 2623 bp, Artificial Sequence
  Description of Artificial Sequence: Synthetic DNA sequence of Caldicellulosiruptor TOK13B DNA Polymerase R779S
atgaaatacctgctgccgaccgctgctgctggtctgctgctcctcgctgcccagccggcgatggccatggaatttgttatttttgatgggaatagtattctgtatagagctttttttgccttgccacagcttactacctcaacaggcatacctacaaatgctatatatggttttttgaatgtgctgttaaaatacttagattctgaaaaaccggattatgtagcagtagcttttgacaaaaaaggcagagctgtccgaaaaagtgaatatgaagaatacaaggctaacagaaaaccgatgccagattctcttcaggttcagataccttacgtaagagaaatacttgctgctctgaacattcctgtactgaaatgtgaagggtatgaagctgatgacgttataggcacacttgtaaatagatttaaagcccaggatttagagattgtgataataaccggagacagagatacacttcagttacttgataaaaatgtaattgtcaaaatagtcacaacaaggtttgacaggacaactgaagatttgtatgctgtagaaaatgtaaaagaaaaatatggtgtttttgcgcatcaggttgttgactataaagcattagtaggtgatgcgtcagacaatataccaggtgttaagggaattggagataaaactgccataaagctgttagaagagtaccagactctggagaatatatatcagaatctaaataacattaaaggagcgctaaaagagaagttggaatcaggaaaagacatggcatttttatcaaaaagactggctactatcatatgcgatttaccaattgaggtgaatcttgaagaattaaaaaccaaagaatgggacaaagaaagactttatcagattttacttcaacttgagtttaaaagctttattaaaagactgggcttttcagaagagattaactatgcaaggcagaactttcagctacctgaatttagtattaaagaacttcgtgatgtttcagcaatagggggcaaagaaatctatctattgtactcagatgaagaaggacttttttatatttatgaccatcaaacctcaaccatttttacaacttctgataaggaagctattaaagatcttttaacactccaaagcattcaaaaggttgtatatgatttaaaaaatatactccataaggtggactttgatgaagctaatcagataaaaaattgtaatgatgttatgttggcttcatatgttttggacagtacacgcagttcgtacgatttggaaacattgtttatttcttatctcaacactgatatagctgcaatcaaagagaatagatgggctggtgctacagttttattaagaaatctttgggatgaactttcaaaactcattgatttaaactcggcccaatacgtttatgagagcatagagatgcctcttgttcccattttatatgaaatggagaaaatcggttttaaggttgacaaaaacactttgcaggagtatacaaaagagattgagagcaagcttttaaagttggaatcacagatttatcaaatagccggtgaatggtttaacataaactcgccaaaacaactctcatatatattattcgaaaaactgaagcttccggttgttaaaaagaccaaaacaggatattcaacagatgccgaggtattagaagagctgtatgataaacatgacataataccgcttattctggattatagaatgtatacgaaaatactgacaacttactgtcagggactggttcaggcaataaatcctgcaactggaagaattcataccaactttattcagacaggtacggcaactggaagacttgcaagtgcagagcccaatctgcaaaatattcctgtaaaatatgatgagggaaagctaataagaaaggcatttgttccagatgaaggttatgtgttgatagatgctgattattctcagattgagcttagaatacttgcacatatctctgaggatgaacgactgataaatgcttttaaaaataaccttgatattcattcacagacggcggcagagatctttggtgtggatataagtcaggttacaccaattatgcgaagccaggcaaaagcagttaactttggaattgtatatggtatatctgattatggactttcacgggatataaagatttcaagaaaagaagcagccgagtttattaatcgttattttgaaaagtatcccagagtaaaagaatatttggacaatgtcgtcaagtttgcccgtgaaaacggatttgttttgacaatatttaacaggaaaaggtatatcaaggatataaagtctactaataaaaacctgtctaactatgcagagagaatagcaatgaattcacctatccagggaagtgctgcagatattatgaaaatagcaatgataagagtttataaaaagctaaaagaaaacaatttaaaatcaagaattattctgcaggtccatgacgaacttttgattgaatcaccctatgaagagaaagagatagtaaaggaaatagtaaaatcggagatggaaaatgcggttttattgaaagttcctttggtagttgaagtgaaagaaggttcaaattggtatgaaacaaagtaaaggatcc

SEQ ID NO: 1725 - DNA, 2623 bp, Artificial Sequence
  Description of Artificial Sequence: Synthetic DNA sequence of Caldicellulosiruptor TOK13B DNA Polymerase R779T
atgaaatacctgctgccgaccgctgctgctggtctgctgctcctcgctgcccagccggcgatggccatggaatttgttatttttgatgggaatagtattctgtatagagctttttttgccttgccacagcttactacctcaacaggcatacctacaaatgctatatatggttttttgaatgtgctgttaaaatacttagattctgaaaaaccggattatgtagcagtagcttttgacaaaaaaggcagagctgtccgaaaaagtgaatatgaagaatacaaggctaacagaaaaccgatgccagattctcttcaggttcagataccttacgtaagagaaatacttgctgctctgaacattcctgtactgaaatgtgaagggtatgaagctgatgacgttataggcacacttgtaaatagatttaaagcccaggatttagagattgtgataataaccggagacagagatacacttcagttacttgataaaaatgtaattgtcaaaatagtcacaacaaggtttgacaggacaactgaagatttgtatgctgtagaaaatgtaaaagaaaaatatggtgtttttgcgcatcaggttgttgactataaagcattagtaggtgatgcgtcagacaatataccaggtgttaagggaattggagataaaactgccataaagctgttagaagagtaccagactctggagaatatatatcagaatctaaataacattaaaggagcgctaaaagagaagttggaatcaggaaaagacatggcatttttatcaaaaagactggctactatcatatgcgatttaccaattgaggtgaatcttgaagaattaaaaaccaaagaatgggacaaagaaagactttatcagattttacttcaacttgagtttaaaagctttattaaaagactgggcttttcagaagagattaactatgcaaggcagaactttcagctacctgaatttagtattaaagaacttcgtgatgtttcagcaatagggggcaaagaaatctatctattgtactcagatgaagaaggacttttttatatttatgaccatcaaacctcaaccatttttacaacttctgataaggaagctattaaagatcttttaacactccaaagcattcaaaaggttgtatatgatttaaaaaatatactccataaggtggactttgatgaagctaatcagataaaaaattgtaatgatgttatgttggcttcatatgttttggacagtacacgcagttcgtacgatttggaaacattgtttatttcttatctcaacactgatatagctgcaatcaaagagaatagatgggctggtgctacagttttattaagaaatctttgggatgaactttcaaaactcattgatttaaactcggcccaatacgtttatgagagcatagagatgcctcttgttcccattttatatgaaatggagaaaatcggttttaaggttgacaaaaacactttgcaggagtatacaaaagagattgagagcaagcttttaaagttggaatcacagatttatcaaatagccggtgaatggtttaacataaactcgccaaaacaactctcatatatattattcgaaaaactgaagcttccggttgttaaaaagaccaaaacaggatattcaacagatgccgaggtattagaagagctgtatgataaacatgacataataccgcttattctggattatagaatgtatacgaaaatactgacaacttactgtcagggactggttcaggcaataaatcctgcaactggaagaattcataccaactttattcagacaggtacggcaactggaagacttgcaagtgcagagcccaatctgcaaaatattcctgtaaaatatgatgagggaaagctaataagaaaggcatttgttccagatgaaggttatgtgttgatagatgctgattattctcagattgagcttagaatacttgcacatatctctgaggatgaacgactgataaatgcttttaaaaataaccttgatattcattcacagacggcggcagagatctttggtgtggatataagtcaggttacaccaattatgcgaagccaggcaaaagcagttaactttggaattgtatatggtatatctgattatggactttcacgggatataaagatttcaagaaaagaagcagccgagtttattaatcgttattttgaaaagtatcccagagtaaaagaatatttggacaatgtcgtcaagtttgcccgtgaaaacggatttgttttgacaatatttaacaggaaaaggtatatcaaggatataaagtctactaataaaaacctgactaactatgcagagagaatagcaatgaattcacctatccagggaagtgctgcagatattatgaaaatagcaatgataagagtttataaaaagctaaaagaaaacaatttaaaatcaagaattattctgcaggtccatgacgaacttttgattgaatcaccctatgaagagaaagagatagtaaaggaaatagtaaaatcggagatggaaaatgcggttttattgaaagttcctttggtagttgaagtgaaagaaggttcaaattggtatgaaacaaagtaaaggatcc

SEQ ID NO: 1726 - DNA, 2623 bp, Artificial Sequence
  Description of Artificial Sequence: Synthetic DNA sequence of Caldicellulosiruptor TOK13B DNA Polymerase R779W
atgaaatacctgctgccgaccgctgctgctggtctgctgctcctcgctgcccagccggcgatggccatggaatttgttatttttgatgggaatagtattctgtatagagctttttttgccttgccacagcttactacctcaacaggcatacctacaaatgctatatatggttttttgaatgtgctgttaaaatacttagattctgaaaaaccggattatgtagcagtagcttttgacaaaaaaggcagagctgtccgaaaaagtgaatatgaagaatacaaggctaacagaaaaccgatgccagattctcttcaggttcagataccttacgtaagagaaatacttgctgctctgaacattcctgtactgaaatgtgaagggtatgaagctgatgacgttataggcacacttgtaaatagatttaaagcccaggatttagagattgtgataataaccggagacagagatacacttcagttacttgataaaaatgtaattgtcaaaatagtcacaacaaggtttgacaggacaactgaagatttgtatgctgtagaaaatgtaaaagaaaaatatggtgtttttgcgcatcaggttgttgactataaagcattagtaggtgatgcgtcagacaatataccaggtgttaagggaattggagataaaactgccataaagctgttagaagagtaccagactctggagaatatatatcagaatctaaataacattaaaggagcgctaaaagagaagttggaatcaggaaaagacatggcatttttatcaaaaagactggctactatcatatgcgatttaccaattgaggtgaatcttgaagaattaaaaaccaaagaatgggacaaagaaagactttatcagattttacttcaacttgagtttaaaagctttattaaaagactgggcttttcagaagagattaactatgcaaggcagaactttcagctacctgaatttagtattaaagaacttcgtgatgtttcagcaatagggggcaaagaaatctatctattgtactcagatgaagaaggacttttttatatttatgaccatcaaacctcaaccatttttacaacttctgataaggaagctattaaagatcttttaacactccaaagcattcaaaaggttgtatatgatttaaaaaatatactccataaggtggactttgatgaagctaatcagataaaaaattgtaatgatgttatgttggcttcatatgttttggacagtacacgcagttcgtacgatttggaaacattgtttatttcttatctcaacactgatatagctgcaatcaaagagaatagatgggctggtgctacagttttattaagaaatctttgggatgaactttcaaaactcattgatttaaactcggcccaatacgtttatgagagcatagagatgcctcttgttcccattttatatgaaatggagaaaatcggttttaaggttgacaaaaacactttgcaggagtatacaaaagagattgagagcaagcttttaaagttggaatcacagatttatcaaatagccggtgaatggtttaacataaactcgccaaaacaactctcatatatattattcgaaaaactgaagcttccggttgttaaaaagaccaaaacaggatattcaacagatgccgaggtattagaagagctgtatgataaacatgacataataccgcttattctggattatagaatgtatacgaaaatactgacaacttactgtcagggactggttcaggcaataaatcctgcaactggaagaattcataccaactttattcagacaggtacggcaactggaagacttgcaagtgcagagcccaatctgcaaaatattcctgtaaaatatgatgagggaaagctaataagaaaggcatttgttccagatgaaggttatgtgttgatagatgctgattattctcagattgagcttagaatacttgcacatatctctgaggatgaacgactgataaatgcttttaaaaataaccttgatattcattcacagacggcggcagagatctttggtgtggatataagtcaggttacaccaattatgcgaagccaggcaaaagcagttaactttggaattgtatatggtatatctgattatggactttcacgggatataaagatttcaagaaaagaagcagccgagtttattaatcgttattttgaaaagtatcccagagtaaaagaatatttggacaatgtcgtcaagtttgcccgtgaaaacggatttgttttgacaatatttaacaggaaaaggtatatcaaggatataaagtctactaataaaaacctgtggaactatgcagagagaatagcaatgaattcacctatccagggaagtgctgcagatattatgaaaatagcaatgataagagtttataaaaagctaaaagaaaacaatttaaaatcaagaattattctgcaggtccatgacgaacttttgattgaatcaccctatgaagagaaagagatagtaaaggaaatagtaaaatcggagatggaaaatgcggttttattgaaagttcctttggtagttgaagtgaaagaaggttcaaattggtatgaaacaaagtaaaggatcc

SEQ ID NO: 1727 - DNA, 2623 bp, Artificial Sequence
  Description of Artificial Sequence: Synthetic DNA sequence of Caldicellulosiruptor TOK13B DNA Polymerase R779Y
atgaaatacctgctgccgaccgctgctgctggtctgctgctcctcgctgcccagccggcgatggccatggaatttgttatttttgatgggaatagtattctgtatagagctttttttgccttgccacagcttactacctcaacaggcatacctacaaatgctatatatggttttttgaatgtgctgttaaaatacttagattctgaaaaaccggattatgtagcagtagcttttgacaaaaaaggcagagctgtccgaaaaagtgaatatgaagaatacaaggctaacagaaaaccgatgccagattctcttcaggttcagataccttacgtaagagaaatacttgctgctctgaacattcctgtactgaaatgtgaagggtatgaagctgatgacgttataggcacacttgtaaatagatttaaagcccaggatttagagattgtgataataaccggagacagagatacacttcagttacttgataaaaatgtaattgtcaaaatagtcacaacaaggtttgacaggacaactgaagatttgtatgctgtagaaaatgtaaaagaaaaatatggtgtttttgcgcatcaggttgttgactataaagcattagtaggtgatgcgtcagacaatataccaggtgttaagggaattggagataaaactgccataaagctgttagaagagtaccagactctggagaatatatatcagaatctaaataacattaaaggagcgctaaaagagaagttggaatcaggaaaagacatggcatttttatcaaaaagactggctactatcatatgcgatttaccaattgaggtgaatcttgaagaattaaaaaccaaagaatgggacaaagaaagactttatcagattttacttcaacttgagtttaaaagctttattaaaagactgggcttttcagaagagattaactatgcaaggcagaactttcagctacctgaatttagtattaaagaacttcgtgatgtttcagcaatagggggcaaagaaatctatctattgtactcagatgaagaaggacttttttatatttatgaccatcaaacctcaaccatttttacaacttctgataaggaagctattaaagatcttttaacactccaaagcattcaaaaggttgtatatgatttaaaaaatatactccataaggtggactttgatgaagctaatcagataaaaaattgtaatgatgttatgttggcttcatatgttttggacagtacacgcagttcgtacgatttggaaacattgtttatttcttatctcaacactgatatagctgcaatcaaagagaatagatgggctggtgctacagttttattaagaaatctttgggatgaactttcaaaactcattgatttaaactcggcccaatacgtttatgagagcatagagatgcctcttgttcccattttatatgaaatggagaaaatcggttttaaggttgacaaaaacactttgcaggagtatacaaaagagattgagagcaagcttttaaagttggaatcacagatttatcaaatagccggtgaatggtttaacataaactcgccaaaacaactctcatatatattattcgaaaaactgaagcttccggttgttaaaaagaccaaaacaggatattcaacagatgccgaggtattagaagagctgtatgataaacatgacataataccgcttattctggattatagaatgtatacgaaaatactgacaacttactgtcagggactggttcaggcaataaatcctgcaactggaagaattcataccaactttattcagacaggtacggcaactggaagacttgcaagtgcagagcccaatctgcaaaatattcctgtaaaatatgatgagggaaagctaataagaaaggcatttgttccagatgaaggttatgtgttgatagatgctgattattctcagattgagcttagaatacttgcacatatctctgaggatgaacgactgataaatgcttttaaaaataaccttgatattcattcacagacggcggcagagatctttggtgtggatataagtcaggttacaccaattatgcgaagccaggcaaaagcagttaactttggaattgtatatggtatatctgattatggactttcacgggatataaagatttcaagaaaagaagcagccgagtttattaatcgttattttgaaaagtatcccagagtaaaagaatatttggacaatgtcgtcaagtttgcccgtgaaaacggatttgttttgacaatatttaacaggaaaaggtatatcaaggatataaagtctactaataaaaacctgtataactatgcagagagaatagcaatgaattcacctatccagggaagtgctgcagatattatgaaaatagcaatgataagagtttataaaaagctaaaagaaaacaatttaaaatcaagaattattctgcaggtccatgacgaacttttgattgaatcaccctatgaagagaaagagatagtaaaggaaatagtaaaatcggagatggaaaatgcggttttattgaaagttcctttggtagttgaagtgaaagaaggttcaaattggtatgaaacaaagtaaaggatcc

SEQ ID NO: 1728 - DNA, 2623 bp, Artificial Sequence
  Description of Artificial Sequence: Synthetic DNA sequence of Caldicellulosiruptor TOK13B DNA Polymerase R779V
atgaaatacctgctgccgaccgctgctgctggtctgctgctcctcgctgcccagccggcgatggccatggaatttgttatttttgatgggaatagtattctgtatagagctttttttgccttgccacagcttactacctcaacaggcatacctacaaatgctatatatggttttttgaatgtgctgttaaaatacttagattctgaaaaaccggattatgtagcagtagcttttgacaaaaaaggcagagctgtccgaaaaagtgaatatgaagaatacaaggctaacagaaaaccgatgccagattctcttcaggttcagataccttacgtaagagaaatacttgctgctctgaacattcctgtactgaaatgtgaagggtatgaagctgatgacgttataggcacacttgtaaatagatttaaagcccaggatttagagattgtgataataaccggagacagagatacacttcagttacttgataaaaatgtaattgtcaaaatagtcacaacaaggtttgacaggacaactgaagatttgtatgctgtagaaaatgtaaaagaaaaatatggtgtttttgcgcatcaggttgttgactataaagcattagtaggtgatgcgtcagacaatataccaggtgttaagggaattggagataaaactgccataaagctgttagaagagtaccagactctggagaatatatatcagaatctaaataacattaaaggagcgctaaaagagaagttggaatcaggaaaagacatggcatttttatcaaaaagactggctactatcatatgcgatttaccaattgaggtgaatcttgaagaattaaaaaccaaagaatgggacaaagaaagactttatcagattttacttcaacttgagtttaaaagctttattaaaagactgggcttttcagaagagattaactatgcaaggcagaactttcagctacctgaatttagtattaaagaacttcgtgatgtttcagcaatagggggcaaagaaatctatctattgtactcagatgaagaaggacttttttatatttatgaccatcaaacctcaaccatttttacaacttctgataaggaagctattaaagatcttttaacactccaaagcattcaaaaggttgtatatgatttaaaaaatatactccataaggtggactttgatgaagctaatcagataaaaaattgtaatgatgttatgttggcttcatatgttttggacagtacacgcagttcgtacgatttggaaacattgtttatttcttatctcaacactgatatagctgcaatcaaagagaatagatgggctggtgctacagttttattaagaaatctttgggatgaactttcaaaactcattgatttaaactcggcccaatacgtttatgagagcatagagatgcctcttgttcccattttatatgaaatggagaaaatcggttttaaggttgacaaaaacactttgcaggagtatacaaaagagattgagagcaagcttttaaagttggaatcacagatttatcaaatagccggtgaatggtttaacataaactcgccaaaacaactctcatatatattattcgaaaaactgaagcttccggttgttaaaaagaccaaaacaggatattcaacagatgccgaggtattagaagagctgtatgataaacatgacataataccgcttattctggattatagaatgtatacgaaaatactgacaacttactgtcagggactggttcaggcaataaatcctgcaactggaagaattcataccaactttattcagacaggtacggcaactggaagacttgcaagtgcagagcccaatctgcaaaatattcctgtaaaatatgatgagggaaagctaataagaaaggcatttgttccagatgaaggttatgtgttgatagatgctgattattctcagattgagcttagaatacttgcacatatctctgaggatgaacgactgataaatgcttttaaaaataaccttgatattcattcacagacggcggcagagatctttggtgtggatataagtcaggttacaccaattatgcgaagccaggcaaaagcagttaactttggaattgtatatggtatatctgattatggactttcacgggatataaagatttcaagaaaagaagcagccgagtttattaatcgttattttgaaaagtatcccagagtaaaagaatatttggacaatgtcgtcaagtttgcccgtgaaaacggatttgttttgacaatatttaacaggaaaaggtatatcaaggatataaagtctactaataaaaacctggttaactatgcagagagaatagcaatgaattcacctatccagggaagtgctgcagatattatgaaaatagcaatgataagagtttataaaaagctaaaagaaaacaatttaaaatcaagaattattctgcaggtccatgacgaacttttgattgaatcaccctatgaagagaaagagatagtaaaggaaatagtaaaatcggagatggaaaatgcggttttattgaaagttcctttggtagttgaagtgaaagaaggttcaaattggtatgaaacaaagtaaaggatcc

SEQ ID NO: 1729 - DNA, 2623 bp, Artificial Sequence
  Description of Artificial Sequence: Synthetic DNA sequence of Caldicellulosiruptor TOK13B DNA Polymerase N780A
atgaaatacctgctgccgaccgctgctgctggtctgctgctcctcgctgcccagccggcgatggccatggaatttgttatttttgatgggaatagtattctgtatagagctttttttgccttgccacagcttactacctcaacaggcatacctacaaatgctatatatggttttttgaatgtgctgttaaaatacttagattctgaaaaaccggattatgtagcagtagcttttgacaaaaaaggcagagctgtccgaaaaagtgaatatgaagaatacaaggctaacagaaaaccgatgccagattctcttcaggttcagataccttacgtaagagaaatacttgctgctctgaacattcctgtactgaaatgtgaagggtatgaagctgatgacgttataggcacacttgtaaatagatttaaagcccaggatttagagattgtgataataaccggagacagagatacacttcagttacttgataaaaatgtaattgtcaaaatagtcacaacaaggtttgacaggacaactgaagatttgtatgctgtagaaaatgtaaaagaaaaatatggtgtttttgcgcatcaggttgttgactataaagcattagtaggtgatgcgtcagacaatataccaggtgttaagggaattggagataaaactgccataaagctgttagaagagtaccagactctggagaatatatatcagaatctaaataacattaaaggagcgctaaaagagaagttggaatcaggaaaagacatggcatttttatcaaaaagactggctactatcatatgcgatttaccaattgaggtgaatcttgaagaattaaaaaccaaagaatgggacaaagaaagactttatcagattttacttcaacttgagtttaaaagctttattaaaagactgggcttttcagaagagattaactatgcaaggcagaactttcagctacctgaatttagtattaaagaacttcgtgatgtttcagcaatagggggcaaagaaatctatctattgtactcagatgaagaaggacttttttatatttatgaccatcaaacctcaaccatttttacaacttctgataaggaagctattaaagatcttttaacactccaaagcattcaaaaggttgtatatgatttaaaaaatatactccataaggtggactttgatgaagctaatcagataaaaaattgtaatgatgttatgttggcttcatatgttttggacagtacacgcagttcgtacgatttggaaacattgtttatttcttatctcaacactgatatagctgcaatcaaagagaatagatgggctggtgctacagttttattaagaaatctttgggatgaactttcaaaactcattgatttaaactcggcccaatacgtttatgagagcatagagatgcctcttgttcccattttatatgaaatggagaaaatcggttttaaggttgacaaaaacactttgcaggagtatacaaaagagattgagagcaagcttttaaagttggaatcacagatttatcaaatagccggtgaatggtttaacataaactcgccaaaacaactctcatatatattattcgaaaaactgaagcttccggttgttaaaaagaccaaaacaggatattcaacagatgccgaggtattagaagagctgtatgataaacatgacataataccgcttattctggattatagaatgtatacgaaaatactgacaacttactgtcagggactggttcaggcaataaatcctgcaactggaagaattcataccaactttattcagacaggtacggcaactggaagacttgcaagtgcagagcccaatctgcaaaatattcctgtaaaatatgatgagggaaagctaataagaaaggcatttgttccagatgaaggttatgtgttgatagatgctgattattctcagattgagcttagaatacttgcacatatctctgaggatgaacgactgataaatgcttttaaaaataaccttgatattcattcacagacggcggcagagatctttggtgtggatataagtcaggttacaccaattatgcgaagccaggcaaaagcagttaactttggaattgtatatggtatatctgattatggactttcacgggatataaagatttcaagaaaagaagcagccgagtttattaatcgttattttgaaaagtatcccagagtaaaagaatatttggacaatgtcgtcaagtttgcccgtgaaaacggatttgttttgacaatatttaacaggaaaaggtatatcaaggatataaagtctactaataaaaacctgagagcttatgcagagagaatagcaatgaattcacctatccagggaagtgctgcagatattatgaaaatagcaatgataagagtttataaaaagctaaaagaaaacaatttaaaatcaagaattattctgcaggtccatgacgaacttttgattgaatcaccctatgaagagaaagagatagtaaaggaaatagtaaaatcggagatggaaaatgcggttttattgaaagttcctttggtagttgaagtgaaagaaggttcaaattggtatgaaacaaagtaaaggatcc

SEQ ID NO: 1730 - DNA, 2623 bp, Artificial Sequence
  Description of Artificial Sequence: Synthetic DNA sequence of Caldicellulosiruptor TOK13B DNA Polymerase N780R
atgaaatacctgctgccgaccgctgctgctggtctgctgctcctcgctgcccagccggcgatggccatggaatttgttatttttgatgggaatagtattctgtatagagctttttttgccttgccacagcttactacctcaacaggcatacctacaaatgctatatatggttttttgaatgtgctgttaaaatacttagattctgaaaaaccggattatgtagcagtagcttttgacaaaaaaggcagagctgtccgaaaaagtgaatatgaagaatacaaggctaacagaaaaccgatgccagattctcttcaggttcagataccttacgtaagagaaatacttgctgctctgaacattcctgtactgaaatgtgaagggtatgaagctgatgacgttataggcacacttgtaaatagatttaaagcccaggatttagagattgtgataataaccggagacagagatacacttcagttacttgataaaaatgtaattgtcaaaatagtcacaacaaggtttgacaggacaactgaagatttgtatgctgtagaaaatgtaaaagaaaaatatggtgtttttgcgcatcaggttgttgactataaagcattagtaggtgatgcgtcagacaatataccaggtgttaagggaattggagataaaactgccataaagctgttagaagagtaccagactctggagaatatatatcagaatctaaataacattaaaggagcgctaaaagagaagttggaatcaggaaaagacatggcatttttatcaaaaagactggctactatcatatgcgatttaccaattgaggtgaatcttgaagaattaaaaaccaaagaatgggacaaagaaagactttatcagattttacttcaacttgagtttaaaagctttattaaaagactgggcttttcagaagagattaactatgcaaggcagaactttcagctacctgaatttagtattaaagaacttcgtgatgtttcagcaatagggggcaaagaaatctatctattgtactcagatgaagaaggacttttttatatttatgaccatcaaacctcaaccatttttacaacttctgataaggaagctattaaagatcttttaacactccaaagcattcaaaaggttgtatatgatttaaaaaatatactccataaggtggactttgatgaagctaatcagataaaaaattgtaatgatgttatgttggcttcatatgttttggacagtacacgcagttcgtacgatttggaaacattgtttatttcttatctcaacactgatatagctgcaatcaaagagaatagatgggctggtgctacagttttattaagaaatctttgggatgaactttcaaaactcattgatttaaactcggcccaatacgtttatgagagcatagagatgcctcttgttcccattttatatgaaatggagaaaatcggttttaaggttgacaaaaacactttgcaggagtatacaaaagagattgagagcaagcttttaaagttggaatcacagatttatcaaatagccggtgaatggtttaacataaactcgccaaaacaactctcatatatattattcgaaaaactgaagcttccggttgttaaaaagaccaaaacaggatattcaacagatgccgaggtattagaagagctgtatgataaacatgacataataccgcttattctggattatagaatgtatacgaaaatactgacaacttactgtcagggactggttcaggcaataaatcctgcaactggaagaattcataccaactttattcagacaggtacggcaactggaagacttgcaagtgcagagcccaatctgcaaaatattcctgtaaaatatgatgagggaaagctaataagaaaggcatttgttccagatgaaggttatgtgttgatagatgctgattattctcagattgagcttagaatacttgcacatatctctgaggatgaacgactgataaatgcttttaaaaataaccttgatattcattcacagacggcggcagagatctttggtgtggatataagtcaggttacaccaattatgcgaagccaggcaaaagcagttaactttggaattgtatatggtatatctgattatggactttcacgggatataaagatttcaagaaaagaagcagccgagtttattaatcgttattttgaaaagtatcccagagtaaaagaatatttggacaatgtcgtcaagtttgcccgtgaaaacggatttgttttgacaatatttaacaggaaaaggtatatcaaggatataaagtctactaataaaaacctgagacgttatgcagagagaatagcaatgaattcacctatccagggaagtgctgcagatattatgaaaatagcaatgataagagtttataaaaagctaaaagaaaacaatttaaaatcaagaattattctgcaggtccatgacgaacttttgattgaatcaccctatgaagagaaagagatagtaaaggaaatagtaaaatcggagatggaaaatgcggttttattgaaagttcctttggtagttgaagtgaaagaaggttcaaattggtatgaaacaaagtaaaggatcc

SEQ ID NO: 1731 - DNA, 2623 bp, Artificial Sequence
  Description of Artificial Sequence: Synthetic DNA sequence of Caldicellulosiruptor TOK13B DNA Polymerase N780D
atgaaatacctgctgccgaccgctgctgctggtctgctgctcctcgctgcccagccggcgatggccatggaatttgttatttttgatgggaatagtattctgtatagagctttttttgccttgccacagcttactacctcaacaggcatacctacaaatgctatatatggttttttgaatgtgctgttaaaatacttagattctgaaaaaccggattatgtagcagtagcttttgacaaaaaaggcagagctgtccgaaaaagtgaatatgaagaatacaaggctaacagaaaaccgatgccagattctcttcaggttcagataccttacgtaagagaaatacttgctgctctgaacattcctgtactgaaatgtgaagggtatgaagctgatgacgttataggcacacttgtaaatagatttaaagcccaggatttagagattgtgataataaccggagacagagatacacttcagttacttgataaaaatgtaattgtcaaaatagtcacaacaaggtttgacaggacaactgaagatttgtatgctgtagaaaatgtaaaagaaaaatatggtgtttttgcgcatcaggttgttgactataaagcattagtaggtgatgcgtcagacaatataccaggtgttaagggaattggagataaaactgccataaagctgttagaagagtaccagactctggagaatatatatcagaatctaaataacattaaaggagcgctaaaagagaagttggaatcaggaaaagacatggcatttttatcaaaaagactggctactatcatatgcgatttaccaattgaggtgaatcttgaagaattaaaaaccaaagaatgggacaaagaaagactttatcagattttacttcaacttgagtttaaaagctttattaaaagactgggcttttcagaagagattaactatgcaaggcagaactttcagctacctgaatttagtattaaagaacttcgtgatgtttcagcaatagggggcaaagaaatctatctattgtactcagatgaagaaggacttttttatatttatgaccatcaaacctcaaccatttttacaacttctgataaggaagctattaaagatcttttaacactccaaagcattcaaaaggttgtatatgatttaaaaaatatactccataaggtggactttgatgaagctaatcagataaaaaattgtaatgatgttatgttggcttcatatgttttggacagtacacgcagttcgtacgatttggaaacattgtttatttcttatctcaacactgatatagctgcaatcaaagagaatagatgggctggtgctacagttttattaagaaatctttgggatgaactttcaaaactcattgatttaaactcggcccaatacgtttatgagagcatagagatgcctcttgttcccattttatatgaaatggagaaaatcggttttaaggttgacaaaaacactttgcaggagtatacaaaagagattgagagcaagcttttaaagttggaatcacagatttatcaaatagccggtgaatggtttaacataaactcgccaaaacaactctcatatatattattcgaaaaactgaagcttccggttgttaaaaagaccaaaacaggatattcaacagatgccgaggtattagaagagctgtatgataaacatgacataataccgcttattctggattatagaatgtatacgaaaatactgacaacttactgtcagggactggttcaggcaataaatcctgcaactggaagaattcataccaactttattcagacaggtacggcaactggaagacttgcaagtgcagagcccaatctgcaaaatattcctgtaaaatatgatgagggaaagctaataagaaaggcatttgttccagatgaaggttatgtgttgatagatgctgattattctcagattgagcttagaatacttgcacatatctctgaggatgaacgactgataaatgcttttaaaaataaccttgatattcattcacagacggcggcagagatctttggtgtggatataagtcaggttacaccaattatgcgaagccaggcaaaagcagttaactttggaattgtatatggtatatctgattatggactttcacgggatataaagatttcaagaaaagaagcagccgagtttattaatcgttattttgaaaagtatcccagagtaaaagaatatttggacaatgtcgtcaagtttgcccgtgaaaacggatttgttttgacaatatttaacaggaaaaggtatatcaaggatataaagtctactaataaaaacctgagagattatgcagagagaatagcaatgaattcacctatccagggaagtgctgcagatattatgaaaatagcaatgataagagtttataaaaagctaaaagaaaacaatttaaaatcaagaattattctgcaggtccatgacgaacttttgattgaatcaccctatgaagagaaagagatagtaaaggaaatagtaaaatcggagatggaaaatgcggttttattgaaagttcctttggtagttgaagtgaaagaaggttcaaattggtatgaaacaaagtaaaggatcc

SEQ ID NO: 1732 - DNA, 2623 bp, Artificial Sequence
  Description of Artificial Sequence: Synthetic DNA sequence of Caldicellulosiruptor TOK13B DNA Polymerase N780C
atgaaatacctgctgccgaccgctgctgctggtctgctgctcctcgctgcccagccggcgatggccatggaatttgttatttttgatgggaatagtattctgtatagagctttttttgccttgccacagcttactacctcaacaggcatacctacaaatgctatatatggttttttgaatgtgctgttaaaatacttagattctgaaaaaccggattatgtagcagtagcttttgacaaaaaaggcagagctgtccgaaaaagtgaatatgaagaatacaaggctaacagaaaaccgatgccagattctcttcaggttcagataccttacgtaagagaaatacttgctgctctgaacattcctgtactgaaatgtgaagggtatgaagctgatgacgttataggcacacttgtaaatagatttaaagcccaggatttagagattgtgataataaccggagacagagatacacttcagttacttgataaaaatgtaattgtcaaaatagtcacaacaaggtttgacaggacaactgaagatttgtatgctgtagaaaatgtaaaagaaaaatatggtgtttttgcgcatcaggttgttgactataaagcattagtaggtgatgcgtcagacaatataccaggtgttaagggaattggagataaaactgccataaagctgttagaagagtaccagactctggagaatatatatcagaatctaaataacattaaaggagcgctaaaagagaagttggaatcaggaaaagacatggcatttttatcaaaaagactggctactatcatatgcgatttaccaattgaggtgaatcttgaagaattaaaaaccaaagaatgggacaaagaaagactttatcagattttacttcaacttgagtttaaaagctttattaaaagactgggcttttcagaagagattaactatgcaaggcagaactttcagctacctgaatttagtattaaagaacttcgtgatgtttcagcaatagggggcaaagaaatctatctattgtactcagatgaagaaggacttttttatatttatgaccatcaaacctcaaccatttttacaacttctgataaggaagctattaaagatcttttaacactccaaagcattcaaaaggttgtatatgatttaaaaaatatactccataaggtggactttgatgaagctaatcagataaaaaattgtaatgatgttatgttggcttcatatgttttggacagtacacgcagttcgtacgatttggaaacattgtttatttcttatctcaacactgatatagctgcaatcaaagagaatagatgggctggtgctacagttttattaagaaatctttgggatgaactttcaaaactcattgatttaaactcggcccaatacgtttatgagagcatagagatgcctcttgttcccattttatatgaaatggagaaaatcggttttaaggttgacaaaaacactttgcaggagtatacaaaagagattgagagcaagcttttaaagttggaatcacagatttatcaaatagccggtgaatggtttaacataaactcgccaaaacaactctcatatatattattcgaaaaactgaagcttccggttgttaaaaagaccaaaacaggatattcaacagatgccgaggtattagaagagctgtatgataaacatgacataataccgcttattctggattatagaatgtatacgaaaatactgacaacttactgtcagggactggttcaggcaataaatcctgcaactggaagaattcataccaactttattcagacaggtacggcaactggaagacttgcaagtgcagagcccaatctgcaaaatattcctgtaaaatatgatgagggaaagctaataagaaaggcatttgttccagatgaaggttatgtgttgatagatgctgattattctcagattgagcttagaatacttgcacatatctctgaggatgaacgactgataaatgcttttaaaaataaccttgatattcattcacagacggcggcagagatctttggtgtggatataagtcaggttacaccaattatgcgaagccaggcaaaagcagttaactttggaattgtatatggtatatctgattatggactttcacgggatataaagatttcaagaaaagaagcagccgagtttattaatcgttattttgaaaagtatcccagagtaaaagaatatttggacaatgtcgtcaagtttgcccgtgaaaacggatttgttttgacaatatttaacaggaaaaggtatatcaaggatataaagtctactaataaaaacctgagatgttatgcagagagaatagcaatgaattcacctatccagggaagtgctgcagatattatgaaaatagcaatgataagagtttataaaaagctaaaagaaaacaatttaaaatcaagaattattctgcaggtccatgacgaacttttgattgaatcaccctatgaagagaaagagatagtaaaggaaatagtaaaatcggagatggaaaatgcggttttattgaaagttcctttggtagttgaagtgaaagaaggttcaaattggtatgaaacaaagtaaaggatcc

SEQ ID NO: 1733 - DNA, 2623 bp, Artificial Sequence
  Description of Artificial Sequence: Synthetic DNA sequence of Caldicellulosiruptor TOK13B DNA Polymerase N780E
atgaaatacctgctgccgaccgctgctgctggtctgctgctcctcgctgcccagccggcgatggccatggaatttgttatttttgatgggaatagtattctgtatagagctttttttgccttgccacagcttactacctcaacaggcatacctacaaatgctatatatggttttttgaatgtgctgttaaaatacttagattctgaaaaaccggattatgtagcagtagcttttgacaaaaaaggcagagctgtccgaaaaagtgaatatgaagaatacaaggctaacagaaaaccgatgccagattctcttcaggttcagataccttacgtaagagaaatacttgctgctctgaacattcctgtactgaaatgtgaagggtatgaagctgatgacgttataggcacacttgtaaatagatttaaagcccaggatttagagattgtgataataaccggagacagagatacacttcagttacttgataaaaatgtaattgtcaaaatagtcacaacaaggtttgacaggacaactgaagatttgtatgctgtagaaaatgtaaaagaaaaatatggtgtttttgcgcatcaggttgttgactataaagcattagtaggtgatgcgtcagacaatataccaggtgttaagggaattggagataaaactgccataaagctgttagaagagtaccagactctggagaatatatatcagaatctaaataacattaaaggagcgctaaaagagaagttggaatcaggaaaagacatggcatttttatcaaaaagactggctactatcatatgcgatttaccaattgaggtgaatcttgaagaattaaaaaccaaagaatgggacaaagaaagactttatcagattttacttcaacttgagtttaaaagctttattaaaagactgggcttttcagaagagattaactatgcaaggcagaactttcagctacctgaatttagtattaaagaacttcgtgatgtttcagcaatagggggcaaagaaatctatctattgtactcagatgaagaaggacttttttatatttatgaccatcaaacctcaaccatttttacaacttctgataaggaagctattaaagatcttttaacactccaaagcattcaaaaggttgtatatgatttaaaaaatatactccataaggtggactttgatgaagctaatcagataaaaaattgtaatgatgttatgttggcttcatatgttttggacagtacacgcagttcgtacgatttggaaacattgtttatttcttatctcaacactgatatagctgcaatcaaagagaatagatgggctggtgctacagttttattaagaaatctttgggatgaactttcaaaactcattgatttaaactcggcccaatacgtttatgagagcatagagatgcctcttgttcccattttatatgaaatggagaaaatcggttttaaggttgacaaaaacactttgcaggagtatacaaaagagattgagagcaagcttttaaagttggaatcacagatttatcaaatagccggtgaatggtttaacataaactcgccaaaacaactctcatatatattattcgaaaaactgaagcttccggttgttaaaaagaccaaaacaggatattcaacagatgccgaggtattagaagagctgtatgataaacatgacataataccgcttattctggattatagaatgtatacgaaaatactgacaacttactgtcagggactggttcaggcaataaatcctgcaactggaagaattcataccaactttattcagacaggtacggcaactggaagacttgcaagtgcagagcccaatctgcaaaatattcctgtaaaatatgatgagggaaagctaataagaaaggcatttgttccagatgaaggttatgtgttgatagatgctgattattctcagattgagcttagaatacttgcacatatctctgaggatgaacgactgataaatgcttttaaaaataaccttgatattcattcacagacggcggcagagatctttggtgtggatataagtcaggttacaccaattatgcgaagccaggcaaaagcagttaactttggaattgtatatggtatatctgattatggactttcacgggatataaagatttcaagaaaagaagcagccgagtttattaatcgttattttgaaaagtatcccagagtaaaagaatatttggacaatgtcgtcaagtttgcccgtgaaaacggatttgttttgacaatatttaacaggaaaaggtatatcaaggatataaagtctactaataaaaacctgagagaatatgcagagagaatagcaatgaattcacctatccagggaagtgctgcagatattatgaaaatagcaatgataagagtttataaaaagctaaaagaaaacaatttaaaatcaagaattattctgcaggtccatgacgaacttttgattgaatcaccctatgaagagaaagagatagtaaaggaaatagtaaaatcggagatggaaaatgcggttttattgaaagttcctttggtagttgaagtgaaagaaggttcaaattggtatgaaacaaagtaaaggatcc

SEQ ID NO: 1734 - DNA, 2623 bp, Artificial Sequence
  Description of Artificial Sequence: Synthetic DNA sequence of Caldicellulosiruptor TOK13B DNA Polymerase N780Q
atgaaatacctgctgccgaccgctgctgctggtctgctgctcctcgctgcccagccggcgatggccatggaatttgttatttttgatgggaatagtattctgtatagagctttttttgccttgccacagcttactacctcaacaggcatacctacaaatgctatatatggttttttgaatgtgctgttaaaatacttagattctgaaaaaccggattatgtagcagtagcttttgacaaaaaaggcagagctgtccgaaaaagtgaatatgaagaatacaaggctaacagaaaaccgatgccagattctcttcaggttcagataccttacgtaagagaaatacttgctgctctgaacattcctgtactgaaatgtgaagggtatgaagctgatgacgttataggcacacttgtaaatagatttaaagcccaggatttagagattgtgataataaccggagacagagatacacttcagttacttgataaaaatgtaattgtcaaaatagtcacaacaaggtttgacaggacaactgaagatttgtatgctgtagaaaatgtaaaagaaaaatatggtgtttttgcgcatcaggttgttgactataaagcattagtaggtgatgcgtcagacaatataccaggtgttaagggaattggagataaaactgccataaagctgttagaagagtaccagactctggagaatatatatcagaatctaaataacattaaaggagcgctaaaagagaagttggaatcaggaaaagacatggcatttttatcaaaaagactggctactatcatatgcgatttaccaattgaggtgaatcttgaagaattaaaaaccaaagaatgggacaaagaaagactttatcagattttacttcaacttgagtttaaaagctttattaaaagactgggcttttcagaagagattaactatgcaaggcagaactttcagctacctgaatttagtattaaagaacttcgtgatgtttcagcaatagggggcaaagaaatctatctattgtactcagatgaagaaggacttttttatatttatgaccatcaaacctcaaccatttttacaacttctgataaggaagctattaaagatcttttaacactccaaagcattcaaaaggttgtatatgatttaaaaaatatactccataaggtggactttgatgaagctaatcagataaaaaattgtaatgatgttatgttggcttcatatgttttggacagtacacgcagttcgtacgatttggaaacattgtttatttcttatctcaacactgatatagctgcaatcaaagagaatagatgggctggtgctacagttttattaagaaatctttgggatgaactttcaaaactcattgatttaaactcggcccaatacgtttatgagagcatagagatgcctcttgttcccattttatatgaaatggagaaaatcggttttaaggttgacaaaaacactttgcaggagtatacaaaagagattgagagcaagcttttaaagttggaatcacagatttatcaaatagccggtgaatggtttaacataaactcgccaaaacaactctcatatatattattcgaaaaactgaagcttccggttgttaaaaagaccaaaacaggatattcaacagatgccgaggtattagaagagctgtatgataaacatgacataataccgcttattctggattatagaatgtatacgaaaatactgacaacttactgtcagggactggttcaggcaataaatcctgcaactggaagaattcataccaactttattcagacaggtacggcaactggaagacttgcaagtgcagagcccaatctgcaaaatattcctgtaaaatatgatgagggaaagctaataagaaaggcatttgttccagatgaaggttatgtgttgatagatgctgattattctcagattgagcttagaatacttgcacatatctctgaggatgaacgactgataaatgcttttaaaaataaccttgatattcattcacagacggcggcagagatctttggtgtggatataagtcaggttacaccaattatgcgaagccaggcaaaagcagttaactttggaattgtatatggtatatctgattatggactttcacgggatataaagatttcaagaaaagaagcagccgagtttattaatcgttattttgaaaagtatcccagagtaaaagaatatttggacaatgtcgtcaagtttgcccgtgaaaacggatttgttttgacaatatttaacaggaaaaggtatatcaaggatataaagtctactaataaaaacctgagacaatatgcagagagaatagcaatgaattcacctatccagggaagtgctgcagatattatgaaaatagcaatgataagagtttataaaaagctaaaagaaaacaatttaaaatcaagaattattctgcaggtccatgacgaacttttgattgaatcaccctatgaagagaaagagatagtaaaggaaatagtaaaatcggagatggaaaatgcggttttattgaaagttcctttggtagttgaagtgaaagaaggttcaaattggtatgaaacaaagtaaaggatcc

SEQ ID NO: 1735 - DNA, 2623 bp, Artificial Sequence
  Description of Artificial Sequence: Synthetic DNA sequence of Caldicellulosiruptor TOK13B DNA Polymerase N780G
atgaaatacctgctgccgaccgctgctgctggtctgctgctcctcgctgcccagccggcgatggccatggaatttgttatttttgatgggaatagtattctgtatagagctttttttgccttgccacagcttactacctcaacaggcatacctacaaatgctatatatggttttttgaatgtgctgttaaaatacttagattctgaaaaaccggattatgtagcagtagcttttgacaaaaaaggcagagctgtccgaaaaagtgaatatgaagaatacaaggctaacagaaaaccgatgccagattctcttcaggttcagataccttacgtaagagaaatacttgctgctctgaacattcctgtactgaaatgtgaagggtatgaagctgatgacgttataggcacacttgtaaatagatttaaagcccaggatttagagattgtgataataaccggagacagagatacacttcagttacttgataaaaatgtaattgtcaaaatagtcacaacaaggtttgacaggacaactgaagatttgtatgctgtagaaaatgtaaaagaaaaatatggtgtttttgcgcatcaggttgttgactataaagcattagtaggtgatgcgtcagacaatataccaggtgttaagggaattggagataaaactgccataaagctgttagaagagtaccagactctggagaatatatatcagaatctaaataacattaaaggagcgctaaaagagaagttggaatcaggaaaagacatggcatttttatcaaaaagactggctactatcatatgcgatttaccaattgaggtgaatcttgaagaattaaaaaccaaagaatgggacaaagaaagactttatcagattttacttcaacttgagtttaaaagctttattaaaagactgggcttttcagaagagattaactatgcaaggcagaactttcagctacctgaatttagtattaaagaacttcgtgatgtttcagcaatagggggcaaagaaatctatctattgtactcagatgaagaaggacttttttatatttatgaccatcaaacctcaaccatttttacaacttctgataaggaagctattaaagatcttttaacactccaaagcattcaaaaggttgtatatgatttaaaaaatatactccataaggtggactttgatgaagctaatcagataaaaaattgtaatgatgttatgttggcttcatatgttttggacagtacacgcagttcgtacgatttggaaacattgtttatttcttatctcaacactgatatagctgcaatcaaagagaatagatgggctggtgctacagttttattaagaaatctttgggatgaactttcaaaactcattgatttaaactcggcccaatacgtttatgagagcatagagatgcctcttgttcccattttatatgaaatggagaaaatcggttttaaggttgacaaaaacactttgcaggagtatacaaaagagattgagagcaagcttttaaagttggaatcacagatttatcaaatagccggtgaatggtttaacataaactcgccaaaacaactctcatatatattattcgaaaaactgaagcttccggttgttaaaaagaccaaaacaggatattcaacagatgccgaggtattagaagagctgtatgataaacatgacataataccgcttattctggattatagaatgtatacgaaaatactgacaacttactgtcagggactggttcaggcaataaatcctgcaactggaagaattcataccaactttattcagacaggtacggcaactggaagacttgcaagtgcagagcccaatctgcaaaatattcctgtaaaatatgatgagggaaagctaataagaaaggcatttgttccagatgaaggttatgtgttgatagatgctgattattctcagattgagcttagaatacttgcacatatctctgaggatgaacgactgataaatgcttttaaaaataaccttgatattcattcacagacggcggcagagatctttggtgtggatataagtcaggttacaccaattatgcgaagccaggcaaaagcagttaactttggaattgtatatggtatatctgattatggactttcacgggatataaagatttcaagaaaagaagcagccgagtttattaatcgttattttgaaaagtatcccagagtaaaagaatatttggacaatgtcgtcaagtttgcccgtgaaaacggatttgttttgacaatatttaacaggaaaaggtatatcaaggatataaagtctactaataaaaacctgagaggttatgcagagagaatagcaatgaattcacctatccagggaagtgctgcagatattatgaaaatagcaatgataagagtttataaaaagctaaaagaaaacaatttaaaatcaagaattattctgcaggtccatgacgaacttttgattgaatcaccctatgaagagaaagagatagtaaaggaaatagtaaaatcggagatggaaaatgcggttttattgaaagttcctttggtagttgaagtgaaagaaggttcaaattggtatgaaacaaagtaaaggatcc

SEQ ID NO: 1736 - DNA, 2623 bp, Artificial Sequence
  Description of Artificial Sequence: Synthetic DNA sequence of Caldicellulosiruptor TOK13B DNA Polymerase N780H
atgaaatacctgctgccgaccgctgctgctggtctgctgctcctcgctgcccagccggcgatggccatggaatttgttatttttgatgggaatagtattctgtatagagctttttttgccttgccacagcttactacctcaacaggcatacctacaaatgctatatatggttttttgaatgtgctgttaaaatacttagattctgaaaaaccggattatgtagcagtagcttttgacaaaaaaggcagagctgtccgaaaaagtgaatatgaagaatacaaggctaacagaaaaccgatgccagattctcttcaggttcagataccttacgtaagagaaatacttgctgctctgaacattcctgtactgaaatgtgaagggtatgaagctgatgacgttataggcacacttgtaaatagatttaaagcccaggatttagagattgtgataataaccggagacagagatacacttcagttacttgataaaaatgtaattgtcaaaatagtcacaacaaggtttgacaggacaactgaagatttgtatgctgtagaaaatgtaaaagaaaaatatggtgtttttgcgcatcaggttgttgactataaagcattagtaggtgatgcgtcagacaatataccaggtgttaagggaattggagataaaactgccataaagctgttagaagagtaccagactctggagaatatatatcagaatctaaataacattaaaggagcgctaaaagagaagttggaatcaggaaaagacatggcatttttatcaaaaagactggctactatcatatgcgatttaccaattgaggtgaatcttgaagaattaaaaaccaaagaatgggacaaagaaagactttatcagattttacttcaacttgagtttaaaagctttattaaaagactgggcttttcagaagagattaactatgcaaggcagaactttcagctacctgaatttagtattaaagaacttcgtgatgtttcagcaatagggggcaaagaaatctatctattgtactcagatgaagaaggacttttttatatttatgaccatcaaacctcaaccatttttacaacttctgataaggaagctattaaagatcttttaacactccaaagcattcaaaaggttgtatatgatttaaaaaatatactccataaggtggactttgatgaagctaatcagataaaaaattgtaatgatgttatgttggcttcatatgttttggacagtacacgcagttcgtacgatttggaaacattgtttatttcttatctcaacactgatatagctgcaatcaaagagaatagatgggctggtgctacagttttattaagaaatctttgggatgaactttcaaaactcattgatttaaactcggcccaatacgtttatgagagcatagagatgcctcttgttcccattttatatgaaatggagaaaatcggttttaaggttgacaaaaacactttgcaggagtatacaaaagagattgagagcaagcttttaaagttggaatcacagatttatcaaatagccggtgaatggtttaacataaactcgccaaaacaactctcatatatattattcgaaaaactgaagcttccggttgttaaaaagaccaaaacaggatattcaacagatgccgaggtattagaagagctgtatgataaacatgacataataccgcttattctggattatagaatgtatacgaaaatactgacaacttactgtcagggactggttcaggcaataaatcctgcaactggaagaattcataccaactttattcagacaggtacggcaactggaagacttgcaagtgcagagcccaatctgcaaaatattcctgtaaaatatgatgagggaaagctaataagaaaggcatttgttccagatgaaggttatgtgttgatagatgctgattattctcagattgagcttagaatacttgcacatatctctgaggatgaacgactgataaatgcttttaaaaataaccttgatattcattcacagacggcggcagagatctttggtgtggatataagtcaggttacaccaattatgcgaagccaggcaaaagcagttaactttggaattgtatatggtatatctgattatggactttcacgggatataaagatttcaagaaaagaagcagccgagtttattaatcgttattttgaaaagtatcccagagtaaaagaatatttggacaatgtcgtcaagtttgcccgtgaaaacggatttgttttgacaatatttaacaggaaaaggtatatcaaggatataaagtctactaataaaaacctgagacattatgcagagagaatagcaatgaattcacctatccagggaagtgctgcagatattatgaaaatagcaatgataagagtttataaaaagctaaaagaaaacaatttaaaatcaagaattattctgcaggtccatgacgaacttttgattgaatcaccctatgaagagaaagagatagtaaaggaaatagtaaaatcggagatggaaaatgcggttttattgaaagttcctttggtagttgaagtgaaagaaggttcaaattggtatgaaacaaagtaaaggatcc

SEQ ID NO: 1737 - DNA, 2623 bp, Artificial Sequence
  Description of Artificial Sequence: Synthetic DNA sequence of Caldicellulosiruptor TOK13B DNA Polymerase N780I
atgaaatacctgctgccgaccgctgctgctggtctgctgctcctcgctgcccagccggcgatggccatggaatttgttatttttgatgggaatagtattctgtatagagctttttttgccttgccacagcttactacctcaacaggcatacctacaaatgctatatatggttttttgaatgtgctgttaaaatacttagattctgaaaaaccggattatgtagcagtagcttttgacaaaaaaggcagagctgtccgaaaaagtgaatatgaagaatacaaggctaacagaaaaccgatgccagattctcttcaggttcagataccttacgtaagagaaatacttgctgctctgaacattcctgtactgaaatgtgaagggtatgaagctgatgacgttataggcacacttgtaaatagatttaaagcccaggatttagagattgtgataataaccggagacagagatacacttcagttacttgataaaaatgtaattgtcaaaatagtcacaacaaggtttgacaggacaactgaagatttgtatgctgtagaaaatgtaaaagaaaaatatggtgtttttgcgcatcaggttgttgactataaagcattagtaggtgatgcgtcagacaatataccaggtgttaagggaattggagataaaactgccataaagctgttagaagagtaccagactctggagaatatatatcagaatctaaataacattaaaggagcgctaaaagagaagttggaatcaggaaaagacatggcatttttatcaaaaagactggctactatcatatgcgatttaccaattgaggtgaatcttgaagaattaaaaaccaaagaatgggacaaagaaagactttatcagattttacttcaacttgagtttaaaagctttattaaaagactgggcttttcagaagagattaactatgcaaggcagaactttcagctacctgaatttagtattaaagaacttcgtgatgtttcagcaatagggggcaaagaaatctatctattgtactcagatgaagaaggacttttttatatttatgaccatcaaacctcaaccatttttacaacttctgataaggaagctattaaagatcttttaacactccaaagcattcaaaaggttgtatatgatttaaaaaatatactccataaggtggactttgatgaagctaatcagataaaaaattgtaatgatgttatgttggcttcatatgttttggacagtacacgcagttcgtacgatttggaaacattgtttatttcttatctcaacactgatatagctgcaatcaaagagaatagatgggctggtgctacagttttattaagaaatctttgggatgaactttcaaaactcattgatttaaactcggcccaatacgtttatgagagcatagagatgcctcttgttcccattttatatgaaatggagaaaatcggttttaaggttgacaaaaacactttgcaggagtatacaaaagagattgagagcaagcttttaaagttggaatcacagatttatcaaatagccggtgaatggtttaacataaactcgccaaaacaactctcatatatattattcgaaaaactgaagcttccggttgttaaaaagaccaaaacaggatattcaacagatgccgaggtattagaagagctgtatgataaacatgacataataccgcttattctggattatagaatgtatacgaaaatactgacaacttactgtcagggactggttcaggcaataaatcctgcaactggaagaattcataccaactttattcagacaggtacggcaactggaagacttgcaagtgcagagcccaatctgcaaaatattcctgtaaaatatgatgagggaaagctaataagaaaggcatttgttccagatgaaggttatgtgttgatagatgctgattattctcagattgagcttagaatacttgcacatatctctgaggatgaacgactgataaatgcttttaaaaataaccttgatattcattcacagacggcggcagagatctttggtgtggatataagtcaggttacaccaattatgcgaagccaggcaaaagcagttaactttggaattgtatatggtatatctgattatggactttcacgggatataaagatttcaagaaaagaagcagccgagtttattaatcgttattttgaaaagtatcccagagtaaaagaatatttggacaatgtcgtcaagtttgcccgtgaaaacggatttgttttgacaatatttaacaggaaaaggtatatcaaggatataaagtctactaataaaaacctgagaatttatgcagagagaatagcaatgaattcacctatccagggaagtgctgcagatattatgaaaatagcaatgataagagtttataaaaagctaaaagaaaacaatttaaaatcaagaattattctgcaggtccatgacgaacttttgattgaatcaccctatgaagagaaagagatagtaaaggaaatagtaaaatcggagatggaaaatgcggttttattgaaagttcctttggtagttgaagtgaaagaaggttcaaattggtatgaaacaaagtaaaggatcc

SEQ ID NO: 1738 - DNA, 2623 bp, Artificial Sequence
  Description of Artificial Sequence: Synthetic DNA sequence of Caldicellulosiruptor TOK13B DNA Polymerase N780L
atgaaatacctgctgccgaccgctgctgctggtctgctgctcctcgctgcccagccggcgatggccatggaatttgttatttttgatgggaatagtattctgtatagagctttttttgccttgccacagcttactacctcaacaggcatacctacaaatgctatatatggttttttgaatgtgctgttaaaatacttagattctgaaaaaccggattatgtagcagtagcttttgacaaaaaaggcagagctgtccgaaaaagtgaatatgaagaatacaaggctaacagaaaaccgatgccagattctcttcaggttcagataccttacgtaagagaaatacttgctgctctgaacattcctgtactgaaatgtgaagggtatgaagctgatgacgttataggcacacttgtaaatagatttaaagcccaggatttagagattgtgataataaccggagacagagatacacttcagttacttgataaaaatgtaattgtcaaaatagtcacaacaaggtttgacaggacaactgaagatttgtatgctgtagaaaatgtaaaagaaaaatatggtgtttttgcgcatcaggttgttgactataaagcattagtaggtgatgcgtcagacaatataccaggtgttaagggaattggagataaaactgccataaagctgttagaagagtaccagactctggagaatatatatcagaatctaaataacattaaaggagcgctaaaagagaagttggaatcaggaaaagacatggcatttttatcaaaaagactggctactatcatatgcgatttaccaattgaggtgaatcttgaagaattaaaaaccaaagaatgggacaaagaaagactttatcagattttacttcaacttgagtttaaaagctttattaaaagactgggcttttcagaagagattaactatgcaaggcagaactttcagctacctgaatttagtattaaagaacttcgtgatgtttcagcaatagggggcaaagaaatctatctattgtactcagatgaagaaggacttttttatatttatgaccatcaaacctcaaccatttttacaacttctgataaggaagctattaaagatcttttaacactccaaagcattcaaaaggttgtatatgatttaaaaaatatactccataaggtggactttgatgaagctaatcagataaaaaattgtaatgatgttatgttggcttcatatgttttggacagtacacgcagttcgtacgatttggaaacattgtttatttcttatctcaacactgatatagctgcaatcaaagagaatagatgggctggtgctacagttttattaagaaatctttgggatgaactttcaaaactcattgatttaaactcggcccaatacgtttatgagagcatagagatgcctcttgttcccattttatatgaaatggagaaaatcggttttaaggttgacaaaaacactttgcaggagtatacaaaagagattgagagcaagcttttaaagttggaatcacagatttatcaaatagccggtgaatggtttaacataaactcgccaaaacaactctcatatatattattcgaaaaactgaagcttccggttgttaaaaagaccaaaacaggatattcaacagatgccgaggtattagaagagctgtatgataaacatgacataataccgcttattctggattatagaatgtatacgaaaatactgacaacttactgtcagggactggttcaggcaataaatcctgcaactggaagaattcataccaactttattcagacaggtacggcaactggaagacttgcaagtgcagagcccaatctgcaaaatattcctgtaaaatatgatgagggaaagctaataagaaaggcatttgttccagatgaaggttatgtgttgatagatgctgattattctcagattgagcttagaatacttgcacatatctctgaggatgaacgactgataaatgcttttaaaaataaccttgatattcattcacagacggcggcagagatctttggtgtggatataagtcaggttacaccaattatgcgaagccaggcaaaagcagttaactttggaattgtatatggtatatctgattatggactttcacgggatataaagatttcaagaaaagaagcagccgagtttattaatcgttattttgaaaagtatcccagagtaaaagaatatttggacaatgtcgtcaagtttgcccgtgaaaacggatttgttttgacaatatttaacaggaaaaggtatatcaaggatataaagtctactaataaaaacctgagactttatgcagagagaatagcaatgaattcacctatccagggaagtgctgcagatattatgaaaatagcaatgataagagtttataaaaagctaaaagaaaacaatttaaaatcaagaattattctgcaggtccatgacgaacttttgattgaatcaccctatgaagagaaagagatagtaaaggaaatagtaaaatcggagatggaaaatgcggttttattgaaagttcctttggtagttgaagtgaaagaaggttcaaattggtatgaaacaaagtaaaggatcc

SEQ ID NO: 1739 - DNA, 2623 bp, Artificial Sequence
  Description of Artificial Sequence: Synthetic DNA sequence of Caldicellulosiruptor TOK13B DNA Polymerase N780K
atgaaatacctgctgccgaccgctgctgctggtctgctgctcctcgctgcccagccggcgatggccatggaatttgttatttttgatgggaatagtattctgtatagagctttttttgccttgccacagcttactacctcaacaggcatacctacaaatgctatatatggttttttgaatgtgctgttaaaatacttagattctgaaaaaccggattatgtagcagtagcttttgacaaaaaaggcagagctgtccgaaaaagtgaatatgaagaatacaaggctaacagaaaaccgatgccagattctcttcaggttcagataccttacgtaagagaaatacttgctgctctgaacattcctgtactgaaatgtgaagggtatgaagctgatgacgttataggcacacttgtaaatagatttaaagcccaggatttagagattgtgataataaccggagacagagatacacttcagttacttgataaaaatgtaattgtcaaaatagtcacaacaaggtttgacaggacaactgaagatttgtatgctgtagaaaatgtaaaagaaaaatatggtgtttttgcgcatcaggttgttgactataaagcattagtaggtgatgcgtcagacaatataccaggtgttaagggaattggagataaaactgccataaagctgttagaagagtaccagactctggagaatatatatcagaatctaaataacattaaaggagcgctaaaagagaagttggaatcaggaaaagacatggcatttttatcaaaaagactggctactatcatatgcgatttaccaattgaggtgaatcttgaagaattaaaaaccaaagaatgggacaaagaaagactttatcagattttacttcaacttgagtttaaaagctttattaaaagactgggcttttcagaagagattaactatgcaaggcagaactttcagctacctgaatttagtattaaagaacttcgtgatgtttcagcaatagggggcaaagaaatctatctattgtactcagatgaagaaggacttttttatatttatgaccatcaaacctcaaccatttttacaacttctgataaggaagctattaaagatcttttaacactccaaagcattcaaaaggttgtatatgatttaaaaaatatactccataaggtggactttgatgaagctaatcagataaaaaattgtaatgatgttatgttggcttcatatgttttggacagtacacgcagttcgtacgatttggaaacattgtttatttcttatctcaacactgatatagctgcaatcaaagagaatagatgggctggtgctacagttttattaagaaatctttgggatgaactttcaaaactcattgatttaaactcggcccaatacgtttatgagagcatagagatgcctcttgttcccattttatatgaaatggagaaaatcggttttaaggttgacaaaaacactttgcaggagtatacaaaagagattgagagcaagcttttaaagttggaatcacagatttatcaaatagccggtgaatggtttaacataaactcgccaaaacaactctcatatatattattcgaaaaactgaagcttccggttgttaaaaagaccaaaacaggatattcaacagatgccgaggtattagaagagctgtatgataaacatgacataataccgcttattctggattatagaatgtatacgaaaatactgacaacttactgtcagggactggttcaggcaataaatcctgcaactggaagaattcataccaactttattcagacaggtacggcaactggaagacttgcaagtgcagagcccaatctgcaaaatattcctgtaaaatatgatgagggaaagctaataagaaaggcatttgttccagatgaaggttatgtgttgatagatgctgattattctcagattgagcttagaatacttgcacatatctctgaggatgaacgactgataaatgcttttaaaaataaccttgatattcattcacagacggcggcagagatctttggtgtggatataagtcaggttacaccaattatgcgaagccaggcaaaagcagttaactttggaattgtatatggtatatctgattatggactttcacgggatataaagatttcaagaaaagaagcagccgagtttattaatcgttattttgaaaagtatcccagagtaaaagaatatttggacaatgtcgtcaagtttgcccgtgaaaacggatttgttttgacaatatttaacaggaaaaggtatatcaaggatataaagtctactaataaaaacctgagaaaatatgcagagagaatagcaatgaattcacctatccagggaagtgctgcagatattatgaaaatagcaatgataagagtttataaaaagctaaaagaaaacaatttaaaatcaagaattattctgcaggtccatgacgaacttttgattgaatcaccctatgaagagaaagagatagtaaaggaaatagtaaaatcggagatggaaaatgcggttttattgaaagttcctttggtagttgaagtgaaagaaggttcaaattggtatgaaacaaagtaaaggatcc

SEQ ID NO: 1740 - DNA, 2623 bp, Artificial Sequence
  Description of Artificial Sequence: Synthetic DNA sequence of Caldicellulosiruptor TOK13B DNA Polymerase N780M
atgaaatacctgctgccgaccgctgctgctggtctgctgctcctcgctgcccagccggcgatggccatggaatttgttatttttgatgggaatagtattctgtatagagctttttttgccttgccacagcttactacctcaacaggcatacctacaaatgctatatatggttttttgaatgtgctgttaaaatacttagattctgaaaaaccggattatgtagcagtagcttttgacaaaaaaggcagagctgtccgaaaaagtgaatatgaagaatacaaggctaacagaaaaccgatgccagattctcttcaggttcagataccttacgtaagagaaatacttgctgctctgaacattcctgtactgaaatgtgaagggtatgaagctgatgacgttataggcacacttgtaaatagatttaaagcccaggatttagagattgtgataataaccggagacagagatacacttcagttacttgataaaaatgtaattgtcaaaatagtcacaacaaggtttgacaggacaactgaagatttgtatgctgtagaaaatgtaaaagaaaaatatggtgtttttgcgcatcaggttgttgactataaagcattagtaggtgatgcgtcagacaatataccaggtgttaagggaattggagataaaactgccataaagctgttagaagagtaccagactctggagaatatatatcagaatctaaataacattaaaggagcgctaaaagagaagttggaatcaggaaaagacatggcatttttatcaaaaagactggctactatcatatgcgatttaccaattgaggtgaatcttgaagaattaaaaaccaaagaatgggacaaagaaagactttatcagattttacttcaacttgagtttaaaagctttattaaaagactgggcttttcagaagagattaactatgcaaggcagaactttcagctacctgaatttagtattaaagaacttcgtgatgtttcagcaatagggggcaaagaaatctatctattgtactcagatgaagaaggacttttttatatttatgaccatcaaacctcaaccatttttacaacttctgataaggaagctattaaagatcttttaacactccaaagcattcaaaaggttgtatatgatttaaaaaatatactccataaggtggactttgatgaagctaatcagataaaaaattgtaatgatgttatgttggcttcatatgttttggacagtacacgcagttcgtacgatttggaaacattgtttatttcttatctcaacactgatatagctgcaatcaaagagaatagatgggctggtgctacagttttattaagaaatctttgggatgaactttcaaaactcattgatttaaactcggcccaatacgtttatgagagcatagagatgcctcttgttcccattttatatgaaatggagaaaatcggttttaaggttgacaaaaacactttgcaggagtatacaaaagagattgagagcaagcttttaaagttggaatcacagatttatcaaatagccggtgaatggtttaacataaactcgccaaaacaactctcatatatattattcgaaaaactgaagcttccggttgttaaaaagaccaaaacaggatattcaacagatgccgaggtattagaagagctgtatgataaacatgacataataccgcttattctggattatagaatgtatacgaaaatactgacaacttactgtcagggactggttcaggcaataaatcctgcaactggaagaattcataccaactttattcagacaggtacggcaactggaagacttgcaagtgcagagcccaatctgcaaaatattcctgtaaaatatgatgagggaaagctaataagaaaggcatttgttccagatgaaggttatgtgttgatagatgctgattattctcagattgagcttagaatacttgcacatatctctgaggatgaacgactgataaatgcttttaaaaataaccttgatattcattcacagacggcggcagagatctttggtgtggatataagtcaggttacaccaattatgcgaagccaggcaaaagcagttaactttggaattgtatatggtatatctgattatggactttcacgggatataaagatttcaagaaaagaagcagccgagtttattaatcgttattttgaaaagtatcccagagtaaaagaatatttggacaatgtcgtcaagtttgcccgtgaaaacggatttgttttgacaatatttaacaggaaaaggtatatcaaggatataaagtctactaataaaaacctgagaatgtatgcagagagaatagcaatgaattcacctatccagggaagtgctgcagatattatgaaaatagcaatgataagagtttataaaaagctaaaagaaaacaatttaaaatcaagaattattctgcaggtccatgacgaacttttgattgaatcaccctatgaagagaaagagatagtaaaggaaatagtaaaatcggagatggaaaatgcggttttattgaaagttcctttggtagttgaagtgaaagaaggttcaaattggtatgaaacaaagtaaaggatcc

SEQ ID NO: 1741 - DNA, 2623 bp, Artificial Sequence
  Description of Artificial Sequence: Synthetic DNA sequence of Caldicellulosiruptor TOK13B DNA Polymerase N780F
atgaaatacctgctgccgaccgctgctgctggtctgctgctcctcgctgcccagccggcgatggccatggaatttgttatttttgatgggaatagtattctgtatagagctttttttgccttgccacagcttactacctcaacaggcatacctacaaatgctatatatggttttttgaatgtgctgttaaaatacttagattctgaaaaaccggattatgtagcagtagcttttgacaaaaaaggcagagctgtccgaaaaagtgaatatgaagaatacaaggctaacagaaaaccgatgccagattctcttcaggttcagataccttacgtaagagaaatacttgctgctctgaacattcctgtactgaaatgtgaagggtatgaagctgatgacgttataggcacacttgtaaatagatttaaagcccaggatttagagattgtgataataaccggagacagagatacacttcagttacttgataaaaatgtaattgtcaaaatagtcacaacaaggtttgacaggacaactgaagatttgtatgctgtagaaaatgtaaaagaaaaatatggtgtttttgcgcatcaggttgttgactataaagcattagtaggtgatgcgtcagacaatataccaggtgttaagggaattggagataaaactgccataaagctgttagaagagtaccagactctggagaatatatatcagaatctaaataacattaaaggagcgctaaaagagaagttggaatcaggaaaagacatggcatttttatcaaaaagactggctactatcatatgcgatttaccaattgaggtgaatcttgaagaattaaaaaccaaagaatgggacaaagaaagactttatcagattttacttcaacttgagtttaaaagctttattaaaagactgggcttttcagaagagattaactatgcaaggcagaactttcagctacctgaatttagtattaaagaacttcgtgatgtttcagcaatagggggcaaagaaatctatctattgtactcagatgaagaaggacttttttatatttatgaccatcaaacctcaaccatttttacaacttctgataaggaagctattaaagatcttttaacactccaaagcattcaaaaggttgtatatgatttaaaaaatatactccataaggtggactttgatgaagctaatcagataaaaaattgtaatgatgttatgttggcttcatatgttttggacagtacacgcagttcgtacgatttggaaacattgtttatttcttatctcaacactgatatagctgcaatcaaagagaatagatgggctggtgctacagttttattaagaaatctttgggatgaactttcaaaactcattgatttaaactcggcccaatacgtttatgagagcatagagatgcctcttgttcccattttatatgaaatggagaaaatcggttttaaggttgacaaaaacactttgcaggagtatacaaaagagattgagagcaagcttttaaagttggaatcacagatttatcaaatagccggtgaatggtttaacataaactcgccaaaacaactctcatatatattattcgaaaaactgaagcttccggttgttaaaaagaccaaaacaggatattcaacagatgccgaggtattagaagagctgtatgataaacatgacataataccgcttattctggattatagaatgtatacgaaaatactgacaacttactgtcagggactggttcaggcaataaatcctgcaactggaagaattcataccaactttattcagacaggtacggcaactggaagacttgcaagtgcagagcccaatctgcaaaatattcctgtaaaatatgatgagggaaagctaataagaaaggcatttgttccagatgaaggttatgtgttgatagatgctgattattctcagattgagcttagaatacttgcacatatctctgaggatgaacgactgataaatgcttttaaaaataaccttgatattcattcacagacggcggcagagatctttggtgtggatataagtcaggttacaccaattatgcgaagccaggcaaaagcagttaactttggaattgtatatggtatatctgattatggactttcacgggatataaagatttcaagaaaagaagcagccgagtttattaatcgttattttgaaaagtatcccagagtaaaagaatatttggacaatgtcgtcaagtttgcccgtgaaaacggatttgttttgacaatatttaacaggaaaaggtatatcaaggatataaagtctactaataaaaacctgagattttatgcagagagaatagcaatgaattcacctatccagggaagtgctgcagatattatgaaaatagcaatgataagagtttataaaaagctaaaagaaaacaatttaaaatcaagaattattctgcaggtccatgacgaacttttgattgaatcaccctatgaagagaaagagatagtaaaggaaatagtaaaatcggagatggaaaatgcggttttattgaaagttcctttggtagttgaagtgaaagaaggttcaaattggtatgaaacaaagtaaaggatcc

SEQ ID NO: 1742 - DNA, 2623 bp, Artificial Sequence
  Description of Artificial Sequence: Synthetic DNA sequence of Caldicellulosiruptor TOK13B DNA Polymerase N780P
atgaaatacctgctgccgaccgctgctgctggtctgctgctcctcgctgcccagccggcgatggccatggaatttgttatttttgatgggaatagtattctgtatagagctttttttgccttgccacagcttactacctcaacaggcatacctacaaatgctatatatggttttttgaatgtgctgttaaaatacttagattctgaaaaaccggattatgtagcagtagcttttgacaaaaaaggcagagctgtccgaaaaagtgaatatgaagaatacaaggctaacagaaaaccgatgccagattctcttcaggttcagataccttacgtaagagaaatacttgctgctctgaacattcctgtactgaaatgtgaagggtatgaagctgatgacgttataggcacacttgtaaatagatttaaagcccaggatttagagattgtgataataaccggagacagagatacacttcagttacttgataaaaatgtaattgtcaaaatagtcacaacaaggtttgacaggacaactgaagatttgtatgctgtagaaaatgtaaaagaaaaatatggtgtttttgcgcatcaggttgttgactataaagcattagtaggtgatgcgtcagacaatataccaggtgttaagggaattggagataaaactgccataaagctgttagaagagtaccagactctggagaatatatatcagaatctaaataacattaaaggagcgctaaaagagaagttggaatcaggaaaagacatggcatttttatcaaaaagactggctactatcatatgcgatttaccaattgaggtgaatcttgaagaattaaaaaccaaagaatgggacaaagaaagactttatcagattttacttcaacttgagtttaaaagctttattaaaagactgggcttttcagaagagattaactatgcaaggcagaactttcagctacctgaatttagtattaaagaacttcgtgatgtttcagcaatagggggcaaagaaatctatctattgtactcagatgaagaaggacttttttatatttatgaccatcaaacctcaaccatttttacaacttctgataaggaagctattaaagatcttttaacactccaaagcattcaaaaggttgtatatgatttaaaaaatatactccataaggtggactttgatgaagctaatcagataaaaaattgtaatgatgttatgttggcttcatatgttttggacagtacacgcagttcgtacgatttggaaacattgtttatttcttatctcaacactgatatagctgcaatcaaagagaatagatgggctggtgctacagttttattaagaaatctttgggatgaactttcaaaactcattgatttaaactcggcccaatacgtttatgagagcatagagatgcctcttgttcccattttatatgaaatggagaaaatcggttttaaggttgacaaaaacactttgcaggagtatacaaaagagattgagagcaagcttttaaagttggaatcacagatttatcaaatagccggtgaatggtttaacataaactcgccaaaacaactctcatatatattattcgaaaaactgaagcttccggttgttaaaaagaccaaaacaggatattcaacagatgccgaggtattagaagagctgtatgataaacatgacataataccgcttattctggattatagaatgtatacgaaaatactgacaacttactgtcagggactggttcaggcaataaatcctgcaactggaagaattcataccaactttattcagacaggtacggcaactggaagacttgcaagtgcagagcccaatctgcaaaatattcctgtaaaatatgatgagggaaagctaataagaaaggcatttgttccagatgaaggttatgtgttgatagatgctgattattctcagattgagcttagaatacttgcacatatctctgaggatgaacgactgataaatgcttttaaaaataaccttgatattcattcacagacggcggcagagatctttggtgtggatataagtcaggttacaccaattatgcgaagccaggcaaaagcagttaactttggaattgtatatggtatatctgattatggactttcacgggatataaagatttcaagaaaagaagcagccgagtttattaatcgttattttgaaaagtatcccagagtaaaagaatatttggacaatgtcgtcaagtttgcccgtgaaaacggatttgttttgacaatatttaacaggaaaaggtatatcaaggatataaagtctactaataaaaacctgagaccttatgcagagagaatagcaatgaattcacctatccagggaagtgctgcagatattatgaaaatagcaatgataagagtttataaaaagctaaaagaaaacaatttaaaatcaagaattattctgcaggtccatgacgaacttttgattgaatcaccctatgaagagaaagagatagtaaaggaaatagtaaaatcggagatggaaaatgcggttttattgaaagttcctttggtagttgaagtgaaagaaggttcaaattggtatgaaacaaagtaaaggatcc

SEQ ID NO: 1743 - DNA, 2623 bp, Artificial Sequence
  Description of Artificial Sequence: Synthetic DNA sequence of Caldicellulosiruptor TOK13B DNA Polymerase N780S
atgaaatacctgctgccgaccgctgctgctggtctgctgctcctcgctgcccagccggcgatggccatggaatttgttatttttgatgggaatagtattctgtatagagctttttttgccttgccacagcttactacctcaacaggcatacctacaaatgctatatatggttttttgaatgtgctgttaaaatacttagattctgaaaaaccggattatgtagcagtagcttttgacaaaaaaggcagagctgtccgaaaaagtgaatatgaagaatacaaggctaacagaaaaccgatgccagattctcttcaggttcagataccttacgtaagagaaatacttgctgctctgaacattcctgtactgaaatgtgaagggtatgaagctgatgacgttataggcacacttgtaaatagatttaaagcccaggatttagagattgtgataataaccggagacagagatacacttcagttacttgataaaaatgtaattgtcaaaatagtcacaacaaggtttgacaggacaactgaagatttgtatgctgtagaaaatgtaaaagaaaaatatggtgtttttgcgcatcaggttgttgactataaagcattagtaggtgatgcgtcagacaatataccaggtgttaagggaattggagataaaactgccataaagctgttagaagagtaccagactctggagaatatatatcagaatctaaataacattaaaggagcgctaaaagagaagttggaatcaggaaaagacatggcatttttatcaaaaagactggctactatcatatgcgatttaccaattgaggtgaatcttgaagaattaaaaaccaaagaatgggacaaagaaagactttatcagattttacttcaacttgagtttaaaagctttattaaaagactgggcttttcagaagagattaactatgcaaggcagaactttcagctacctgaatttagtattaaagaacttcgtgatgtttcagcaatagggggcaaagaaatctatctattgtactcagatgaagaaggacttttttatatttatgaccatcaaacctcaaccatttttacaacttctgataaggaagctattaaagatcttttaacactccaaagcattcaaaaggttgtatatgatttaaaaaatatactccataaggtggactttgatgaagctaatcagataaaaaattgtaatgatgttatgttggcttcatatgttttggacagtacacgcagttcgtacgatttggaaacattgtttatttcttatctcaacactgatatagctgcaatcaaagagaatagatgggctggtgctacagttttattaagaaatctttgggatgaactttcaaaactcattgatttaaactcggcccaatacgtttatgagagcatagagatgcctcttgttcccattttatatgaaatggagaaaatcggttttaaggttgacaaaaacactttgcaggagtatacaaaagagattgagagcaagcttttaaagttggaatcacagatttatcaaatagccggtgaatggtttaacataaactcgccaaaacaactctcatatatattattcgaaaaactgaagcttccggttgttaaaaagaccaaaacaggatattcaacagatgccgaggtattagaagagctgtatgataaacatgacataataccgcttattctggattatagaatgtatacgaaaatactgacaacttactgtcagggactggttcaggcaataaatcctgcaactggaagaattcataccaactttattcagacaggtacggcaactggaagacttgcaagtgcagagcccaatctgcaaaatattcctgtaaaatatgatgagggaaagctaataagaaaggcatttgttccagatgaaggttatgtgttgatagatgctgattattctcagattgagcttagaatacttgcacatatctctgaggatgaacgactgataaatgcttttaaaaataaccttgatattcattcacagacggcggcagagatctttggtgtggatataagtcaggttacaccaattatgcgaagccaggcaaaagcagttaactttggaattgtatatggtatatctgattatggactttcacgggatataaagatttcaagaaaagaagcagccgagtttattaatcgttattttgaaaagtatcccagagtaaaagaatatttggacaatgtcgtcaagtttgcccgtgaaaacggatttgttttgacaatatttaacaggaaaaggtatatcaaggatataaagtctactaataaaaacctgagatcttatgcagagagaatagcaatgaattcacctatccagggaagtgctgcagatattatgaaaatagcaatgataagagtttataaaaagctaaaagaaaacaatttaaaatcaagaattattctgcaggtccatgacgaacttttgattgaatcaccctatgaagagaaagagatagtaaaggaaatagtaaaatcggagatggaaaatgcggttttattgaaagttcctttggtagttgaagtgaaagaaggttcaaattggtatgaaacaaagtaaaggatcc

SEQ ID NO: 1744 - DNA, 2623 bp, Artificial Sequence
  Description of Artificial Sequence: Synthetic DNA sequence of Caldicellulosiruptor TOK13B DNA Polymerase N780T
atgaaatacctgctgccgaccgctgctgctggtctgctgctcctcgctgcccagccggcgatggccatggaatttgttatttttgatgggaatagtattctgtatagagctttttttgccttgccacagcttactacctcaacaggcatacctacaaatgctatatatggttttttgaatgtgctgttaaaatacttagattctgaaaaaccggattatgtagcagtagcttttgacaaaaaaggcagagctgtccgaaaaagtgaatatgaagaatacaaggctaacagaaaaccgatgccagattctcttcaggttcagataccttacgtaagagaaatacttgctgctctgaacattcctgtactgaaatgtgaagggtatgaagctgatgacgttataggcacacttgtaaatagatttaaagcccaggatttagagattgtgataataaccggagacagagatacacttcagttacttgataaaaatgtaattgtcaaaatagtcacaacaaggtttgacaggacaactgaagatttgtatgctgtagaaaatgtaaaagaaaaatatggtgtttttgcgcatcaggttgttgactataaagcattagtaggtgatgcgtcagacaatataccaggtgttaagggaattggagataaaactgccataaagctgttagaagagtaccagactctggagaatatatatcagaatctaaataacattaaaggagcgctaaaagagaagttggaatcaggaaaagacatggcatttttatcaaaaagactggctactatcatatgcgatttaccaattgaggtgaatcttgaagaattaaaaaccaaagaatgggacaaagaaagactttatcagattttacttcaacttgagtttaaaagctttattaaaagactgggcttttcagaagagattaactatgcaaggcagaactttcagctacctgaatttagtattaaagaacttcgtgatgtttcagcaatagggggcaaagaaatctatctattgtactcagatgaagaaggacttttttatatttatgaccatcaaacctcaaccatttttacaacttctgataaggaagctattaaagatcttttaacactccaaagcattcaaaaggttgtatatgatttaaaaaatatactccataaggtggactttgatgaagctaatcagataaaaaattgtaatgatgttatgttggcttcatatgttttggacagtacacgcagttcgtacgatttggaaacattgtttatttcttatctcaacactgatatagctgcaatcaaagagaatagatgggctggtgctacagttttattaagaaatctttgggatgaactttcaaaactcattgatttaaactcggcccaatacgtttatgagagcatagagatgcctcttgttcccattttatatgaaatggagaaaatcggttttaaggttgacaaaaacactttgcaggagtatacaaaagagattgagagcaagcttttaaagttggaatcacagatttatcaaatagccggtgaatggtttaacataaactcgccaaaacaactctcatatatattattcgaaaaactgaagcttccggttgttaaaaagaccaaaacaggatattcaacagatgccgaggtattagaagagctgtatgataaacatgacataataccgcttattctggattatagaatgtatacgaaaatactgacaacttactgtcagggactggttcaggcaataaatcctgcaactggaagaattcataccaactttattcagacaggtacggcaactggaagacttgcaagtgcagagcccaatctgcaaaatattcctgtaaaatatgatgagggaaagctaataagaaaggcatttgttccagatgaaggttatgtgttgatagatgctgattattctcagattgagcttagaatacttgcacatatctctgaggatgaacgactgataaatgcttttaaaaataaccttgatattcattcacagacggcggcagagatctttggtgtggatataagtcaggttacaccaattatgcgaagccaggcaaaagcagttaactttggaattgtatatggtatatctgattatggactttcacgggatataaagatttcaagaaaagaagcagccgagtttattaatcgttattttgaaaagtatcccagagtaaaagaatatttggacaatgtcgtcaagtttgcccgtgaaaacggatttgttttgacaatatttaacaggaaaaggtatatcaaggatataaagtctactaataaaaacctgagaacttatgcagagagaatagcaatgaattcacctatccagggaagtgctgcagatattatgaaaatagcaatgataagagtttataaaaagctaaaagaaaacaatttaaaatcaagaattattctgcaggtccatgacgaacttttgattgaatcaccctatgaagagaaagagatagtaaaggaaatagtaaaatcggagatggaaaatgcggttttattgaaagttcctttggtagttgaagtgaaagaaggttcaaattggtatgaaacaaagtaaaggatcc

SEQ ID NO: 1745 - DNA, 2623 bp, Artificial Sequence
  Description of Artificial Sequence: Synthetic DNA sequence of Caldicellulosiruptor TOK13B DNA Polymerase N780W
atgaaatacctgctgccgaccgctgctgctggtctgctgctcctcgctgcccagccggcgatggccatggaatttgttatttttgatgggaatagtattctgtatagagctttttttgccttgccacagcttactacctcaacaggcatacctacaaatgctatatatggttttttgaatgtgctgttaaaatacttagattctgaaaaaccggattatgtagcagtagcttttgacaaaaaaggcagagctgtccgaaaaagtgaatatgaagaatacaaggctaacagaaaaccgatgccagattctcttcaggttcagataccttacgtaagagaaatacttgctgctctgaacattcctgtactgaaatgtgaagggtatgaagctgatgacgttataggcacacttgtaaatagatttaaagcccaggatttagagattgtgataataaccggagacagagatacacttcagttacttgataaaaatgtaattgtcaaaatagtcacaacaaggtttgacaggacaactgaagatttgtatgctgtagaaaatgtaaaagaaaaatatggtgtttttgcgcatcaggttgttgactataaagcattagtaggtgatgcgtcagacaatataccaggtgttaagggaattggagataaaactgccataaagctgttagaagagtaccagactctggagaatatatatcagaatctaaataacattaaaggagcgctaaaagagaagttggaatcaggaaaagacatggcatttttatcaaaaagactggctactatcatatgcgatttaccaattgaggtgaatcttgaagaattaaaaaccaaagaatgggacaaagaaagactttatcagattttacttcaacttgagtttaaaagctttattaaaagactgggcttttcagaagagattaactatgcaaggcagaactttcagctacctgaatttagtattaaagaacttcgtgatgtttcagcaatagggggcaaagaaatctatctattgtactcagatgaagaaggacttttttatatttatgaccatcaaacctcaaccatttttacaacttctgataaggaagctattaaagatcttttaacactccaaagcattcaaaaggttgtatatgatttaaaaaatatactccataaggtggactttgatgaagctaatcagataaaaaattgtaatgatgttatgttggcttcatatgttttggacagtacacgcagttcgtacgatttggaaacattgtttatttcttatctcaacactgatatagctgcaatcaaagagaatagatgggctggtgctacagttttattaagaaatctttgggatgaactttcaaaactcattgatttaaactcggcccaatacgtttatgagagcatagagatgcctcttgttcccattttatatgaaatggagaaaatcggttttaaggttgacaaaaacactttgcaggagtatacaaaagagattgagagcaagcttttaaagttggaatcacagatttatcaaatagccggtgaatggtttaacataaactcgccaaaacaactctcatatatattattcgaaaaactgaagcttccggttgttaaaaagaccaaaacaggatattcaacagatgccgaggtattagaagagctgtatgataaacatgacataataccgcttattctggattatagaatgtatacgaaaatactgacaacttactgtcagggactggttcaggcaataaatcctgcaactggaagaattcataccaactttattcagacaggtacggcaactggaagacttgcaagtgcagagcccaatctgcaaaatattcctgtaaaatatgatgagggaaagctaataagaaaggcatttgttccagatgaaggttatgtgttgatagatgctgattattctcagattgagcttagaatacttgcacatatctctgaggatgaacgactgataaatgcttttaaaaataaccttgatattcattcacagacggcggcagagatctttggtgtggatataagtcaggttacaccaattatgcgaagccaggcaaaagcagttaactttggaattgtatatggtatatctgattatggactttcacgggatataaagatttcaagaaaagaagcagccgagtttattaatcgttattttgaaaagtatcccagagtaaaagaatatttggacaatgtcgtcaagtttgcccgtgaaaacggatttgttttgacaatatttaacaggaaaaggtatatcaaggatataaagtctactaataaaaacctgagatggtatgcagagagaatagcaatgaattcacctatccagggaagtgctgcagatattatgaaaatagcaatgataagagtttataaaaagctaaaagaaaacaatttaaaatcaagaattattctgcaggtccatgacgaacttttgattgaatcaccctatgaagagaaagagatagtaaaggaaatagtaaaatcggagatggaaaatgcggttttattgaaagttcctttggtagttgaagtgaaagaaggttcaaattggtatgaaacaaagtaaaggatcc

SEQ ID NO: 1746 - DNA, 2623 bp, Artificial Sequence
  Description of Artificial Sequence: Synthetic DNA sequence of Caldicellulosiruptor TOK13B DNA Polymerase N780Y
atgaaatacctgctgccgaccgctgctgctggtctgctgctcctcgctgcccagccggcgatggccatggaatttgttatttttgatgggaatagtattctgtatagagctttttttgccttgccacagcttactacctcaacaggcatacctacaaatgctatatatggttttttgaatgtgctgttaaaatacttagattctgaaaaaccggattatgtagcagtagcttttgacaaaaaaggcagagctgtccgaaaaagtgaatatgaagaatacaaggctaacagaaaaccgatgccagattctcttcaggttcagataccttacgtaagagaaatacttgctgctctgaacattcctgtactgaaatgtgaagggtatgaagctgatgacgttataggcacacttgtaaatagatttaaagcccaggatttagagattgtgataataaccggagacagagatacacttcagttacttgataaaaatgtaattgtcaaaatagtcacaacaaggtttgacaggacaactgaagatttgtatgctgtagaaaatgtaaaagaaaaatatggtgtttttgcgcatcaggttgttgactataaagcattagtaggtgatgcgtcagacaatataccaggtgttaagggaattggagataaaactgccataaagctgttagaagagtaccagactctggagaatatatatcagaatctaaataacattaaaggagcgctaaaagagaagttggaatcaggaaaagacatggcatttttatcaaaaagactggctactatcatatgcgatttaccaattgaggtgaatcttgaagaattaaaaaccaaagaatgggacaaagaaagactttatcagattttacttcaacttgagtttaaaagctttattaaaagactgggcttttcagaagagattaactatgcaaggcagaactttcagctacctgaatttagtattaaagaacttcgtgatgtttcagcaatagggggcaaagaaatctatctattgtactcagatgaagaaggacttttttatatttatgaccatcaaacctcaaccatttttacaacttctgataaggaagctattaaagatcttttaacactccaaagcattcaaaaggttgtatatgatttaaaaaatatactccataaggtggactttgatgaagctaatcagataaaaaattgtaatgatgttatgttggcttcatatgttttggacagtacacgcagttcgtacgatttggaaacattgtttatttcttatctcaacactgatatagctgcaatcaaagagaatagatgggctggtgctacagttttattaagaaatctttgggatgaactttcaaaactcattgatttaaactcggcccaatacgtttatgagagcatagagatgcctcttgttcccattttatatgaaatggagaaaatcggttttaaggttgacaaaaacactttgcaggagtatacaaaagagattgagagcaagcttttaaagttggaatcacagatttatcaaatagccggtgaatggtttaacataaactcgccaaaacaactctcatatatattattcgaaaaactgaagcttccggttgttaaaaagaccaaaacaggatattcaacagatgccgaggtattagaagagctgtatgataaacatgacataataccgcttattctggattatagaatgtatacgaaaatactgacaacttactgtcagggactggttcaggcaataaatcctgcaactggaagaattcataccaactttattcagacaggtacggcaactggaagacttgcaagtgcagagcccaatctgcaaaatattcctgtaaaatatgatgagggaaagctaataagaaaggcatttgttccagatgaaggttatgtgttgatagatgctgattattctcagattgagcttagaatacttgcacatatctctgaggatgaacgactgataaatgcttttaaaaataaccttgatattcattcacagacggcggcagagatctttggtgtggatataagtcaggttacaccaattatgcgaagccaggcaaaagcagttaactttggaattgtatatggtatatctgattatggactttcacgggatataaagatttcaagaaaagaagcagccgagtttattaatcgttattttgaaaagtatcccagagtaaaagaatatttggacaatgtcgtcaagtttgcccgtgaaaacggatttgttttgacaatatttaacaggaaaaggtatatcaaggatataaagtctactaataaaaacctgagatattatgcagagagaatagcaatgaattcacctatccagggaagtgctgcagatattatgaaaatagcaatgataagagtttataaaaagctaaaagaaaacaatttaaaatcaagaattattctgcaggtccatgacgaacttttgattgaatcaccctatgaagagaaagagatagtaaaggaaatagtaaaatcggagatggaaaatgcggttttattgaaagttcctttggtagttgaagtgaaagaaggttcaaattggtatgaaacaaagtaaaggatcc

SEQ ID NO: 1747 - DNA, 2623 bp, Artificial Sequence
  Description of Artificial Sequence: Synthetic DNA sequence of Caldicellulosiruptor TOK13B DNA Polymerase N780V
atgaaatacctgctgccgaccgctgctgctggtctgctgctcctcgctgcccagccggcgatggccatggaatttgttatttttgatgggaatagtattctgtatagagctttttttgccttgccacagcttactacctcaacaggcatacctacaaatgctatatatggttttttgaatgtgctgttaaaatacttagattctgaaaaaccggattatgtagcagtagcttttgacaaaaaaggcagagctgtccgaaaaagtgaatatgaagaatacaaggctaacagaaaaccgatgccagattctcttcaggttcagataccttacgtaagagaaatacttgctgctctgaacattcctgtactgaaatgtgaagggtatgaagctgatgacgttataggcacacttgtaaatagatttaaagcccaggatttagagattgtgataataaccggagacagagatacacttcagttacttgataaaaatgtaattgtcaaaatagtcacaacaaggtttgacaggacaactgaagatttgtatgctgtagaaaatgtaaaagaaaaatatggtgtttttgcgcatcaggttgttgactataaagcattagtaggtgatgcgtcagacaatataccaggtgttaagggaattggagataaaactgccataaagctgttagaagagtaccagactctggagaatatatatcagaatctaaataacattaaaggagcgctaaaagagaagttggaatcaggaaaagacatggcatttttatcaaaaagactggctactatcatatgcgatttaccaattgaggtgaatcttgaagaattaaaaaccaaagaatgggacaaagaaagactttatcagattttacttcaacttgagtttaaaagctttattaaaagactgggcttttcagaagagattaactatgcaaggcagaactttcagctacctgaatttagtattaaagaacttcgtgatgtttcagcaatagggggcaaagaaatctatctattgtactcagatgaagaaggacttttttatatttatgaccatcaaacctcaaccatttttacaacttctgataaggaagctattaaagatcttttaacactccaaagcattcaaaaggttgtatatgatttaaaaaatatactccataaggtggactttgatgaagctaatcagataaaaaattgtaatgatgttatgttggcttcatatgttttggacagtacacgcagttcgtacgatttggaaacattgtttatttcttatctcaacactgatatagctgcaatcaaagagaatagatgggctggtgctacagttttattaagaaatctttgggatgaactttcaaaactcattgatttaaactcggcccaatacgtttatgagagcatagagatgcctcttgttcccattttatatgaaatggagaaaatcggttttaaggttgacaaaaacactttgcaggagtatacaaaagagattgagagcaagcttttaaagttggaatcacagatttatcaaatagccggtgaatggtttaacataaactcgccaaaacaactctcatatatattattcgaaaaactgaagcttccggttgttaaaaagaccaaaacaggatattcaacagatgccgaggtattagaagagctgtatgataaacatgacataataccgcttattctggattatagaatgtatacgaaaatactgacaacttactgtcagggactggttcaggcaataaatcctgcaactggaagaattcataccaactttattcagacaggtacggcaactggaagacttgcaagtgcagagcccaatctgcaaaatattcctgtaaaatatgatgagggaaagctaataagaaaggcatttgttccagatgaaggttatgtgttgatagatgctgattattctcagattgagcttagaatacttgcacatatctctgaggatgaacgactgataaatgcttttaaaaataaccttgatattcattcacagacggcggcagagatctttggtgtggatataagtcaggttacaccaattatgcgaagccaggcaaaagcagttaactttggaattgtatatggtatatctgattatggactttcacgggatataaagatttcaagaaaagaagcagccgagtttattaatcgttattttgaaaagtatcccagagtaaaagaatatttggacaatgtcgtcaagtttgcccgtgaaaacggatttgttttgacaatatttaacaggaaaaggtatatcaaggatataaagtctactaataaaaacctgagagtttatgcagagagaatagcaatgaattcacctatccagggaagtgctgcagatattatgaaaatagcaatgataagagtttataaaaagctaaaagaaaacaatttaaaatcaagaattattctgcaggtccatgacgaacttttgattgaatcaccctatgaagagaaagagatagtaaaggaaatagtaaaatcggagatggaaaatgcggttttattgaaagttcctttggtagttgaagtgaaagaaggttcaaattggtatgaaacaaagtaaaggatcc

SEQ ID NO: 1748 - DNA, 2623 bp, Artificial Sequence
  Description of Artificial Sequence: Synthetic DNA sequence of Caldicellulosiruptor TOK13B DNA Polymerase Y781A
atgaaatacctgctgccgaccgctgctgctggtctgctgctcctcgctgcccagccggcgatggccatggaatttgttatttttgatgggaatagtattctgtatagagctttttttgccttgccacagcttactacctcaacaggcatacctacaaatgctatatatggttttttgaatgtgctgttaaaatacttagattctgaaaaaccggattatgtagcagtagcttttgacaaaaaaggcagagctgtccgaaaaagtgaatatgaagaatacaaggctaacagaaaaccgatgccagattctcttcaggttcagataccttacgtaagagaaatacttgctgctctgaacattcctgtactgaaatgtgaagggtatgaagctgatgacgttataggcacacttgtaaatagatttaaagcccaggatttagagattgtgataataaccggagacagagatacacttcagttacttgataaaaatgtaattgtcaaaatagtcacaacaaggtttgacaggacaactgaagatttgtatgctgtagaaaatgtaaaagaaaaatatggtgtttttgcgcatcaggttgttgactataaagcattagtaggtgatgcgtcagacaatataccaggtgttaagggaattggagataaaactgccataaagctgttagaagagtaccagactctggagaatatatatcagaatctaaataacattaaaggagcgctaaaagagaagttggaatcaggaaaagacatggcatttttatcaaaaagactggctactatcatatgcgatttaccaattgaggtgaatcttgaagaattaaaaaccaaagaatgggacaaagaaagactttatcagattttacttcaacttgagtttaaaagctttattaaaagactgggcttttcagaagagattaactatgcaaggcagaactttcagctacctgaatttagtattaaagaacttcgtgatgtttcagcaatagggggcaaagaaatctatctattgtactcagatgaagaaggacttttttatatttatgaccatcaaacctcaaccatttttacaacttctgataaggaagctattaaagatcttttaacactccaaagcattcaaaaggttgtatatgatttaaaaaatatactccataaggtggactttgatgaagctaatcagataaaaaattgtaatgatgttatgttggcttcatatgttttggacagtacacgcagttcgtacgatttggaaacattgtttatttcttatctcaacactgatatagctgcaatcaaagagaatagatgggctggtgctacagttttattaagaaatctttgggatgaactttcaaaactcattgatttaaactcggcccaatacgtttatgagagcatagagatgcctcttgttcccattttatatgaaatggagaaaatcggttttaaggttgacaaaaacactttgcaggagtatacaaaagagattgagagcaagcttttaaagttggaatcacagatttatcaaatagccggtgaatggtttaacataaactcgccaaaacaactctcatatatattattcgaaaaactgaagcttccggttgttaaaaagaccaaaacaggatattcaacagatgccgaggtattagaagagctgtatgataaacatgacataataccgcttattctggattatagaatgtatacgaaaatactgacaacttactgtcagggactggttcaggcaataaatcctgcaactggaagaattcataccaactttattcagacaggtacggcaactggaagacttgcaagtgcagagcccaatctgcaaaatattcctgtaaaatatgatgagggaaagctaataagaaaggcatttgttccagatgaaggttatgtgttgatagatgctgattattctcagattgagcttagaatacttgcacatatctctgaggatgaacgactgataaatgcttttaaaaataaccttgatattcattcacagacggcggcagagatctttggtgtggatataagtcaggttacaccaattatgcgaagccaggcaaaagcagttaactttggaattgtatatggtatatctgattatggactttcacgggatataaagatttcaagaaaagaagcagccgagtttattaatcgttattttgaaaagtatcccagagtaaaagaatatttggacaatgtcgtcaagtttgcccgtgaaaacggatttgttttgacaatatttaacaggaaaaggtatatcaaggatataaagtctactaataaaaacctgagaaacgctgcagagagaatagcaatgaattcacctatccagggaagtgctgcagatattatgaaaatagcaatgataagagtttataaaaagctaaaagaaaacaatttaaaatcaagaattattctgcaggtccatgacgaacttttgattgaatcaccctatgaagagaaagagatagtaaaggaaatagtaaaatcggagatggaaaatgcggttttattgaaagttcctttggtagttgaagtgaaagaaggttcaaattggtatgaaacaaagtaaaggatcc

SEQ ID NO: 1749 - DNA, 2623 bp, Artificial Sequence
  Description of Artificial Sequence: Synthetic DNA sequence of Caldicellulosiruptor TOK13B DNA Polymerase Y781R
atgaaatacctgctgccgaccgctgctgctggtctgctgctcctcgctgcccagccggcgatggccatggaatttgttatttttgatgggaatagtattctgtatagagctttttttgccttgccacagcttactacctcaacaggcatacctacaaatgctatatatggttttttgaatgtgctgttaaaatacttagattctgaaaaaccggattatgtagcagtagcttttgacaaaaaaggcagagctgtccgaaaaagtgaatatgaagaatacaaggctaacagaaaaccgatgccagattctcttcaggttcagataccttacgtaagagaaatacttgctgctctgaacattcctgtactgaaatgtgaagggtatgaagctgatgacgttataggcacacttgtaaatagatttaaagcccaggatttagagattgtgataataaccggagacagagatacacttcagttacttgataaaaatgtaattgtcaaaatagtcacaacaaggtttgacaggacaactgaagatttgtatgctgtagaaaatgtaaaagaaaaatatggtgtttttgcgcatcaggttgttgactataaagcattagtaggtgatgcgtcagacaatataccaggtgttaagggaattggagataaaactgccataaagctgttagaagagtaccagactctggagaatatatatcagaatctaaataacattaaaggagcgctaaaagagaagttggaatcaggaaaagacatggcatttttatcaaaaagactggctactatcatatgcgatttaccaattgaggtgaatcttgaagaattaaaaaccaaagaatgggacaaagaaagactttatcagattttacttcaacttgagtttaaaagctttattaaaagactgggcttttcagaagagattaactatgcaaggcagaactttcagctacctgaatttagtattaaagaacttcgtgatgtttcagcaatagggggcaaagaaatctatctattgtactcagatgaagaaggacttttttatatttatgaccatcaaacctcaaccatttttacaacttctgataaggaagctattaaagatcttttaacactccaaagcattcaaaaggttgtatatgatttaaaaaatatactccataaggtggactttgatgaagctaatcagataaaaaattgtaatgatgttatgttggcttcatatgttttggacagtacacgcagttcgtacgatttggaaacattgtttatttcttatctcaacactgatatagctgcaatcaaagagaatagatgggctggtgctacagttttattaagaaatctttgggatgaactttcaaaactcattgatttaaactcggcccaatacgtttatgagagcatagagatgcctcttgttcccattttatatgaaatggagaaaatcggttttaaggttgacaaaaacactttgcaggagtatacaaaagagattgagagcaagcttttaaagttggaatcacagatttatcaaatagccggtgaatggtttaacataaactcgccaaaacaactctcatatatattattcgaaaaactgaagcttccggttgttaaaaagaccaaaacaggatattcaacagatgccgaggtattagaagagctgtatgataaacatgacataataccgcttattctggattatagaatgtatacgaaaatactgacaacttactgtcagggactggttcaggcaataaatcctgcaactggaagaattcataccaactttattcagacaggtacggcaactggaagacttgcaagtgcagagcccaatctgcaaaatattcctgtaaaatatgatgagggaaagctaataagaaaggcatttgttccagatgaaggttatgtgttgatagatgctgattattctcagattgagcttagaatacttgcacatatctctgaggatgaacgactgataaatgcttttaaaaataaccttgatattcattcacagacggcggcagagatctttggtgtggatataagtcaggttacaccaattatgcgaagccaggcaaaagcagttaactttggaattgtatatggtatatctgattatggactttcacgggatataaagatttcaagaaaagaagcagccgagtttattaatcgttattttgaaaagtatcccagagtaaaagaatatttggacaatgtcgtcaagtttgcccgtgaaaacggatttgttttgacaatatttaacaggaaaaggtatatcaaggatataaagtctactaataaaaacctgagaaaccgtgcagagagaatagcaatgaattcacctatccagggaagtgctgcagatattatgaaaatagcaatgataagagtttataaaaagctaaaagaaaacaatttaaaatcaagaattattctgcaggtccatgacgaacttttgattgaatcaccctatgaagagaaagagatagtaaaggaaatagtaaaatcggagatggaaaatgcggttttattgaaagttcctttggtagttgaagtgaaagaaggttcaaattggtatgaaacaaagtaaaggatcc

SEQ ID NO: 1750 - DNA, 2623 bp, Artificial Sequence
  Description of Artificial Sequence: Synthetic DNA sequence of Caldicellulosiruptor TOK13B DNA Polymerase Y781N
atgaaatacctgctgccgaccgctgctgctggtctgctgctcctcgctgcccagccggcgatggccatggaatttgttatttttgatgggaatagtattctgtatagagctttttttgccttgccacagcttactacctcaacaggcatacctacaaatgctatatatggttttttgaatgtgctgttaaaatacttagattctgaaaaaccggattatgtagcagtagcttttgacaaaaaaggcagagctgtccgaaaaagtgaatatgaagaatacaaggctaacagaaaaccgatgccagattctcttcaggttcagataccttacgtaagagaaatacttgctgctctgaacattcctgtactgaaatgtgaagggtatgaagctgatgacgttataggcacacttgtaaatagatttaaagcccaggatttagagattgtgataataaccggagacagagatacacttcagttacttgataaaaatgtaattgtcaaaatagtcacaacaaggtttgacaggacaactgaagatttgtatgctgtagaaaatgtaaaagaaaaatatggtgtttttgcgcatcaggttgttgactataaagcattagtaggtgatgcgtcagacaatataccaggtgttaagggaattggagataaaactgccataaagctgttagaagagtaccagactctggagaatatatatcagaatctaaataacattaaaggagcgctaaaagagaagttggaatcaggaaaagacatggcatttttatcaaaaagactggctactatcatatgcgatttaccaattgaggtgaatcttgaagaattaaaaaccaaagaatgggacaaagaaagactttatcagattttacttcaacttgagtttaaaagctttattaaaagactgggcttttcagaagagattaactatgcaaggcagaactttcagctacctgaatttagtattaaagaacttcgtgatgtttcagcaatagggggcaaagaaatctatctattgtactcagatgaagaaggacttttttatatttatgaccatcaaacctcaaccatttttacaacttctgataaggaagctattaaagatcttttaacactccaaagcattcaaaaggttgtatatgatttaaaaaatatactccataaggtggactttgatgaagctaatcagataaaaaattgtaatgatgttatgttggcttcatatgttttggacagtacacgcagttcgtacgatttggaaacattgtttatttcttatctcaacactgatatagctgcaatcaaagagaatagatgggctggtgctacagttttattaagaaatctttgggatgaactttcaaaactcattgatttaaactcggcccaatacgtttatgagagcatagagatgcctcttgttcccattttatatgaaatggagaaaatcggttttaaggttgacaaaaacactttgcaggagtatacaaaagagattgagagcaagcttttaaagttggaatcacagatttatcaaatagccggtgaatggtttaacataaactcgccaaaacaactctcatatatattattcgaaaaactgaagcttccggttgttaaaaagaccaaaacaggatattcaacagatgccgaggtattagaagagctgtatgataaacatgacataataccgcttattctggattatagaatgtatacgaaaatactgacaacttactgtcagggactggttcaggcaataaatcctgcaactggaagaattcataccaactttattcagacaggtacggcaactggaagacttgcaagtgcagagcccaatctgcaaaatattcctgtaaaatatgatgagggaaagctaataagaaaggcatttgttccagatgaaggttatgtgttgatagatgctgattattctcagattgagcttagaatacttgcacatatctctgaggatgaacgactgataaatgcttttaaaaataaccttgatattcattcacagacggcggcagagatctttggtgtggatataagtcaggttacaccaattatgcgaagccaggcaaaagcagttaactttggaattgtatatggtatatctgattatggactttcacgggatataaagatttcaagaaaagaagcagccgagtttattaatcgttattttgaaaagtatcccagagtaaaagaatatttggacaatgtcgtcaagtttgcccgtgaaaacggatttgttttgacaatatttaacaggaaaaggtatatcaaggatataaagtctactaataaaaacctgagaaacaatgcagagagaatagcaatgaattcacctatccagggaagtgctgcagatattatgaaaatagcaatgataagagtttataaaaagctaaaagaaaacaatttaaaatcaagaattattctgcaggtccatgacgaacttttgattgaatcaccctatgaagagaaagagatagtaaaggaaatagtaaaatcggagatggaaaatgcggttttattgaaagttcctttggtagttgaagtgaaagaaggttcaaattggtatgaaacaaagtaaaggatcc

SEQ ID NO: 1751 - DNA, 2623 bp, Artificial Sequence
  Description of Artificial Sequence: Synthetic DNA sequence of Caldicellulosiruptor TOK13B DNA Polymerase Y781D
atgaaatacctgctgccgaccgctgctgctggtctgctgctcctcgctgcccagccggcgatggccatggaatttgttatttttgatgggaatagtattctgtatagagctttttttgccttgccacagcttactacctcaacaggcatacctacaaatgctatatatggttttttgaatgtgctgttaaaatacttagattctgaaaaaccggattatgtagcagtagcttttgacaaaaaaggcagagctgtccgaaaaagtgaatatgaagaatacaaggctaacagaaaaccgatgccagattctcttcaggttcagataccttacgtaagagaaatacttgctgctctgaacattcctgtactgaaatgtgaagggtatgaagctgatgacgttataggcacacttgtaaatagatttaaagcccaggatttagagattgtgataataaccggagacagagatacacttcagttacttgataaaaatgtaattgtcaaaatagtcacaacaaggtttgacaggacaactgaagatttgtatgctgtagaaaatgtaaaagaaaaatatggtgtttttgcgcatcaggttgttgactataaagcattagtaggtgatgcgtcagacaatataccaggtgttaagggaattggagataaaactgccataaagctgttagaagagtaccagactctggagaatatatatcagaatctaaataacattaaaggagcgctaaaagagaagttggaatcaggaaaagacatggcatttttatcaaaaagactggctactatcatatgcgatttaccaattgaggtgaatcttgaagaattaaaaaccaaagaatgggacaaagaaagactttatcagattttacttcaacttgagtttaaaagctttattaaaagactgggcttttcagaagagattaactatgcaaggcagaactttcagctacctgaatttagtattaaagaacttcgtgatgtttcagcaatagggggcaaagaaatctatctattgtactcagatgaagaaggacttttttatatttatgaccatcaaacctcaaccatttttacaacttctgataaggaagctattaaagatcttttaacactccaaagcattcaaaaggttgtatatgatttaaaaaatatactccataaggtggactttgatgaagctaatcagataaaaaattgtaatgatgttatgttggcttcatatgttttggacagtacacgcagttcgtacgatttggaaacattgtttatttcttatctcaacactgatatagctgcaatcaaagagaatagatgggctggtgctacagttttattaagaaatctttgggatgaactttcaaaactcattgatttaaactcggcccaatacgtttatgagagcatagagatgcctcttgttcccattttatatgaaatggagaaaatcggttttaaggttgacaaaaacactttgcaggagtatacaaaagagattgagagcaagcttttaaagttggaatcacagatttatcaaatagccggtgaatggtttaacataaactcgccaaaacaactctcatatatattattcgaaaaactgaagcttccggttgttaaaaagaccaaaacaggatattcaacagatgccgaggtattagaagagctgtatgataaacatgacataataccgcttattctggattatagaatgtatacgaaaatactgacaacttactgtcagggactggttcaggcaataaatcctgcaactggaagaattcataccaactttattcagacaggtacggcaactggaagacttgcaagtgcagagcccaatctgcaaaatattcctgtaaaatatgatgagggaaagctaataagaaaggcatttgttccagatgaaggttatgtgttgatagatgctgattattctcagattgagcttagaatacttgcacatatctctgaggatgaacgactgataaatgcttttaaaaataaccttgatattcattcacagacggcggcagagatctttggtgtggatataagtcaggttacaccaattatgcgaagccaggcaaaagcagttaactttggaattgtatatggtatatctgattatggactttcacgggatataaagatttcaagaaaagaagcagccgagtttattaatcgttattttgaaaagtatcccagagtaaaagaatatttggacaatgtcgtcaagtttgcccgtgaaaacggatttgttttgacaatatttaacaggaaaaggtatatcaaggatataaagtctactaataaaaacctgagaaacgatgcagagagaatagcaatgaattcacctatccagggaagtgctgcagatattatgaaaatagcaatgataagagtttataaaaagctaaaagaaaacaatttaaaatcaagaattattctgcaggtccatgacgaacttttgattgaatcaccctatgaagagaaagagatagtaaaggaaatagtaaaatcggagatggaaaatgcggttttattgaaagttcctttggtagttgaagtgaaagaaggttcaaattggtatgaaacaaagtaaaggatcc

SEQ ID NO: 1752 - DNA, 2623 bp, Artificial Sequence
  Description of Artificial Sequence: Synthetic DNA sequence of Caldicellulosiruptor TOK13B DNA Polymerase Y781C
atgaaatacctgctgccgaccgctgctgctggtctgctgctcctcgctgcccagccggcgatggccatggaatttgttatttttgatgggaatagtattctgtatagagctttttttgccttgccacagcttactacctcaacaggcatacctacaaatgctatatatggttttttgaatgtgctgttaaaatacttagattctgaaaaaccggattatgtagcagtagcttttgacaaaaaaggcagagctgtccgaaaaagtgaatatgaagaatacaaggctaacagaaaaccgatgccagattctcttcaggttcagataccttacgtaagagaaatacttgctgctctgaacattcctgtactgaaatgtgaagggtatgaagctgatgacgttataggcacacttgtaaatagatttaaagcccaggatttagagattgtgataataaccggagacagagatacacttcagttacttgataaaaatgtaattgtcaaaatagtcacaacaaggtttgacaggacaactgaagatttgtatgctgtagaaaatgtaaaagaaaaatatggtgtttttgcgcatcaggttgttgactataaagcattagtaggtgatgcgtcagacaatataccaggtgttaagggaattggagataaaactgccataaagctgttagaagagtaccagactctggagaatatatatcagaatctaaataacattaaaggagcgctaaaagagaagttggaatcaggaaaagacatggcatttttatcaaaaagactggctactatcatatgcgatttaccaattgaggtgaatcttgaagaattaaaaaccaaagaatgggacaaagaaagactttatcagattttacttcaacttgagtttaaaagctttattaaaagactgggcttttcagaagagattaactatgcaaggcagaactttcagctacctgaatttagtattaaagaacttcgtgatgtttcagcaatagggggcaaagaaatctatctattgtactcagatgaagaaggacttttttatatttatgaccatcaaacctcaaccatttttacaacttctgataaggaagctattaaagatcttttaacactccaaagcattcaaaaggttgtatatgatttaaaaaatatactccataaggtggactttgatgaagctaatcagataaaaaattgtaatgatgttatgttggcttcatatgttttggacagtacacgcagttcgtacgatttggaaacattgtttatttcttatctcaacactgatatagctgcaatcaaagagaatagatgggctggtgctacagttttattaagaaatctttgggatgaactttcaaaactcattgatttaaactcggcccaatacgtttatgagagcatagagatgcctcttgttcccattttatatgaaatggagaaaatcggttttaaggttgacaaaaacactttgcaggagtatacaaaagagattgagagcaagcttttaaagttggaatcacagatttatcaaatagccggtgaatggtttaacataaactcgccaaaacaactctcatatatattattcgaaaaactgaagcttccggttgttaaaaagaccaaaacaggatattcaacagatgccgaggtattagaagagctgtatgataaacatgacataataccgcttattctggattatagaatgtatacgaaaatactgacaacttactgtcagggactggttcaggcaataaatcctgcaactggaagaattcataccaactttattcagacaggtacggcaactggaagacttgcaagtgcagagcccaatctgcaaaatattcctgtaaaatatgatgagggaaagctaataagaaaggcatttgttccagatgaaggttatgtgttgatagatgctgattattctcagattgagcttagaatacttgcacatatctctgaggatgaacgactgataaatgcttttaaaaataaccttgatattcattcacagacggcggcagagatctttggtgtggatataagtcaggttacaccaattatgcgaagccaggcaaaagcagttaactttggaattgtatatggtatatctgattatggactttcacgggatataaagatttcaagaaaagaagcagccgagtttattaatcgttattttgaaaagtatcccagagtaaaagaatatttggacaatgtcgtcaagtttgcccgtgaaaacggatttgttttgacaatatttaacaggaaaaggtatatcaaggatataaagtctactaataaaaacctgagaaactgtgcagagagaatagcaatgaattcacctatccagggaagtgctgcagatattatgaaaatagcaatgataagagtttataaaaagctaaaagaaaacaatttaaaatcaagaattattctgcaggtccatgacgaacttttgattgaatcaccctatgaagagaaagagatagtaaaggaaatagtaaaatcggagatggaaaatgcggttttattgaaagttcctttggtagttgaagtgaaagaaggttcaaattggtatgaaacaaagtaaaggatcc

SEQ ID NO: 1753 - DNA, 2623 bp, Artificial Sequence
  Description of Artificial Sequence: Synthetic DNA sequence of Caldicellulosiruptor TOK13B DNA Polymerase Y781E
atgaaatacctgctgccgaccgctgctgctggtctgctgctcctcgctgcccagccggcgatggccatggaatttgttatttttgatgggaatagtattctgtatagagctttttttgccttgccacagcttactacctcaacaggcatacctacaaatgctatatatggttttttgaatgtgctgttaaaatacttagattctgaaaaaccggattatgtagcagtagcttttgacaaaaaaggcagagctgtccgaaaaagtgaatatgaagaatacaaggctaacagaaaaccgatgccagattctcttcaggttcagataccttacgtaagagaaatacttgctgctctgaacattcctgtactgaaatgtgaagggtatgaagctgatgacgttataggcacacttgtaaatagatttaaagcccaggatttagagattgtgataataaccggagacagagatacacttcagttacttgataaaaatgtaattgtcaaaatagtcacaacaaggtttgacaggacaactgaagatttgtatgctgtagaaaatgtaaaagaaaaatatggtgtttttgcgcatcaggttgttgactataaagcattagtaggtgatgcgtcagacaatataccaggtgttaagggaattggagataaaactgccataaagctgttagaagagtaccagactctggagaatatatatcagaatctaaataacattaaaggagcgctaaaagagaagttggaatcaggaaaagacatggcatttttatcaaaaagactggctactatcatatgcgatttaccaattgaggtgaatcttgaagaattaaaaaccaaagaatgggacaaagaaagactttatcagattttacttcaacttgagtttaaaagctttattaaaagactgggcttttcagaagagattaactatgcaaggcagaactttcagctacctgaatttagtattaaagaacttcgtgatgtttcagcaatagggggcaaagaaatctatctattgtactcagatgaagaaggacttttttatatttatgaccatcaaacctcaaccatttttacaacttctgataaggaagctattaaagatcttttaacactccaaagcattcaaaaggttgtatatgatttaaaaaatatactccataaggtggactttgatgaagctaatcagataaaaaattgtaatgatgttatgttggcttcatatgttttggacagtacacgcagttcgtacgatttggaaacattgtttatttcttatctcaacactgatatagctgcaatcaaagagaatagatgggctggtgctacagttttattaagaaatctttgggatgaactttcaaaactcattgatttaaactcggcccaatacgtttatgagagcatagagatgcctcttgttcccattttatatgaaatggagaaaatcggttttaaggttgacaaaaacactttgcaggagtatacaaaagagattgagagcaagcttttaaagttggaatcacagatttatcaaatagccggtgaatggtttaacataaactcgccaaaacaactctcatatatattattcgaaaaactgaagcttccggttgttaaaaagaccaaaacaggatattcaacagatgccgaggtattagaagagctgtatgataaacatgacataataccgcttattctggattatagaatgtatacgaaaatactgacaacttactgtcagggactggttcaggcaataaatcctgcaactggaagaattcataccaactttattcagacaggtacggcaactggaagacttgcaagtgcagagcccaatctgcaaaatattcctgtaaaatatgatgagggaaagctaataagaaaggcatttgttccagatgaaggttatgtgttgatagatgctgattattctcagattgagcttagaatacttgcacatatctctgaggatgaacgactgataaatgcttttaaaaataaccttgatattcattcacagacggcggcagagatctttggtgtggatataagtcaggttacaccaattatgcgaagccaggcaaaagcagttaactttggaattgtatatggtatatctgattatggactttcacgggatataaagatttcaagaaaagaagcagccgagtttattaatcgttattttgaaaagtatcccagagtaaaagaatatttggacaatgtcgtcaagtttgcccgtgaaaacggatttgttttgacaatatttaacaggaaaaggtatatcaaggatataaagtctactaataaaaacctgagaaacgaagcagagagaatagcaatgaattcacctatccagggaagtgctgcagatattatgaaaatagcaatgataagagtttataaaaagctaaaagaaaacaatttaaaatcaagaattattctgcaggtccatgacgaacttttgattgaatcaccctatgaagagaaagagatagtaaaggaaatagtaaaatcggagatggaaaatgcggttttattgaaagttcctttggtagttgaagtgaaagaaggttcaaattggtatgaaacaaagtaaaggatcc

SEQ ID NO: 1754 - DNA, 2623 bp, Artificial Sequence
  Description of Artificial Sequence: Synthetic DNA sequence of Caldicellulosiruptor TOK13B DNA Polymerase Y781Q
atgaaatacctgctgccgaccgctgctgctggtctgctgctcctcgctgcccagccggcgatggccatggaatttgttatttttgatgggaatagtattctgtatagagctttttttgccttgccacagcttactacctcaacaggcatacctacaaatgctatatatggttttttgaatgtgctgttaaaatacttagattctgaaaaaccggattatgtagcagtagcttttgacaaaaaaggcagagctgtccgaaaaagtgaatatgaagaatacaaggctaacagaaaaccgatgccagattctcttcaggttcagataccttacgtaagagaaatacttgctgctctgaacattcctgtactgaaatgtgaagggtatgaagctgatgacgttataggcacacttgtaaatagatttaaagcccaggatttagagattgtgataataaccggagacagagatacacttcagttacttgataaaaatgtaattgtcaaaatagtcacaacaaggtttgacaggacaactgaagatttgtatgctgtagaaaatgtaaaagaaaaatatggtgtttttgcgcatcaggttgttgactataaagcattagtaggtgatgcgtcagacaatataccaggtgttaagggaattggagataaaactgccataaagctgttagaagagtaccagactctggagaatatatatcagaatctaaataacattaaaggagcgctaaaagagaagttggaatcaggaaaagacatggcatttttatcaaaaagactggctactatcatatgcgatttaccaattgaggtgaatcttgaagaattaaaaaccaaagaatgggacaaagaaagactttatcagattttacttcaacttgagtttaaaagctttattaaaagactgggcttttcagaagagattaactatgcaaggcagaactttcagctacctgaatttagtattaaagaacttcgtgatgtttcagcaatagggggcaaagaaatctatctattgtactcagatgaagaaggacttttttatatttatgaccatcaaacctcaaccatttttacaacttctgataaggaagctattaaagatcttttaacactccaaagcattcaaaaggttgtatatgatttaaaaaatatactccataaggtggactttgatgaagctaatcagataaaaaattgtaatgatgttatgttggcttcatatgttttggacagtacacgcagttcgtacgatttggaaacattgtttatttcttatctcaacactgatatagctgcaatcaaagagaatagatgggctggtgctacagttttattaagaaatctttgggatgaactttcaaaactcattgatttaaactcggcccaatacgtttatgagagcatagagatgcctcttgttcccattttatatgaaatggagaaaatcggttttaaggttgacaaaaacactttgcaggagtatacaaaagagattgagagcaagcttttaaagttggaatcacagatttatcaaatagccggtgaatggtttaacataaactcgccaaaacaactctcatatatattattcgaaaaactgaagcttccggttgttaaaaagaccaaaacaggatattcaacagatgccgaggtattagaagagctgtatgataaacatgacataataccgcttattctggattatagaatgtatacgaaaatactgacaacttactgtcagggactggttcaggcaataaatcctgcaactggaagaattcataccaactttattcagacaggtacggcaactggaagacttgcaagtgcagagcccaatctgcaaaatattcctgtaaaatatgatgagggaaagctaataagaaaggcatttgttccagatgaaggttatgtgttgatagatgctgattattctcagattgagcttagaatacttgcacatatctctgaggatgaacgactgataaatgcttttaaaaataaccttgatattcattcacagacggcggcagagatctttggtgtggatataagtcaggttacaccaattatgcgaagccaggcaaaagcagttaactttggaattgtatatggtatatctgattatggactttcacgggatataaagatttcaagaaaagaagcagccgagtttattaatcgttattttgaaaagtatcccagagtaaaagaatatttggacaatgtcgtcaagtttgcccgtgaaaacggatttgttttgacaatatttaacaggaaaaggtatatcaaggatataaagtctactaataaaaacctgagaaaccaagcagagagaatagcaatgaattcacctatccagggaagtgctgcagatattatgaaaatagcaatgataagagtttataaaaagctaaaagaaaacaatttaaaatcaagaattattctgcaggtccatgacgaacttttgattgaatcaccctatgaagagaaagagatagtaaaggaaatagtaaaatcggagatggaaaatgcggttttattgaaagttcctttggtagttgaagtgaaagaaggttcaaattggtatgaaacaaagtaaaggatcc

SEQ ID NO: 1755 - DNA, 2623 bp, Artificial Sequence
  Description of Artificial Sequence: Synthetic DNA sequence of Caldicellulosiruptor TOK13B DNA Polymerase Y781G
atgaaatacctgctgccgaccgctgctgctggtctgctgctcctcgctgcccagccggcgatggccatggaatttgttatttttgatgggaatagtattctgtatagagctttttttgccttgccacagcttactacctcaacaggcatacctacaaatgctatatatggttttttgaatgtgctgttaaaatacttagattctgaaaaaccggattatgtagcagtagcttttgacaaaaaaggcagagctgtccgaaaaagtgaatatgaagaatacaaggctaacagaaaaccgatgccagattctcttcaggttcagataccttacgtaagagaaatacttgctgctctgaacattcctgtactgaaatgtgaagggtatgaagctgatgacgttataggcacacttgtaaatagatttaaagcccaggatttagagattgtgataataaccggagacagagatacacttcagttacttgataaaaatgtaattgtcaaaatagtcacaacaaggtttgacaggacaactgaagatttgtatgctgtagaaaatgtaaaagaaaaatatggtgtttttgcgcatcaggttgttgactataaagcattagtaggtgatgcgtcagacaatataccaggtgttaagggaattggagataaaactgccataaagctgttagaagagtaccagactctggagaatatatatcagaatctaaataacattaaaggagcgctaaaagagaagttggaatcaggaaaagacatggcatttttatcaaaaagactggctactatcatatgcgatttaccaattgaggtgaatcttgaagaattaaaaaccaaagaatgggacaaagaaagactttatcagattttacttcaacttgagtttaaaagctttattaaaagactgggcttttcagaagagattaactatgcaaggcagaactttcagctacctgaatttagtattaaagaacttcgtgatgtttcagcaatagggggcaaagaaatctatctattgtactcagatgaagaaggacttttttatatttatgaccatcaaacctcaaccatttttacaacttctgataaggaagctattaaagatcttttaacactccaaagcattcaaaaggttgtatatgatttaaaaaatatactccataaggtggactttgatgaagctaatcagataaaaaattgtaatgatgttatgttggcttcatatgttttggacagtacacgcagttcgtacgatttggaaacattgtttatttcttatctcaacactgatatagctgcaatcaaagagaatagatgggctggtgctacagttttattaagaaatctttgggatgaactttcaaaactcattgatttaaactcggcccaatacgtttatgagagcatagagatgcctcttgttcccattttatatgaaatggagaaaatcggttttaaggttgacaaaaacactttgcaggagtatacaaaagagattgagagcaagcttttaaagttggaatcacagatttatcaaatagccggtgaatggtttaacataaactcgccaaaacaactctcatatatattattcgaaaaactgaagcttccggttgttaaaaagaccaaaacaggatattcaacagatgccgaggtattagaagagctgtatgataaacatgacataataccgcttattctggattatagaatgtatacgaaaatactgacaacttactgtcagggactggttcaggcaataaatcctgcaactggaagaattcataccaactttattcagacaggtacggcaactggaagacttgcaagtgcagagcccaatctgcaaaatattcctgtaaaatatgatgagggaaagctaataagaaaggcatttgttccagatgaaggttatgtgttgatagatgctgattattctcagattgagcttagaatacttgcacatatctctgaggatgaacgactgataaatgcttttaaaaataaccttgatattcattcacagacggcggcagagatctttggtgtggatataagtcaggttacaccaattatgcgaagccaggcaaaagcagttaactttggaattgtatatggtatatctgattatggactttcacgggatataaagatttcaagaaaagaagcagccgagtttattaatcgttattttgaaaagtatcccagagtaaaagaatatttggacaatgtcgtcaagtttgcccgtgaaaacggatttgttttgacaatatttaacaggaaaaggtatatcaaggatataaagtctactaataaaaacctgagaaacggtgcagagagaatagcaatgaattcacctatccagggaagtgctgcagatattatgaaaatagcaatgataagagtttataaaaagctaaaagaaaacaatttaaaatcaagaattattctgcaggtccatgacgaacttttgattgaatcaccctatgaagagaaagagatagtaaaggaaatagtaaaatcggagatggaaaatgcggttttattgaaagttcctttggtagttgaagtgaaagaaggttcaaattggtatgaaacaaagtaaaggatcc

SEQ ID NO: 1756 - DNA, 2623 bp, Artificial Sequence
  Description of Artificial Sequence: Synthetic DNA sequence of Caldicellulosiruptor TOK13B DNA Polymerase Y781H
atgaaatacctgctgccgaccgctgctgctggtctgctgctcctcgctgcccagccggcgatggccatggaatttgttatttttgatgggaatagtattctgtatagagctttttttgccttgccacagcttactacctcaacaggcatacctacaaatgctatatatggttttttgaatgtgctgttaaaatacttagattctgaaaaaccggattatgtagcagtagcttttgacaaaaaaggcagagctgtccgaaaaagtgaatatgaagaatacaaggctaacagaaaaccgatgccagattctcttcaggttcagataccttacgtaagagaaatacttgctgctctgaacattcctgtactgaaatgtgaagggtatgaagctgatgacgttataggcacacttgtaaatagatttaaagcccaggatttagagattgtgataataaccggagacagagatacacttcagttacttgataaaaatgtaattgtcaaaatagtcacaacaaggtttgacaggacaactgaagatttgtatgctgtagaaaatgtaaaagaaaaatatggtgtttttgcgcatcaggttgttgactataaagcattagtaggtgatgcgtcagacaatataccaggtgttaagggaattggagataaaactgccataaagctgttagaagagtaccagactctggagaatatatatcagaatctaaataacattaaaggagcgctaaaagagaagttggaatcaggaaaagacatggcatttttatcaaaaagactggctactatcatatgcgatttaccaattgaggtgaatcttgaagaattaaaaaccaaagaatgggacaaagaaagactttatcagattttacttcaacttgagtttaaaagctttattaaaagactgggcttttcagaagagattaactatgcaaggcagaactttcagctacctgaatttagtattaaagaacttcgtgatgtttcagcaatagggggcaaagaaatctatctattgtactcagatgaagaaggacttttttatatttatgaccatcaaacctcaaccatttttacaacttctgataaggaagctattaaagatcttttaacactccaaagcattcaaaaggttgtatatgatttaaaaaatatactccataaggtggactttgatgaagctaatcagataaaaaattgtaatgatgttatgttggcttcatatgttttggacagtacacgcagttcgtacgatttggaaacattgtttatttcttatctcaacactgatatagctgcaatcaaagagaatagatgggctggtgctacagttttattaagaaatctttgggatgaactttcaaaactcattgatttaaactcggcccaatacgtttatgagagcatagagatgcctcttgttcccattttatatgaaatggagaaaatcggttttaaggttgacaaaaacactttgcaggagtatacaaaagagattgagagcaagcttttaaagttggaatcacagatttatcaaatagccggtgaatggtttaacataaactcgccaaaacaactctcatatatattattcgaaaaactgaagcttccggttgttaaaaagaccaaaacaggatattcaacagatgccgaggtattagaagagctgtatgataaacatgacataataccgcttattctggattatagaatgtatacgaaaatactgacaacttactgtcagggactggttcaggcaataaatcctgcaactggaagaattcataccaactttattcagacaggtacggcaactggaagacttgcaagtgcagagcccaatctgcaaaatattcctgtaaaatatgatgagggaaagctaataagaaaggcatttgttccagatgaaggttatgtgttgatagatgctgattattctcagattgagcttagaatacttgcacatatctctgaggatgaacgactgataaatgcttttaaaaataaccttgatattcattcacagacggcggcagagatctttggtgtggatataagtcaggttacaccaattatgcgaagccaggcaaaagcagttaactttggaattgtatatggtatatctgattatggactttcacgggatataaagatttcaagaaaagaagcagccgagtttattaatcgttattttgaaaagtatcccagagtaaaagaatatttggacaatgtcgtcaagtttgcccgtgaaaacggatttgttttgacaatatttaacaggaaaaggtatatcaaggatataaagtctactaataaaaacctgagaaaccatgcagagagaatagcaatgaattcacctatccagggaagtgctgcagatattatgaaaatagcaatgataagagtttataaaaagctaaaagaaaacaatttaaaatcaagaattattctgcaggtccatgacgaacttttgattgaatcaccctatgaagagaaagagatagtaaaggaaatagtaaaatcggagatggaaaatgcggttttattgaaagttcctttggtagttgaagtgaaagaaggttcaaattggtatgaaacaaagtaaaggatcc

SEQ ID NO: 1757 - DNA, 2623 bp, Artificial Sequence
  Description of Artificial Sequence: Synthetic DNA sequence of Caldicellulosiruptor TOK13B DNA Polymerase Y781I
atgaaatacctgctgccgaccgctgctgctggtctgctgctcctcgctgcccagccggcgatggccatggaatttgttatttttgatgggaatagtattctgtatagagctttttttgccttgccacagcttactacctcaacaggcatacctacaaatgctatatatggttttttgaatgtgctgttaaaatacttagattctgaaaaaccggattatgtagcagtagcttttgacaaaaaaggcagagctgtccgaaaaagtgaatatgaagaatacaaggctaacagaaaaccgatgccagattctcttcaggttcagataccttacgtaagagaaatacttgctgctctgaacattcctgtactgaaatgtgaagggtatgaagctgatgacgttataggcacacttgtaaatagatttaaagcccaggatttagagattgtgataataaccggagacagagatacacttcagttacttgataaaaatgtaattgtcaaaatagtcacaacaaggtttgacaggacaactgaagatttgtatgctgtagaaaatgtaaaagaaaaatatggtgtttttgcgcatcaggttgttgactataaagcattagtaggtgatgcgtcagacaatataccaggtgttaagggaattggagataaaactgccataaagctgttagaagagtaccagactctggagaatatatatcagaatctaaataacattaaaggagcgctaaaagagaagttggaatcaggaaaagacatggcatttttatcaaaaagactggctactatcatatgcgatttaccaattgaggtgaatcttgaagaattaaaaaccaaagaatgggacaaagaaagactttatcagattttacttcaacttgagtttaaaagctttattaaaagactgggcttttcagaagagattaactatgcaaggcagaactttcagctacctgaatttagtattaaagaacttcgtgatgtttcagcaatagggggcaaagaaatctatctattgtactcagatgaagaaggacttttttatatttatgaccatcaaacctcaaccatttttacaacttctgataaggaagctattaaagatcttttaacactccaaagcattcaaaaggttgtatatgatttaaaaaatatactccataaggtggactttgatgaagctaatcagataaaaaattgtaatgatgttatgttggcttcatatgttttggacagtacacgcagttcgtacgatttggaaacattgtttatttcttatctcaacactgatatagctgcaatcaaagagaatagatgggctggtgctacagttttattaagaaatctttgggatgaactttcaaaactcattgatttaaactcggcccaatacgtttatgagagcatagagatgcctcttgttcccattttatatgaaatggagaaaatcggttttaaggttgacaaaaacactttgcaggagtatacaaaagagattgagagcaagcttttaaagttggaatcacagatttatcaaatagccggtgaatggtttaacataaactcgccaaaacaactctcatatatattattcgaaaaactgaagcttccggttgttaaaaagaccaaaacaggatattcaacagatgccgaggtattagaagagctgtatgataaacatgacataataccgcttattctggattatagaatgtatacgaaaatactgacaacttactgtcagggactggttcaggcaataaatcctgcaactggaagaattcataccaactttattcagacaggtacggcaactggaagacttgcaagtgcagagcccaatctgcaaaatattcctgtaaaatatgatgagggaaagctaataagaaaggcatttgttccagatgaaggttatgtgttgatagatgctgattattctcagattgagcttagaatacttgcacatatctctgaggatgaacgactgataaatgcttttaaaaataaccttgatattcattcacagacggcggcagagatctttggtgtggatataagtcaggttacaccaattatgcgaagccaggcaaaagcagttaactttggaattgtatatggtatatctgattatggactttcacgggatataaagatttcaagaaaagaagcagccgagtttattaatcgttattttgaaaagtatcccagagtaaaagaatatttggacaatgtcgtcaagtttgcccgtgaaaacggatttgttttgacaatatttaacaggaaaaggtatatcaaggatataaagtctactaataaaaacctgagaaacattgcagagagaatagcaatgaattcacctatccagggaagtgctgcagatattatgaaaatagcaatgataagagtttataaaaagctaaaagaaaacaatttaaaatcaagaattattctgcaggtccatgacgaacttttgattgaatcaccctatgaagagaaagagatagtaaaggaaatagtaaaatcggagatggaaaatgcggttttattgaaagttcctttggtagttgaagtgaaagaaggttcaaattggtatgaaacaaagtaaaggatcc

SEQ ID NO: 1758 - DNA, 2623 bp, Artificial Sequence
  Description of Artificial Sequence: Synthetic DNA sequence of Caldicellulosiruptor TOK13B DNA Polymerase Y781L
atgaaatacctgctgccgaccgctgctgctggtctgctgctcctcgctgcccagccggcgatggccatggaatttgttatttttgatgggaatagtattctgtatagagctttttttgccttgccacagcttactacctcaacaggcatacctacaaatgctatatatggttttttgaatgtgctgttaaaatacttagattctgaaaaaccggattatgtagcagtagcttttgacaaaaaaggcagagctgtccgaaaaagtgaatatgaagaatacaaggctaacagaaaaccgatgccagattctcttcaggttcagataccttacgtaagagaaatacttgctgctctgaacattcctgtactgaaatgtgaagggtatgaagctgatgacgttataggcacacttgtaaatagatttaaagcccaggatttagagattgtgataataaccggagacagagatacacttcagttacttgataaaaatgtaattgtcaaaatagtcacaacaaggtttgacaggacaactgaagatttgtatgctgtagaaaatgtaaaagaaaaatatggtgtttttgcgcatcaggttgttgactataaagcattagtaggtgatgcgtcagacaatataccaggtgttaagggaattggagataaaactgccataaagctgttagaagagtaccagactctggagaatatatatcagaatctaaataacattaaaggagcgctaaaagagaagttggaatcaggaaaagacatggcatttttatcaaaaagactggctactatcatatgcgatttaccaattgaggtgaatcttgaagaattaaaaaccaaagaatgggacaaagaaagactttatcagattttacttcaacttgagtttaaaagctttattaaaagactgggcttttcagaagagattaactatgcaaggcagaactttcagctacctgaatttagtattaaagaacttcgtgatgtttcagcaatagggggcaaagaaatctatctattgtactcagatgaagaaggacttttttatatttatgaccatcaaacctcaaccatttttacaacttctgataaggaagctattaaagatcttttaacactccaaagcattcaaaaggttgtatatgatttaaaaaatatactccataaggtggactttgatgaagctaatcagataaaaaattgtaatgatgttatgttggcttcatatgttttggacagtacacgcagttcgtacgatttggaaacattgtttatttcttatctcaacactgatatagctgcaatcaaagagaatagatgggctggtgctacagttttattaagaaatctttgggatgaactttcaaaactcattgatttaaactcggcccaatacgtttatgagagcatagagatgcctcttgttcccattttatatgaaatggagaaaatcggttttaaggttgacaaaaacactttgcaggagtatacaaaagagattgagagcaagcttttaaagttggaatcacagatttatcaaatagccggtgaatggtttaacataaactcgccaaaacaactctcatatatattattcgaaaaactgaagcttccggttgttaaaaagaccaaaacaggatattcaacagatgccgaggtattagaagagctgtatgataaacatgacataataccgcttattctggattatagaatgtatacgaaaatactgacaacttactgtcagggactggttcaggcaataaatcctgcaactggaagaattcataccaactttattcagacaggtacggcaactggaagacttgcaagtgcagagcccaatctgcaaaatattcctgtaaaatatgatgagggaaagctaataagaaaggcatttgttccagatgaaggttatgtgttgatagatgctgattattctcagattgagcttagaatacttgcacatatctctgaggatgaacgactgataaatgcttttaaaaataaccttgatattcattcacagacggcggcagagatctttggtgtggatataagtcaggttacaccaattatgcgaagccaggcaaaagcagttaactttggaattgtatatggtatatctgattatggactttcacgggatataaagatttcaagaaaagaagcagccgagtttattaatcgttattttgaaaagtatcccagagtaaaagaatatttggacaatgtcgtcaagtttgcccgtgaaaacggatttgttttgacaatatttaacaggaaaaggtatatcaaggatataaagtctactaataaaaacctgagaaaccttgcagagagaatagcaatgaattcacctatccagggaagtgctgcagatattatgaaaatagcaatgataagagtttataaaaagctaaaagaaaacaatttaaaatcaagaattattctgcaggtccatgacgaacttttgattgaatcaccctatgaagagaaagagatagtaaaggaaatagtaaaatcggagatggaaaatgcggttttattgaaagttcctttggtagttgaagtgaaagaaggttcaaattggtatgaaacaaagtaaaggatcc

SEQ ID NO: 1759 - DNA, 2623 bp, Artificial Sequence
  Description of Artificial Sequence: Synthetic DNA sequence of Caldicellulosiruptor TOK13B DNA Polymerase Y781K
atgaaatacctgctgccgaccgctgctgctggtctgctgctcctcgctgcccagccggcgatggccatggaatttgttatttttgatgggaatagtattctgtatagagctttttttgccttgccacagcttactacctcaacaggcatacctacaaatgctatatatggttttttgaatgtgctgttaaaatacttagattctgaaaaaccggattatgtagcagtagcttttgacaaaaaaggcagagctgtccgaaaaagtgaatatgaagaatacaaggctaacagaaaaccgatgccagattctcttcaggttcagataccttacgtaagagaaatacttgctgctctgaacattcctgtactgaaatgtgaagggtatgaagctgatgacgttataggcacacttgtaaatagatttaaagcccaggatttagagattgtgataataaccggagacagagatacacttcagttacttgataaaaatgtaattgtcaaaatagtcacaacaaggtttgacaggacaactgaagatttgtatgctgtagaaaatgtaaaagaaaaatatggtgtttttgcgcatcaggttgttgactataaagcattagtaggtgatgcgtcagacaatataccaggtgttaagggaattggagataaaactgccataaagctgttagaagagtaccagactctggagaatatatatcagaatctaaataacattaaaggagcgctaaaagagaagttggaatcaggaaaagacatggcatttttatcaaaaagactggctactatcatatgcgatttaccaattgaggtgaatcttgaagaattaaaaaccaaagaatgggacaaagaaagactttatcagattttacttcaacttgagtttaaaagctttattaaaagactgggcttttcagaagagattaactatgcaaggcagaactttcagctacctgaatttagtattaaagaacttcgtgatgtttcagcaatagggggcaaagaaatctatctattgtactcagatgaagaaggacttttttatatttatgaccatcaaacctcaaccatttttacaacttctgataaggaagctattaaagatcttttaacactccaaagcattcaaaaggttgtatatgatttaaaaaatatactccataaggtggactttgatgaagctaatcagataaaaaattgtaatgatgttatgttggcttcatatgttttggacagtacacgcagttcgtacgatttggaaacattgtttatttcttatctcaacactgatatagctgcaatcaaagagaatagatgggctggtgctacagttttattaagaaatctttgggatgaactttcaaaactcattgatttaaactcggcccaatacgtttatgagagcatagagatgcctcttgttcccattttatatgaaatggagaaaatcggttttaaggttgacaaaaacactttgcaggagtatacaaaagagattgagagcaagcttttaaagttggaatcacagatttatcaaatagccggtgaatggtttaacataaactcgccaaaacaactctcatatatattattcgaaaaactgaagcttccggttgttaaaaagaccaaaacaggatattcaacagatgccgaggtattagaagagctgtatgataaacatgacataataccgcttattctggattatagaatgtatacgaaaatactgacaacttactgtcagggactggttcaggcaataaatcctgcaactggaagaattcataccaactttattcagacaggtacggcaactggaagacttgcaagtgcagagcccaatctgcaaaatattcctgtaaaatatgatgagggaaagctaataagaaaggcatttgttccagatgaaggttatgtgttgatagatgctgattattctcagattgagcttagaatacttgcacatatctctgaggatgaacgactgataaatgcttttaaaaataaccttgatattcattcacagacggcggcagagatctttggtgtggatataagtcaggttacaccaattatgcgaagccaggcaaaagcagttaactttggaattgtatatggtatatctgattatggactttcacgggatataaagatttcaagaaaagaagcagccgagtttattaatcgttattttgaaaagtatcccagagtaaaagaatatttggacaatgtcgtcaagtttgcccgtgaaaacggatttgttttgacaatatttaacaggaaaaggtatatcaaggatataaagtctactaataaaaacctgagaaacaaagcagagagaatagcaatgaattcacctatccagggaagtgctgcagatattatgaaaatagcaatgataagagtttataaaaagctaaaagaaaacaatttaaaatcaagaattattctgcaggtccatgacgaacttttgattgaatcaccctatgaagagaaagagatagtaaaggaaatagtaaaatcggagatggaaaatgcggttttattgaaagttcctttggtagttgaagtgaaagaaggttcaaattggtatgaaacaaagtaaaggatcc

SEQ ID NO: 1760 - DNA, 2623 bp, Artificial Sequence
  Description of Artificial Sequence: Synthetic DNA sequence of Caldicellulosiruptor TOK13B DNA Polymerase Y781M
atgaaatacctgctgccgaccgctgctgctggtctgctgctcctcgctgcccagccggcgatggccatggaatttgttatttttgatgggaatagtattctgtatagagctttttttgccttgccacagcttactacctcaacaggcatacctacaaatgctatatatggttttttgaatgtgctgttaaaatacttagattctgaaaaaccggattatgtagcagtagcttttgacaaaaaaggcagagctgtccgaaaaagtgaatatgaagaatacaaggctaacagaaaaccgatgccagattctcttcaggttcagataccttacgtaagagaaatacttgctgctctgaacattcctgtactgaaatgtgaagggtatgaagctgatgacgttataggcacacttgtaaatagatttaaagcccaggatttagagattgtgataataaccggagacagagatacacttcagttacttgataaaaatgtaattgtcaaaatagtcacaacaaggtttgacaggacaactgaagatttgtatgctgtagaaaatgtaaaagaaaaatatggtgtttttgcgcatcaggttgttgactataaagcattagtaggtgatgcgtcagacaatataccaggtgttaagggaattggagataaaactgccataaagctgttagaagagtaccagactctggagaatatatatcagaatctaaataacattaaaggagcgctaaaagagaagttggaatcaggaaaagacatggcatttttatcaaaaagactggctactatcatatgcgatttaccaattgaggtgaatcttgaagaattaaaaaccaaagaatgggacaaagaaagactttatcagattttacttcaacttgagtttaaaagctttattaaaagactgggcttttcagaagagattaactatgcaaggcagaactttcagctacctgaatttagtattaaagaacttcgtgatgtttcagcaatagggggcaaagaaatctatctattgtactcagatgaagaaggacttttttatatttatgaccatcaaacctcaaccatttttacaacttctgataaggaagctattaaagatcttttaacactccaaagcattcaaaaggttgtatatgatttaaaaaatatactccataaggtggactttgatgaagctaatcagataaaaaattgtaatgatgttatgttggcttcatatgttttggacagtacacgcagttcgtacgatttggaaacattgtttatttcttatctcaacactgatatagctgcaatcaaagagaatagatgggctggtgctacagttttattaagaaatctttgggatgaactttcaaaactcattgatttaaactcggcccaatacgtttatgagagcatagagatgcctcttgttcccattttatatgaaatggagaaaatcggttttaaggttgacaaaaacactttgcaggagtatacaaaagagattgagagcaagcttttaaagttggaatcacagatttatcaaatagccggtgaatggtttaacataaactcgccaaaacaactctcatatatattattcgaaaaactgaagcttccggttgttaaaaagaccaaaacaggatattcaacagatgccgaggtattagaagagctgtatgataaacatgacataataccgcttattctggattatagaatgtatacgaaaatactgacaacttactgtcagggactggttcaggcaataaatcctgcaactggaagaattcataccaactttattcagacaggtacggcaactggaagacttgcaagtgcagagcccaatctgcaaaatattcctgtaaaatatgatgagggaaagctaataagaaaggcatttgttccagatgaaggttatgtgttgatagatgctgattattctcagattgagcttagaatacttgcacatatctctgaggatgaacgactgataaatgcttttaaaaataaccttgatattcattcacagacggcggcagagatctttggtgtggatataagtcaggttacaccaattatgcgaagccaggcaaaagcagttaactttggaattgtatatggtatatctgattatggactttcacgggatataaagatttcaagaaaagaagcagccgagtttattaatcgttattttgaaaagtatcccagagtaaaagaatatttggacaatgtcgtcaagtttgcccgtgaaaacggatttgttttgacaatatttaacaggaaaaggtatatcaaggatataaagtctactaataaaaacctgagaaacatggcagagagaatagcaatgaattcacctatccagggaagtgctgcagatattatgaaaatagcaatgataagagtttataaaaagctaaaagaaaacaatttaaaatcaagaattattctgcaggtccatgacgaacttttgattgaatcaccctatgaagagaaagagatagtaaaggaaatagtaaaatcggagatggaaaatgcggttttattgaaagttcctttggtagttgaagtgaaagaaggttcaaattggtatgaaacaaagtaaaggatcc

SEQ ID NO: 1761 - DNA, 2623 bp, Artificial Sequence
  Description of Artificial Sequence: Synthetic DNA sequence of Caldicellulosiruptor TOK13B DNA Polymerase Y781F
atgaaatacctgctgccgaccgctgctgctggtctgctgctcctcgctgcccagccggcgatggccatggaatttgttatttttgatgggaatagtattctgtatagagctttttttgccttgccacagcttactacctcaacaggcatacctacaaatgctatatatggttttttgaatgtgctgttaaaatacttagattctgaaaaaccggattatgtagcagtagcttttgacaaaaaaggcagagctgtccgaaaaagtgaatatgaagaatacaaggctaacagaaaaccgatgccagattctcttcaggttcagataccttacgtaagagaaatacttgctgctctgaacattcctgtactgaaatgtgaagggtatgaagctgatgacgttataggcacacttgtaaatagatttaaagcccaggatttagagattgtgataataaccggagacagagatacacttcagttacttgataaaaatgtaattgtcaaaatagtcacaacaaggtttgacaggacaactgaagatttgtatgctgtagaaaatgtaaaagaaaaatatggtgtttttgcgcatcaggttgttgactataaagcattagtaggtgatgcgtcagacaatataccaggtgttaagggaattggagataaaactgccataaagctgttagaagagtaccagactctggagaatatatatcagaatctaaataacattaaaggagcgctaaaagagaagttggaatcaggaaaagacatggcatttttatcaaaaagactggctactatcatatgcgatttaccaattgaggtgaatcttgaagaattaaaaaccaaagaatgggacaaagaaagactttatcagattttacttcaacttgagtttaaaagctttattaaaagactgggcttttcagaagagattaactatgcaaggcagaactttcagctacctgaatttagtattaaagaacttcgtgatgtttcagcaatagggggcaaagaaatctatctattgtactcagatgaagaaggacttttttatatttatgaccatcaaacctcaaccatttttacaacttctgataaggaagctattaaagatcttttaacactccaaagcattcaaaaggttgtatatgatttaaaaaatatactccataaggtggactttgatgaagctaatcagataaaaaattgtaatgatgttatgttggcttcatatgttttggacagtacacgcagttcgtacgatttggaaacattgtttatttcttatctcaacactgatatagctgcaatcaaagagaatagatgggctggtgctacagttttattaagaaatctttgggatgaactttcaaaactcattgatttaaactcggcccaatacgtttatgagagcatagagatgcctcttgttcccattttatatgaaatggagaaaatcggttttaaggttgacaaaaacactttgcaggagtatacaaaagagattgagagcaagcttttaaagttggaatcacagatttatcaaatagccggtgaatggtttaacataaactcgccaaaacaactctcatatatattattcgaaaaactgaagcttccggttgttaaaaagaccaaaacaggatattcaacagatgccgaggtattagaagagctgtatgataaacatgacataataccgcttattctggattatagaatgtatacgaaaatactgacaacttactgtcagggactggttcaggcaataaatcctgcaactggaagaattcataccaactttattcagacaggtacggcaactggaagacttgcaagtgcagagcccaatctgcaaaatattcctgtaaaatatgatgagggaaagctaataagaaaggcatttgttccagatgaaggttatgtgttgatagatgctgattattctcagattgagcttagaatacttgcacatatctctgaggatgaacgactgataaatgcttttaaaaataaccttgatattcattcacagacggcggcagagatctttggtgtggatataagtcaggttacaccaattatgcgaagccaggcaaaagcagttaactttggaattgtatatggtatatctgattatggactttcacgggatataaagatttcaagaaaagaagcagccgagtttattaatcgttattttgaaaagtatcccagagtaaaagaatatttggacaatgtcgtcaagtttgcccgtgaaaacggatttgttttgacaatatttaacaggaaaaggtatatcaaggatataaagtctactaataaaaacctgagaaactttgcagagagaatagcaatgaattcacctatccagggaagtgctgcagatattatgaaaatagcaatgataagagtttataaaaagctaaaagaaaacaatttaaaatcaagaattattctgcaggtccatgacgaacttttgattgaatcaccctatgaagagaaagagatagtaaaggaaatagtaaaatcggagatggaaaatgcggttttattgaaagttcctttggtagttgaagtgaaagaaggttcaaattggtatgaaacaaagtaaaggatcc

SEQ ID NO: 1762 - DNA, 2623 bp, Artificial Sequence
  Description of Artificial Sequence: Synthetic DNA sequence of Caldicellulosiruptor TOK13B DNA Polymerase Y781P
atgaaatacctgctgccgaccgctgctgctggtctgctgctcctcgctgcccagccggcgatggccatggaatttgttatttttgatgggaatagtattctgtatagagctttttttgccttgccacagcttactacctcaacaggcatacctacaaatgctatatatggttttttgaatgtgctgttaaaatacttagattctgaaaaaccggattatgtagcagtagcttttgacaaaaaaggcagagctgtccgaaaaagtgaatatgaagaatacaaggctaacagaaaaccgatgccagattctcttcaggttcagataccttacgtaagagaaatacttgctgctctgaacattcctgtactgaaatgtgaagggtatgaagctgatgacgttataggcacacttgtaaatagatttaaagcccaggatttagagattgtgataataaccggagacagagatacacttcagttacttgataaaaatgtaattgtcaaaatagtcacaacaaggtttgacaggacaactgaagatttgtatgctgtagaaaatgtaaaagaaaaatatggtgtttttgcgcatcaggttgttgactataaagcattagtaggtgatgcgtcagacaatataccaggtgttaagggaattggagataaaactgccataaagctgttagaagagtaccagactctggagaatatatatcagaatctaaataacattaaaggagcgctaaaagagaagttggaatcaggaaaagacatggcatttttatcaaaaagactggctactatcatatgcgatttaccaattgaggtgaatcttgaagaattaaaaaccaaagaatgggacaaagaaagactttatcagattttacttcaacttgagtttaaaagctttattaaaagactgggcttttcagaagagattaactatgcaaggcagaactttcagctacctgaatttagtattaaagaacttcgtgatgtttcagcaatagggggcaaagaaatctatctattgtactcagatgaagaaggacttttttatatttatgaccatcaaacctcaaccatttttacaacttctgataaggaagctattaaagatcttttaacactccaaagcattcaaaaggttgtatatgatttaaaaaatatactccataaggtggactttgatgaagctaatcagataaaaaattgtaatgatgttatgttggcttcatatgttttggacagtacacgcagttcgtacgatttggaaacattgtttatttcttatctcaacactgatatagctgcaatcaaagagaatagatgggctggtgctacagttttattaagaaatctttgggatgaactttcaaaactcattgatttaaactcggcccaatacgtttatgagagcatagagatgcctcttgttcccattttatatgaaatggagaaaatcggttttaaggttgacaaaaacactttgcaggagtatacaaaagagattgagagcaagcttttaaagttggaatcacagatttatcaaatagccggtgaatggtttaacataaactcgccaaaacaactctcatatatattattcgaaaaactgaagcttccggttgttaaaaagaccaaaacaggatattcaacagatgccgaggtattagaagagctgtatgataaacatgacataataccgcttattctggattatagaatgtatacgaaaatactgacaacttactgtcagggactggttcaggcaataaatcctgcaactggaagaattcataccaactttattcagacaggtacggcaactggaagacttgcaagtgcagagcccaatctgcaaaatattcctgtaaaatatgatgagggaaagctaataagaaaggcatttgttccagatgaaggttatgtgttgatagatgctgattattctcagattgagcttagaatacttgcacatatctctgaggatgaacgactgataaatgcttttaaaaataaccttgatattcattcacagacggcggcagagatctttggtgtggatataagtcaggttacaccaattatgcgaagccaggcaaaagcagttaactttggaattgtatatggtatatctgattatggactttcacgggatataaagatttcaagaaaagaagcagccgagtttattaatcgttattttgaaaagtatcccagagtaaaagaatatttggacaatgtcgtcaagtttgcccgtgaaaacggatttgttttgacaatatttaacaggaaaaggtatatcaaggatataaagtctactaataaaaacctgagaaaccctgcagagagaatagcaatgaattcacctatccagggaagtgctgcagatattatgaaaatagcaatgataagagtttataaaaagctaaaagaaaacaatttaaaatcaagaattattctgcaggtccatgacgaacttttgattgaatcaccctatgaagagaaagagatagtaaaggaaatagtaaaatcggagatggaaaatgcggttttattgaaagttcctttggtagttgaagtgaaagaaggttcaaattggtatgaaacaaagtaaaggatcc

SEQ ID NO: 1763 - DNA, 2623 bp, Artificial Sequence
  Description of Artificial Sequence: Synthetic DNA sequence of Caldicellulosiruptor TOK13B DNA Polymerase Y781S
atgaaatacctgctgccgaccgctgctgctggtctgctgctcctcgctgcccagccggcgatggccatggaatttgttatttttgatgggaatagtattctgtatagagctttttttgccttgccacagcttactacctcaacaggcatacctacaaatgctatatatggttttttgaatgtgctgttaaaatacttagattctgaaaaaccggattatgtagcagtagcttttgacaaaaaaggcagagctgtccgaaaaagtgaatatgaagaatacaaggctaacagaaaaccgatgccagattctcttcaggttcagataccttacgtaagagaaatacttgctgctctgaacattcctgtactgaaatgtgaagggtatgaagctgatgacgttataggcacacttgtaaatagatttaaagcccaggatttagagattgtgataataaccggagacagagatacacttcagttacttgataaaaatgtaattgtcaaaatagtcacaacaaggtttgacaggacaactgaagatttgtatgctgtagaaaatgtaaaagaaaaatatggtgtttttgcgcatcaggttgttgactataaagcattagtaggtgatgcgtcagacaatataccaggtgttaagggaattggagataaaactgccataaagctgttagaagagtaccagactctggagaatatatatcagaatctaaataacattaaaggagcgctaaaagagaagttggaatcaggaaaagacatggcatttttatcaaaaagactggctactatcatatgcgatttaccaattgaggtgaatcttgaagaattaaaaaccaaagaatgggacaaagaaagactttatcagattttacttcaacttgagtttaaaagctttattaaaagactgggcttttcagaagagattaactatgcaaggcagaactttcagctacctgaatttagtattaaagaacttcgtgatgtttcagcaatagggggcaaagaaatctatctattgtactcagatgaagaaggacttttttatatttatgaccatcaaacctcaaccatttttacaacttctgataaggaagctattaaagatcttttaacactccaaagcattcaaaaggttgtatatgatttaaaaaatatactccataaggtggactttgatgaagctaatcagataaaaaattgtaatgatgttatgttggcttcatatgttttggacagtacacgcagttcgtacgatttggaaacattgtttatttcttatctcaacactgatatagctgcaatcaaagagaatagatgggctggtgctacagttttattaagaaatctttgggatgaactttcaaaactcattgatttaaactcggcccaatacgtttatgagagcatagagatgcctcttgttcccattttatatgaaatggagaaaatcggttttaaggttgacaaaaacactttgcaggagtatacaaaagagattgagagcaagcttttaaagttggaatcacagatttatcaaatagccggtgaatggtttaacataaactcgccaaaacaactctcatatatattattcgaaaaactgaagcttccggttgttaaaaagaccaaaacaggatattcaacagatgccgaggtattagaagagctgtatgataaacatgacataataccgcttattctggattatagaatgtatacgaaaatactgacaacttactgtcagggactggttcaggcaataaatcctgcaactggaagaattcataccaactttattcagacaggtacggcaactggaagacttgcaagtgcagagcccaatctgcaaaatattcctgtaaaatatgatgagggaaagctaataagaaaggcatttgttccagatgaaggttatgtgttgatagatgctgattattctcagattgagcttagaatacttgcacatatctctgaggatgaacgactgataaatgcttttaaaaataaccttgatattcattcacagacggcggcagagatctttggtgtggatataagtcaggttacaccaattatgcgaagccaggcaaaagcagttaactttggaattgtatatggtatatctgattatggactttcacgggatataaagatttcaagaaaagaagcagccgagtttattaatcgttattttgaaaagtatcccagagtaaaagaatatttggacaatgtcgtcaagtttgcccgtgaaaacggatttgttttgacaatatttaacaggaaaaggtatatcaaggatataaagtctactaataaaaacctgagaaactctgcagagagaatagcaatgaattcacctatccagggaagtgctgcagatattatgaaaatagcaatgataagagtttataaaaagctaaaagaaaacaatttaaaatcaagaattattctgcaggtccatgacgaacttttgattgaatcaccctatgaagagaaagagatagtaaaggaaatagtaaaatcggagatggaaaatgcggttttattgaaagttcctttggtagttgaagtgaaagaaggttcaaattggtatgaaacaaagtaaaggatcc

SEQ ID NO: 1764 - DNA, 2623 bp, Artificial Sequence
  Description of Artificial Sequence: Synthetic DNA sequence of Caldicellulosiruptor TOK13B DNA Polymerase Y781T
atgaaatacctgctgccgaccgctgctgctggtctgctgctcctcgctgcccagccggcgatggccatggaatttgttatttttgatgggaatagtattctgtatagagctttttttgccttgccacagcttactacctcaacaggcatacctacaaatgctatatatggttttttgaatgtgctgttaaaatacttagattctgaaaaaccggattatgtagcagtagcttttgacaaaaaaggcagagctgtccgaaaaagtgaatatgaagaatacaaggctaacagaaaaccgatgccagattctcttcaggttcagataccttacgtaagagaaatacttgctgctctgaacattcctgtactgaaatgtgaagggtatgaagctgatgacgttataggcacacttgtaaatagatttaaagcccaggatttagagattgtgataataaccggagacagagatacacttcagttacttgataaaaatgtaattgtcaaaatagtcacaacaaggtttgacaggacaactgaagatttgtatgctgtagaaaatgtaaaagaaaaatatggtgtttttgcgcatcaggttgttgactataaagcattagtaggtgatgcgtcagacaatataccaggtgttaagggaattggagataaaactgccataaagctgttagaagagtaccagactctggagaatatatatcagaatctaaataacattaaaggagcgctaaaagagaagttggaatcaggaaaagacatggcatttttatcaaaaagactggctactatcatatgcgatttaccaattgaggtgaatcttgaagaattaaaaaccaaagaatgggacaaagaaagactttatcagattttacttcaacttgagtttaaaagctttattaaaagactgggcttttcagaagagattaactatgcaaggcagaactttcagctacctgaatttagtattaaagaacttcgtgatgtttcagcaatagggggcaaagaaatctatctattgtactcagatgaagaaggacttttttatatttatgaccatcaaacctcaaccatttttacaacttctgataaggaagctattaaagatcttttaacactccaaagcattcaaaaggttgtatatgatttaaaaaatatactccataaggtggactttgatgaagctaatcagataaaaaattgtaatgatgttatgttggcttcatatgttttggacagtacacgcagttcgtacgatttggaaacattgtttatttcttatctcaacactgatatagctgcaatcaaagagaatagatgggctggtgctacagttttattaagaaatctttgggatgaactttcaaaactcattgatttaaactcggcccaatacgtttatgagagcatagagatgcctcttgttcccattttatatgaaatggagaaaatcggttttaaggttgacaaaaacactttgcaggagtatacaaaagagattgagagcaagcttttaaagttggaatcacagatttatcaaatagccggtgaatggtttaacataaactcgccaaaacaactctcatatatattattcgaaaaactgaagcttccggttgttaaaaagaccaaaacaggatattcaacagatgccgaggtattagaagagctgtatgataaacatgacataataccgcttattctggattatagaatgtatacgaaaatactgacaacttactgtcagggactggttcaggcaataaatcctgcaactggaagaattcataccaactttattcagacaggtacggcaactggaagacttgcaagtgcagagcccaatctgcaaaatattcctgtaaaatatgatgagggaaagctaataagaaaggcatttgttccagatgaaggttatgtgttgatagatgctgattattctcagattgagcttagaatacttgcacatatctctgaggatgaacgactgataaatgcttttaaaaataaccttgatattcattcacagacggcggcagagatctttggtgtggatataagtcaggttacaccaattatgcgaagccaggcaaaagcagttaactttggaattgtatatggtatatctgattatggactttcacgggatataaagatttcaagaaaagaagcagccgagtttattaatcgttattttgaaaagtatcccagagtaaaagaatatttggacaatgtcgtcaagtttgcccgtgaaaacggatttgttttgacaatatttaacaggaaaaggtatatcaaggatataaagtctactaataaaaacctgagaaacactgcagagagaatagcaatgaattcacctatccagggaagtgctgcagatattatgaaaatagcaatgataagagtttataaaaagctaaaagaaaacaatttaaaatcaagaattattctgcaggtccatgacgaacttttgattgaatcaccctatgaagagaaagagatagtaaaggaaatagtaaaatcggagatggaaaatgcggttttattgaaagttcctttggtagttgaagtgaaagaaggttcaaattggtatgaaacaaagtaaaggatcc

SEQ ID NO: 1765 - DNA, 2623 bp, Artificial Sequence
  Description of Artificial Sequence: Synthetic DNA sequence of Caldicellulosiruptor TOK13B DNA Polymerase Y781W
atgaaatacctgctgccgaccgctgctgctggtctgctgctcctcgctgcccagccggcgatggccatggaatttgttatttttgatgggaatagtattctgtatagagctttttttgccttgccacagcttactacctcaacaggcatacctacaaatgctatatatggttttttgaatgtgctgttaaaatacttagattctgaaaaaccggattatgtagcagtagcttttgacaaaaaaggcagagctgtccgaaaaagtgaatatgaagaatacaaggctaacagaaaaccgatgccagattctcttcaggttcagataccttacgtaagagaaatacttgctgctctgaacattcctgtactgaaatgtgaagggtatgaagctgatgacgttataggcacacttgtaaatagatttaaagcccaggatttagagattgtgataataaccggagacagagatacacttcagttacttgataaaaatgtaattgtcaaaatagtcacaacaaggtttgacaggacaactgaagatttgtatgctgtagaaaatgtaaaagaaaaatatggtgtttttgcgcatcaggttgttgactataaagcattagtaggtgatgcgtcagacaatataccaggtgttaagggaattggagataaaactgccataaagctgttagaagagtaccagactctggagaatatatatcagaatctaaataacattaaaggagcgctaaaagagaagttggaatcaggaaaagacatggcatttttatcaaaaagactggctactatcatatgcgatttaccaattgaggtgaatcttgaagaattaaaaaccaaagaatgggacaaagaaagactttatcagattttacttcaacttgagtttaaaagctttattaaaagactgggcttttcagaagagattaactatgcaaggcagaactttcagctacctgaatttagtattaaagaacttcgtgatgtttcagcaatagggggcaaagaaatctatctattgtactcagatgaagaaggacttttttatatttatgaccatcaaacctcaaccatttttacaacttctgataaggaagctattaaagatcttttaacactccaaagcattcaaaaggttgtatatgatttaaaaaatatactccataaggtggactttgatgaagctaatcagataaaaaattgtaatgatgttatgttggcttcatatgttttggacagtacacgcagttcgtacgatttggaaacattgtttatttcttatctcaacactgatatagctgcaatcaaagagaatagatgggctggtgctacagttttattaagaaatctttgggatgaactttcaaaactcattgatttaaactcggcccaatacgtttatgagagcatagagatgcctcttgttcccattttatatgaaatggagaaaatcggttttaaggttgacaaaaacactttgcaggagtatacaaaagagattgagagcaagcttttaaagttggaatcacagatttatcaaatagccggtgaatggtttaacataaactcgccaaaacaactctcatatatattattcgaaaaactgaagcttccggttgttaaaaagaccaaaacaggatattcaacagatgccgaggtattagaagagctgtatgataaacatgacataataccgcttattctggattatagaatgtatacgaaaatactgacaacttactgtcagggactggttcaggcaataaatcctgcaactggaagaattcataccaactttattcagacaggtacggcaactggaagacttgcaagtgcagagcccaatctgcaaaatattcctgtaaaatatgatgagggaaagctaataagaaaggcatttgttccagatgaaggttatgtgttgatagatgctgattattctcagattgagcttagaatacttgcacatatctctgaggatgaacgactgataaatgcttttaaaaataaccttgatattcattcacagacggcggcagagatctttggtgtggatataagtcaggttacaccaattatgcgaagccaggcaaaagcagttaactttggaattgtatatggtatatctgattatggactttcacgggatataaagatttcaagaaaagaagcagccgagtttattaatcgttattttgaaaagtatcccagagtaaaagaatatttggacaatgtcgtcaagtttgcccgtgaaaacggatttgttttgacaatatttaacaggaaaaggtatatcaaggatataaagtctactaataaaaacctgagaaactgggcagagagaatagcaatgaattcacctatccagggaagtgctgcagatattatgaaaatagcaatgataagagtttataaaaagctaaaagaaaacaatttaaaatcaagaattattctgcaggtccatgacgaacttttgattgaatcaccctatgaagagaaagagatagtaaaggaaatagtaaaatcggagatggaaaatgcggttttattgaaagttcctttggtagttgaagtgaaagaaggttcaaattggtatgaaacaaagtaaaggatcc

SEQ ID NO: 1766 - DNA, 2623 bp, Artificial Sequence
  Description of Artificial Sequence: Synthetic DNA sequence of Caldicellulosiruptor TOK13B DNA Polymerase Y781V
atgaaatacctgctgccgaccgctgctgctggtctgctgctcctcgctgcccagccggcgatggccatggaatttgttatttttgatgggaatagtattctgtatagagctttttttgccttgccacagcttactacctcaacaggcatacctacaaatgctatatatggttttttgaatgtgctgttaaaatacttagattctgaaaaaccggattatgtagcagtagcttttgacaaaaaaggcagagctgtccgaaaaagtgaatatgaagaatacaaggctaacagaaaaccgatgccagattctcttcaggttcagataccttacgtaagagaaatacttgctgctctgaacattcctgtactgaaatgtgaagggtatgaagctgatgacgttataggcacacttgtaaatagatttaaagcccaggatttagagattgtgataataaccggagacagagatacacttcagttacttgataaaaatgtaattgtcaaaatagtcacaacaaggtttgacaggacaactgaagatttgtatgctgtagaaaatgtaaaagaaaaatatggtgtttttgcgcatcaggttgttgactataaagcattagtaggtgatgcgtcagacaatataccaggtgttaagggaattggagataaaactgccataaagctgttagaagagtaccagactctggagaatatatatcagaatctaaataacattaaaggagcgctaaaagagaagttggaatcaggaaaagacatggcatttttatcaaaaagactggctactatcatatgcgatttaccaattgaggtgaatcttgaagaattaaaaaccaaagaatgggacaaagaaagactttatcagattttacttcaacttgagtttaaaagctttattaaaagactgggcttttcagaagagattaactatgcaaggcagaactttcagctacctgaatttagtattaaagaacttcgtgatgtttcagcaatagggggcaaagaaatctatctattgtactcagatgaagaaggacttttttatatttatgaccatcaaacctcaaccatttttacaacttctgataaggaagctattaaagatcttttaacactccaaagcattcaaaaggttgtatatgatttaaaaaatatactccataaggtggactttgatgaagctaatcagataaaaaattgtaatgatgttatgttggcttcatatgttttggacagtacacgcagttcgtacgatttggaaacattgtttatttcttatctcaacactgatatagctgcaatcaaagagaatagatgggctggtgctacagttttattaagaaatctttgggatgaactttcaaaactcattgatttaaactcggcccaatacgtttatgagagcatagagatgcctcttgttcccattttatatgaaatggagaaaatcggttttaaggttgacaaaaacactttgcaggagtatacaaaagagattgagagcaagcttttaaagttggaatcacagatttatcaaatagccggtgaatggtttaacataaactcgccaaaacaactctcatatatattattcgaaaaactgaagcttccggttgttaaaaagaccaaaacaggatattcaacagatgccgaggtattagaagagctgtatgataaacatgacataataccgcttattctggattatagaatgtatacgaaaatactgacaacttactgtcagggactggttcaggcaataaatcctgcaactggaagaattcataccaactttattcagacaggtacggcaactggaagacttgcaagtgcagagcccaatctgcaaaatattcctgtaaaatatgatgagggaaagctaataagaaaggcatttgttccagatgaaggttatgtgttgatagatgctgattattctcagattgagcttagaatacttgcacatatctctgaggatgaacgactgataaatgcttttaaaaataaccttgatattcattcacagacggcggcagagatctttggtgtggatataagtcaggttacaccaattatgcgaagccaggcaaaagcagttaactttggaattgtatatggtatatctgattatggactttcacgggatataaagatttcaagaaaagaagcagccgagtttattaatcgttattttgaaaagtatcccagagtaaaagaatatttggacaatgtcgtcaagtttgcccgtgaaaacggatttgttttgacaatatttaacaggaaaaggtatatcaaggatataaagtctactaataaaaacctgagaaacgttgcagagagaatagcaatgaattcacctatccagggaagtgctgcagatattatgaaaatagcaatgataagagtttataaaaagctaaaagaaaacaatttaaaatcaagaattattctgcaggtccatgacgaacttttgattgaatcaccctatgaagagaaagagatagtaaaggaaatagtaaaatcggagatggaaaatgcggttttattgaaagttcctttggtagttgaagtgaaagaaggttcaaattggtatgaaacaaagtaaaggatcc

SEQ ID NO: 1767 - DNA, 2623 bp, Artificial Sequence
  Description of Artificial Sequence: Synthetic DNA sequence of Caldicellulosiruptor TOK13B DNA Polymerase A782R
atgaaatacctgctgccgaccgctgctgctggtctgctgctcctcgctgcccagccggcgatggccatggaatttgttatttttgatgggaatagtattctgtatagagctttttttgccttgccacagcttactacctcaacaggcatacctacaaatgctatatatggttttttgaatgtgctgttaaaatacttagattctgaaaaaccggattatgtagcagtagcttttgacaaaaaaggcagagctgtccgaaaaagtgaatatgaagaatacaaggctaacagaaaaccgatgccagattctcttcaggttcagataccttacgtaagagaaatacttgctgctctgaacattcctgtactgaaatgtgaagggtatgaagctgatgacgttataggcacacttgtaaatagatttaaagcccaggatttagagattgtgataataaccggagacagagatacacttcagttacttgataaaaatgtaattgtcaaaatagtcacaacaaggtttgacaggacaactgaagatttgtatgctgtagaaaatgtaaaagaaaaatatggtgtttttgcgcatcaggttgttgactataaagcattagtaggtgatgcgtcagacaatataccaggtgttaagggaattggagataaaactgccataaagctgttagaagagtaccagactctggagaatatatatcagaatctaaataacattaaaggagcgctaaaagagaagttggaatcaggaaaagacatggcatttttatcaaaaagactggctactatcatatgcgatttaccaattgaggtgaatcttgaagaattaaaaaccaaagaatgggacaaagaaagactttatcagattttacttcaacttgagtttaaaagctttattaaaagactgggcttttcagaagagattaactatgcaaggcagaactttcagctacctgaatttagtattaaagaacttcgtgatgtttcagcaatagggggcaaagaaatctatctattgtactcagatgaagaaggacttttttatatttatgaccatcaaacctcaaccatttttacaacttctgataaggaagctattaaagatcttttaacactccaaagcattcaaaaggttgtatatgatttaaaaaatatactccataaggtggactttgatgaagctaatcagataaaaaattgtaatgatgttatgttggcttcatatgttttggacagtacacgcagttcgtacgatttggaaacattgtttatttcttatctcaacactgatatagctgcaatcaaagagaatagatgggctggtgctacagttttattaagaaatctttgggatgaactttcaaaactcattgatttaaactcggcccaatacgtttatgagagcatagagatgcctcttgttcccattttatatgaaatggagaaaatcggttttaaggttgacaaaaacactttgcaggagtatacaaaagagattgagagcaagcttttaaagttggaatcacagatttatcaaatagccggtgaatggtttaacataaactcgccaaaacaactctcatatatattattcgaaaaactgaagcttccggttgttaaaaagaccaaaacaggatattcaacagatgccgaggtattagaagagctgtatgataaacatgacataataccgcttattctggattatagaatgtatacgaaaatactgacaacttactgtcagggactggttcaggcaataaatcctgcaactggaagaattcataccaactttattcagacaggtacggcaactggaagacttgcaagtgcagagcccaatctgcaaaatattcctgtaaaatatgatgagggaaagctaataagaaaggcatttgttccagatgaaggttatgtgttgatagatgctgattattctcagattgagcttagaatacttgcacatatctctgaggatgaacgactgataaatgcttttaaaaataaccttgatattcattcacagacggcggcagagatctttggtgtggatataagtcaggttacaccaattatgcgaagccaggcaaaagcagttaactttggaattgtatatggtatatctgattatggactttcacgggatataaagatttcaagaaaagaagcagccgagtttattaatcgttattttgaaaagtatcccagagtaaaagaatatttggacaatgtcgtcaagtttgcccgtgaaaacggatttgttttgacaatatttaacaggaaaaggtatatcaaggatataaagtctactaataaaaacctgagaaactatcgtgagagaatagcaatgaattcacctatccagggaagtgctgcagatattatgaaaatagcaatgataagagtttataaaaagctaaaagaaaacaatttaaaatcaagaattattctgcaggtccatgacgaacttttgattgaatcaccctatgaagagaaagagatagtaaaggaaatagtaaaatcggagatggaaaatgcggttttattgaaagttcctttggtagttgaagtgaaagaaggttcaaattggtatgaaacaaagtaaaggatcc

SEQ ID NO: 1768 - DNA, 2623 bp, Artificial Sequence; identical to SEQ ID NO: 1767
  Description of Artificial Sequence: Synthetic DNA sequence of Caldicellulosiruptor TOK13B DNA Polymerase A782N

SEQ ID NO: 1769 - DNA, 2623 bp, Artificial Sequence
  Description of Artificial Sequence: Synthetic DNA sequence of Caldicellulosiruptor TOK13B DNA Polymerase A782D
atgaaatacctgctgccgaccgctgctgctggtctgctgctcctcgctgcccagccggcgatggccatggaatttgttatttttgatgggaatagtattctgtatagagctttttttgccttgccacagcttactacctcaacaggcatacctacaaatgctatatatggttttttgaatgtgctgttaaaatacttagattctgaaaaaccggattatgtagcagtagcttttgacaaaaaaggcagagctgtccgaaaaagtgaatatgaagaatacaaggctaacagaaaaccgatgccagattctcttcaggttcagataccttacgtaagagaaatacttgctgctctgaacattcctgtactgaaatgtgaagggtatgaagctgatgacgttataggcacacttgtaaatagatttaaagcccaggatttagagattgtgataataaccggagacagagatacacttcagttacttgataaaaatgtaattgtcaaaatagtcacaacaaggtttgacaggacaactgaagatttgtatgctgtagaaaatgtaaaagaaaaatatggtgtttttgcgcatcaggttgttgactataaagcattagtaggtgatgcgtcagacaatataccaggtgttaagggaattggagataaaactgccataaagctgttagaagagtaccagactctggagaatatatatcagaatctaaataacattaaaggagcgctaaaagagaagttggaatcaggaaaagacatggcatttttatcaaaaagactggctactatcatatgcgatttaccaattgaggtgaatcttgaagaattaaaaaccaaagaatgggacaaagaaagactttatcagattttacttcaacttgagtttaaaagctttattaaaagactgggcttttcagaagagattaactatgcaaggcagaactttcagctacctgaatttagtattaaagaacttcgtgatgtttcagcaatagggggcaaagaaatctatctattgtactcagatgaagaaggacttttttatatttatgaccatcaaacctcaaccatttttacaacttctgataaggaagctattaaagatcttttaacactccaaagcattcaaaaggttgtatatgatttaaaaaatatactccataaggtggactttgatgaagctaatcagataaaaaattgtaatgatgttatgttggcttcatatgttttggacagtacacgcagttcgtacgatttggaaacattgtttatttcttatctcaacactgatatagctgcaatcaaagagaatagatgggctggtgctacagttttattaagaaatctttgggatgaactttcaaaactcattgatttaaactcggcccaatacgtttatgagagcatagagatgcctcttgttcccattttatatgaaatggagaaaatcggttttaaggttgacaaaaacactttgcaggagtatacaaaagagattgagagcaagcttttaaagttggaatcacagatttatcaaatagccggtgaatggtttaacataaactcgccaaaacaactctcatatatattattcgaaaaactgaagcttccggttgttaaaaagaccaaaacaggatattcaacagatgccgaggtattagaagagctgtatgataaacatgacataataccgcttattctggattatagaatgtatacgaaaatactgacaacttactgtcagggactggttcaggcaataaatcctgcaactggaagaattcataccaactttattcagacaggtacggcaactggaagacttgcaagtgcagagcccaatctgcaaaatattcctgtaaaatatgatgagggaaagctaataagaaaggcatttgttccagatgaaggttatgtgttgatagatgctgattattctcagattgagcttagaatacttgcacatatctctgaggatgaacgactgataaatgcttttaaaaataaccttgatattcattcacagacggcggcagagatctttggtgtggatataagtcaggttacaccaattatgcgaagccaggcaaaagcagttaactttggaattgtatatggtatatctgattatggactttcacgggatataaagatttcaagaaaagaagcagccgagtttattaatcgttattttgaaaagtatcccagagtaaaagaatatttggacaatgtcgtcaagtttgcccgtgaaaacggatttgttttgacaatatttaacaggaaaaggtatatcaaggatataaagtctactaataaaaacctgagaaactatgatgagagaatagcaatgaattcacctatccagggaagtgctgcagatattatgaaaatagcaatgataagagtttataaaaagctaaaagaaaacaatttaaaatcaagaattattctgcaggtccatgacgaacttttgattgaatcaccctatgaagagaaagagatagtaaaggaaatagtaaaatcggagatggaaaatgcggttttattgaaagttcctttggtagttgaagtgaaagaaggttcaaattggtatgaaacaaagtaaaggatcc

SEQ ID NO: 1770 - DNA, 2623 bp, Artificial Sequence
  Description of Artificial Sequence: Synthetic DNA sequence of Caldicellulosiruptor TOK13B DNA Polymerase A782C
atgaaatacctgctgccgaccgctgctgctggtctgctgctcctcgctgcccagccggcgatggccatggaatttgttatttttgatgggaatagtattctgtatagagctttttttgccttgccacagcttactacctcaacaggcatacctacaaatgctatatatggttttttgaatgtgctgttaaaatacttagattctgaaaaaccggattatgtagcagtagcttttgacaaaaaaggcagagctgtccgaaaaagtgaatatgaagaatacaaggctaacagaaaaccgatgccagattctcttcaggttcagataccttacgtaagagaaatacttgctgctctgaacattcctgtactgaaatgtgaagggtatgaagctgatgacgttataggcacacttgtaaatagatttaaagcccaggatttagagattgtgataataaccggagacagagatacacttcagttacttgataaaaatgtaattgtcaaaatagtcacaacaaggtttgacaggacaactgaagatttgtatgctgtagaaaatgtaaaagaaaaatatggtgtttttgcgcatcaggttgttgactataaagcattagtaggtgatgcgtcagacaatataccaggtgttaagggaattggagataaaactgccataaagctgttagaagagtaccagactctggagaatatatatcagaatctaaataacattaaaggagcgctaaaagagaagttggaatcaggaaaagacatggcatttttatcaaaaagactggctactatcatatgcgatttaccaattgaggtgaatcttgaagaattaaaaaccaaagaatgggacaaagaaagactttatcagattttacttcaacttgagtttaaaagctttattaaaagactgggcttttcagaagagattaactatgcaaggcagaactttcagctacctgaatttagtattaaagaacttcgtgatgtttcagcaatagggggcaaagaaatctatctattgtactcagatgaagaaggacttttttatatttatgaccatcaaacctcaaccatttttacaacttctgataaggaagctattaaagatcttttaacactccaaagcattcaaaaggttgtatatgatttaaaaaatatactccataaggtggactttgatgaagctaatcagataaaaaattgtaatgatgttatgttggcttcatatgttttggacagtacacgcagttcgtacgatttggaaacattgtttatttcttatctcaacactgatatagctgcaatcaaagagaatagatgggctggtgctacagttttattaagaaatctttgggatgaactttcaaaactcattgatttaaactcggcccaatacgtttatgagagcatagagatgcctcttgttcccattttatatgaaatggagaaaatcggttttaaggttgacaaaaacactttgcaggagtatacaaaagagattgagagcaagcttttaaagttggaatcacagatttatcaaatagccggtgaatggtttaacataaactcgccaaaacaactctcatatatattattcgaaaaactgaagcttccggttgttaaaaagaccaaaacaggatattcaacagatgccgaggtattagaagagctgtatgataaacatgacataataccgcttattctggattatagaatgtatacgaaaatactgacaacttactgtcagggactggttcaggcaataaatcctgcaactggaagaattcataccaactttattcagacaggtacggcaactggaagacttgcaagtgcagagcccaatctgcaaaatattcctgtaaaatatgatgagggaaagctaataagaaaggcatttgttccagatgaaggttatgtgttgatagatgctgattattctcagattgagcttagaatacttgcacatatctctgaggatgaacgactgataaatgcttttaaaaataaccttgatattcattcacagacggcggcagagatctttggtgtggatataagtcaggttacaccaattatgcgaagccaggcaaaagcagttaactttggaattgtatatggtatatctgattatggactttcacgggatataaagatttcaagaaaagaagcagccgagtttattaatcgttattttgaaaagtatcccagagtaaaagaatatttggacaatgtcgtcaagtttgcccgtgaaaacggatttgttttgacaatatttaacaggaaaaggtatatcaaggatataaagtctactaataaaaacctgagaaactattgtgagagaatagcaatgaattcacctatccagggaagtgctgcagatattatgaaaatagcaatgataagagtttataaaaagctaaaagaaaacaatttaaaatcaagaattattctgcaggtccatgacgaacttttgattgaatcaccctatgaagagaaagagatagtaaaggaaatagtaaaatcggagatggaaaatgcggttttattgaaagttcctttggtagttgaagtgaaagaaggttcaaattggtatgaaacaaagtaaaggatcc

SEQ ID NO: 1771 - DNA, 2623 bp, Artificial Sequence
  Description of Artificial Sequence: Synthetic DNA sequence of Caldicellulosiruptor TOK13B DNA Polymerase A782E
atgaaatacctgctgccgaccgctgctgctggtctgctgctcctcgctgcccagccggcgatggccatggaatttgttatttttgatgggaatagtattctgtatagagctttttttgccttgccacagcttactacctcaacaggcatacctacaaatgctatatatggttttttgaatgtgctgttaaaatacttagattctgaaaaaccggattatgtagcagtagcttttgacaaaaaaggcagagctgtccgaaaaagtgaatatgaagaatacaaggctaacagaaaaccgatgccagattctcttcaggttcagataccttacgtaagagaaatacttgctgctctgaacattcctgtactgaaatgtgaagggtatgaagctgatgacgttataggcacacttgtaaatagatttaaagcccaggatttagagattgtgataataaccggagacagagatacacttcagttacttgataaaaatgtaattgtcaaaatagtcacaacaaggtttgacaggacaactgaagatttgtatgctgtagaaaatgtaaaagaaaaatatggtgtttttgcgcatcaggttgttgactataaagcattagtaggtgatgcgtcagacaatataccaggtgttaagggaattggagataaaactgccataaagctgttagaagagtaccagactctggagaatatatatcagaatctaaataacattaaaggagcgctaaaagagaagttggaatcaggaaaagacatggcatttttatcaaaaagactggctactatcatatgcgatttaccaattgaggtgaatcttgaagaattaaaaaccaaagaatgggacaaagaaagactttatcagattttacttcaacttgagtttaaaagctttattaaaagactgggcttttcagaagagattaactatgcaaggcagaactttcagctacctgaatttagtattaaagaacttcgtgatgtttcagcaatagggggcaaagaaatctatctattgtactcagatgaagaaggacttttttatatttatgaccatcaaacctcaaccatttttacaacttctgataaggaagctattaaagatcttttaacactccaaagcattcaaaaggttgtatatgatttaaaaaatatactccataaggtggactttgatgaagctaatcagataaaaaattgtaatgatgttatgttggcttcatatgttttggacagtacacgcagttcgtacgatttggaaacattgtttatttcttatctcaacactgatatagctgcaatcaaagagaatagatgggctggtgctacagttttattaagaaatctttgggatgaactttcaaaactcattgatttaaactcggcccaatacgtttatgagagcatagagatgcctcttgttcccattttatatgaaatggagaaaatcggttttaaggttgacaaaaacactttgcaggagtatacaaaagagattgagagcaagcttttaaagttggaatcacagatttatcaaatagccggtgaatggtttaacataaactcgccaaaacaactctcatatatattattcgaaaaactgaagcttccggttgttaaaaagaccaaaacaggatattcaacagatgccgaggtattagaagagctgtatgataaacatgacataataccgcttattctggattatagaatgtatacgaaaatactgacaacttactgtcagggactggttcaggcaataaatcctgcaactggaagaattcataccaactttattcagacaggtacggcaactggaagacttgcaagtgcagagcccaatctgcaaaatattcctgtaaaatatgatgagggaaagctaataagaaaggcatttgttccagatgaaggttatgtgttgatagatgctgattattctcagattgagcttagaatacttgcacatatctctgaggatgaacgactgataaatgcttttaaaaataaccttgatattcattcacagacggcggcagagatctttggtgtggatataagtcaggttacaccaattatgcgaagccaggcaaaagcagttaactttggaattgtatatggtatatctgattatggactttcacgggatataaagatttcaagaaaagaagcagccgagtttattaatcgttattttgaaaagtatcccagagtaaaagaatatttggacaatgtcgtcaagtttgcccgtgaaaacggatttgttttgacaatatttaacaggaaaaggtatatcaaggatataaagtctactaataaaaacctgagaaactatgaagagagaatagcaatgaattcacctatccagggaagtgctgcagatattatgaaaatagcaatgataagagtttataaaaagctaaaagaaaacaatttaaaatcaagaattattctgcaggtccatgacgaacttttgattgaatcaccctatgaagagaaagagatagtaaaggaaatagtaaaatcggagatggaaaatgcggttttattgaaagttcctttggtagttgaagtgaaagaaggttcaaattggtatgaaacaaagtaaaggatcc

SEQ ID NO: 1772 - DNA, 2623 bp, Artificial Sequence
  Description of Artificial Sequence: Synthetic DNA sequence of Caldicellulosiruptor TOK13B DNA Polymerase A782Q
atgaaatacctgctgccgaccgctgctgctggtctgctgctcctcgctgcccagccggcgatggccatggaatttgttatttttgatgggaatagtattctgtatagagctttttttgccttgccacagcttactacctcaacaggcatacctacaaatgctatatatggttttttgaatgtgctgttaaaatacttagattctgaaaaaccggattatgtagcagtagcttttgacaaaaaaggcagagctgtccgaaaaagtgaatatgaagaatacaaggctaacagaaaaccgatgccagattctcttcaggttcagataccttacgtaagagaaatacttgctgctctgaacattcctgtactgaaatgtgaagggtatgaagctgatgacgttataggcacacttgtaaatagatttaaagcccaggatttagagattgtgataataaccggagacagagatacacttcagttacttgataaaaatgtaattgtcaaaatagtcacaacaaggtttgacaggacaactgaagatttgtatgctgtagaaaatgtaaaagaaaaatatggtgtttttgcgcatcaggttgttgactataaagcattagtaggtgatgcgtcagacaatataccaggtgttaagggaattggagataaaactgccataaagctgttagaagagtaccagactctggagaatatatatcagaatctaaataacattaaaggagcgctaaaagagaagttggaatcaggaaaagacatggcatttttatcaaaaagactggctactatcatatgcgatttaccaattgaggtgaatcttgaagaattaaaaaccaaagaatgggacaaagaaagactttatcagattttacttcaacttgagtttaaaagctttattaaaagactgggcttttcagaagagattaactatgcaaggcagaactttcagctacctgaatttagtattaaagaacttcgtgatgtttcagcaatagggggcaaagaaatctatctattgtactcagatgaagaaggacttttttatatttatgaccatcaaacctcaaccatttttacaacttctgataaggaagctattaaagatcttttaacactccaaagcattcaaaaggttgtatatgatttaaaaaatatactccataaggtggactttgatgaagctaatcagataaaaaattgtaatgatgttatgttggcttcatatgttttggacagtacacgcagttcgtacgatttggaaacattgtttatttcttatctcaacactgatatagctgcaatcaaagagaatagatgggctggtgctacagttttattaagaaatctttgggatgaactttcaaaactcattgatttaaactcggcccaatacgtttatgagagcatagagatgcctcttgttcccattttatatgaaatggagaaaatcggttttaaggttgacaaaaacactttgcaggagtatacaaaagagattgagagcaagcttttaaagttggaatcacagatttatcaaatagccggtgaatggtttaacataaactcgccaaaacaactctcatatatattattcgaaaaactgaagcttccggttgttaaaaagaccaaaacaggatattcaacagatgccgaggtattagaagagctgtatgataaacatgacataataccgcttattctggattatagaatgtatacgaaaatactgacaacttactgtcagggactggttcaggcaataaatcctgcaactggaagaattcataccaactttattcagacaggtacggcaactggaagacttgcaagtgcagagcccaatctgcaaaatattcctgtaaaatatgatgagggaaagctaataagaaaggcatttgttccagatgaaggttatgtgttgatagatgctgattattctcagattgagcttagaatacttgcacatatctctgaggatgaacgactgataaatgcttttaaaaataaccttgatattcattcacagacggcggcagagatctttggtgtggatataagtcaggttacaccaattatgcgaagccaggcaaaagcagttaactttggaattgtatatggtatatctgattatggactttcacgggatataaagatttcaagaaaagaagcagccgagtttattaatcgttattttgaaaagtatcccagagtaaaagaatatttggacaatgtcgtcaagtttgcccgtgaaaacggatttgttttgacaatatttaacaggaaaaggtatatcaaggatataaagtctactaataaaaacctgagaaactatcaagagagaatagcaatgaattcacctatccagggaagtgctgcagatattatgaaaatagcaatgataagagtttataaaaagctaaaagaaaacaatttaaaatcaagaattattctgcaggtccatgacgaacttttgattgaatcaccctatgaagagaaagagatagtaaaggaaatagtaaaatcggagatggaaaatgcggttttattgaaagttcctttggtagttgaagtgaaagaaggttcaaattggtatgaaacaaagtaaaggatcc

SEQ ID NO: 1773 - DNA, 2623 bp, Artificial Sequence
  Description of Artificial Sequence: Synthetic DNA sequence of Caldicellulosiruptor TOK13B DNA Polymerase A782G
atgaaatacctgctgccgaccgctgctgctggtctgctgctcctcgctgcccagccggcgatggccatggaatttgttatttttgatgggaatagtattctgtatagagctttttttgccttgccacagcttactacctcaacaggcatacctacaaatgctatatatggttttttgaatgtgctgttaaaatacttagattctgaaaaaccggattatgtagcagtagcttttgacaaaaaaggcagagctgtccgaaaaagtgaatatgaagaatacaaggctaacagaaaaccgatgccagattctcttcaggttcagataccttacgtaagagaaatacttgctgctctgaacattcctgtactgaaatgtgaagggtatgaagctgatgacgttataggcacacttgtaaatagatttaaagcccaggatttagagattgtgataataaccggagacagagatacacttcagttacttgataaaaatgtaattgtcaaaatagtcacaacaaggtttgacaggacaactgaagatttgtatgctgtagaaaatgtaaaagaaaaatatggtgtttttgcgcatcaggttgttgactataaagcattagtaggtgatgcgtcagacaatataccaggtgttaagggaattggagataaaactgccataaagctgttagaagagtaccagactctggagaatatatatcagaatctaaataacattaaaggagcgctaaaagagaagttggaatcaggaaaagacatggcatttttatcaaaaagactggctactatcatatgcgatttaccaattgaggtgaatcttgaagaattaaaaaccaaagaatgggacaaagaaagactttatcagattttacttcaacttgagtttaaaagctttattaaaagactgggcttttcagaagagattaactatgcaaggcagaactttcagctacctgaatttagtattaaagaacttcgtgatgtttcagcaatagggggcaaagaaatctatctattgtactcagatgaagaaggacttttttatatttatgaccatcaaacctcaaccatttttacaacttctgataaggaagctattaaagatcttttaacactccaaagcattcaaaaggttgtatatgatttaaaaaatatactccataaggtggactttgatgaagctaatcagataaaaaattgtaatgatgttatgttggcttcatatgttttggacagtacacgcagttcgtacgatttggaaacattgtttatttcttatctcaacactgatatagctgcaatcaaagagaatagatgggctggtgctacagttttattaagaaatctttgggatgaactttcaaaactcattgatttaaactcggcccaatacgtttatgagagcatagagatgcctcttgttcccattttatatgaaatggagaaaatcggttttaaggttgacaaaaacactttgcaggagtatacaaaagagattgagagcaagcttttaaagttggaatcacagatttatcaaatagccggtgaatggtttaacataaactcgccaaaacaactctcatatatattattcgaaaaactgaagcttccggttgttaaaaagaccaaaacaggatattcaacagatgccgaggtattagaagagctgtatgataaacatgacataataccgcttattctggattatagaatgtatacgaaaatactgacaacttactgtcagggactggttcaggcaataaatcctgcaactggaagaattcataccaactttattcagacaggtacggcaactggaagacttgcaagtgcagagcccaatctgcaaaatattcctgtaaaatatgatgagggaaagctaataagaaaggcatttgttccagatgaaggttatgtgttgatagatgctgattattctcagattgagcttagaatacttgcacatatctctgaggatgaacgactgataaatgcttttaaaaataaccttgatattcattcacagacggcggcagagatctttggtgtggatataagtcaggttacaccaattatgcgaagccaggcaaaagcagttaactttggaattgtatatggtatatctgattatggactttcacgggatataaagatttcaagaaaagaagcagccgagtttattaatcgttattttgaaaagtatcccagagtaaaagaatatttggacaatgtcgtcaagtttgcccgtgaaaacggatttgttttgacaatatttaacaggaaaaggtatatcaaggatataaagtctactaataaaaacctgagaaactatggtgagagaatagcaatgaattcacctatccagggaagtgctgcagatattatgaaaatagcaatgataagagtttataaaaagctaaaagaaaacaatttaaaatcaagaattattctgcaggtccatgacgaacttttgattgaatcaccctatgaagagaaagagatagtaaaggaaatagtaaaatcggagatggaaaatgcggttttattgaaagttcctttggtagttgaagtgaaagaaggttcaaattggtatgaaacaaagtaaaggatcc

SEQ ID NO: 1774 - DNA, 2623 bp, Artificial Sequence
  Description of Artificial Sequence: Synthetic DNA sequence of Caldicellulosiruptor TOK13B DNA Polymerase A782H
atgaaatacctgctgccgaccgctgctgctggtctgctgctcctcgctgcccagccggcgatggccatggaatttgttatttttgatgggaatagtattctgtatagagctttttttgccttgccacagcttactacctcaacaggcatacctacaaatgctatatatggttttttgaatgtgctgttaaaatacttagattctgaaaaaccggattatgtagcagtagcttttgacaaaaaaggcagagctgtccgaaaaagtgaatatgaagaatacaaggctaacagaaaaccgatgccagattctcttcaggttcagataccttacgtaagagaaatacttgctgctctgaacattcctgtactgaaatgtgaagggtatgaagctgatgacgttataggcacacttgtaaatagatttaaagcccaggatttagagattgtgataataaccggagacagagatacacttcagttacttgataaaaatgtaattgtcaaaatagtcacaacaaggtttgacaggacaactgaagatttgtatgctgtagaaaatgtaaaagaaaaatatggtgtttttgcgcatcaggttgttgactataaagcattagtaggtgatgcgtcagacaatataccaggtgttaagggaattggagataaaactgccataaagctgttagaagagtaccagactctggagaatatatatcagaatctaaataacattaaaggagcgctaaaagagaagttggaatcaggaaaagacatggcatttttatcaaaaagactggctactatcatatgcgatttaccaattgaggtgaatcttgaagaattaaaaaccaaagaatgggacaaagaaagactttatcagattttacttcaacttgagtttaaaagctttattaaaagactgggcttttcagaagagattaactatgcaaggcagaactttcagctacctgaatttagtattaaagaacttcgtgatgtttcagcaatagggggcaaagaaatctatctattgtactcagatgaagaaggacttttttatatttatgaccatcaaacctcaaccatttttacaacttctgataaggaagctattaaagatcttttaacactccaaagcattcaaaaggttgtatatgatttaaaaaatatactccataaggtggactttgatgaagctaatcagataaaaaattgtaatgatgttatgttggcttcatatgttttggacagtacacgcagttcgtacgatttggaaacattgtttatttcttatctcaacactgatatagctgcaatcaaagagaatagatgggctggtgctacagttttattaagaaatctttgggatgaactttcaaaactcattgatttaaactcggcccaatacgtttatgagagcatagagatgcctcttgttcccattttatatgaaatggagaaaatcggttttaaggttgacaaaaacactttgcaggagtatacaaaagagattgagagcaagcttttaaagttggaatcacagatttatcaaatagccggtgaatggtttaacataaactcgccaaaacaactctcatatatattattcgaaaaactgaagcttccggttgttaaaaagaccaaaacaggatattcaacagatgccgaggtattagaagagctgtatgataaacatgacataataccgcttattctggattatagaatgtatacgaaaatactgacaacttactgtcagggactggttcaggcaataaatcctgcaactggaagaattcataccaactttattcagacaggtacggcaactggaagacttgcaagtgcagagcccaatctgcaaaatattcctgtaaaatatgatgagggaaagctaataagaaaggcatttgttccagatgaaggttatgtgttgatagatgctgattattctcagattgagcttagaatacttgcacatatctctgaggatgaacgactgataaatgcttttaaaaataaccttgatattcattcacagacggcggcagagatctttggtgtggatataagtcaggttacaccaattatgcgaagccaggcaaaagcagttaactttggaattgtatatggtatatctgattatggactttcacgggatataaagatttcaagaaaagaagcagccgagtttattaatcgttattttgaaaagtatcccagagtaaaagaatatttggacaatgtcgtcaagtttgcccgtgaaaacggatttgttttgacaatatttaacaggaaaaggtatatcaaggatataaagtctactaataaaaacctgagaaactatcatgagagaatagcaatgaattcacctatccagggaagtgctgcagatattatgaaaatagcaatgataagagtttataaaaagctaaaagaaaacaatttaaaatcaagaattattctgcaggtccatgacgaacttttgattgaatcaccctatgaagagaaagagatagtaaaggaaatagtaaaatcggagatggaaaatgcggttttattgaaagttcctttggtagttgaagtgaaagaaggttcaaattggtatgaaacaaagtaaaggatcc

SEQ ID NO: 1775 - DNA, 2623 bp, Artificial Sequence
  Description of Artificial Sequence: Synthetic DNA sequence of Caldicellulosiruptor TOK13B DNA Polymerase A782I
atgaaatacctgctgccgaccgctgctgctggtctgctgctcctcgctgcccagccggcgatggccatggaatttgttatttttgatgggaatagtattctgtatagagctttttttgccttgccacagcttactacctcaacaggcatacctacaaatgctatatatggttttttgaatgtgctgttaaaatacttagattctgaaaaaccggattatgtagcagtagcttttgacaaaaaaggcagagctgtccgaaaaagtgaatatgaagaatacaaggctaacagaaaaccgatgccagattctcttcaggttcagataccttacgtaagagaaatacttgctgctctgaacattcctgtactgaaatgtgaagggtatgaagctgatgacgttataggcacacttgtaaatagatttaaagcccaggatttagagattgtgataataaccggagacagagatacacttcagttacttgataaaaatgtaattgtcaaaatagtcacaacaaggtttgacaggacaactgaagatttgtatgctgtagaaaatgtaaaagaaaaatatggtgtttttgcgcatcaggttgttgactataaagcattagtaggtgatgcgtcagacaatataccaggtgttaagggaattggagataaaactgccataaagctgttagaagagtaccagactctggagaatatatatcagaatctaaataacattaaaggagcgctaaaagagaagttggaatcaggaaaagacatggcatttttatcaaaaagactggctactatcatatgcgatttaccaattgaggtgaatcttgaagaattaaaaaccaaagaatgggacaaagaaagactttatcagattttacttcaacttgagtttaaaagctttattaaaagactgggcttttcagaagagattaactatgcaaggcagaactttcagctacctgaatttagtattaaagaacttcgtgatgtttcagcaatagggggcaaagaaatctatctattgtactcagatgaagaaggacttttttatatttatgaccatcaaacctcaaccatttttacaacttctgataaggaagctattaaagatcttttaacactccaaagcattcaaaaggttgtatatgatttaaaaaatatactccataaggtggactttgatgaagctaatcagataaaaaattgtaatgatgttatgttggcttcatatgttttggacagtacacgcagttcgtacgatttggaaacattgtttatttcttatctcaacactgatatagctgcaatcaaagagaatagatgggctggtgctacagttttattaagaaatctttgggatgaactttcaaaactcattgatttaaactcggcccaatacgtttatgagagcatagagatgcctcttgttcccattttatatgaaatggagaaaatcggttttaaggttgacaaaaacactttgcaggagtatacaaaagagattgagagcaagcttttaaagttggaatcacagatttatcaaatagccggtgaatggtttaacataaactcgccaaaacaactctcatatatattattcgaaaaactgaagcttccggttgttaaaaagaccaaaacaggatattcaacagatgccgaggtattagaagagctgtatgataaacatgacataataccgcttattctggattatagaatgtatacgaaaatactgacaacttactgtcagggactggttcaggcaataaatcctgcaactggaagaattcataccaactttattcagacaggtacggcaactggaagacttgcaagtgcagagcccaatctgcaaaatattcctgtaaaatatgatgagggaaagctaataagaaaggcatttgttccagatgaaggttatgtgttgatagatgctgattattctcagattgagcttagaatacttgcacatatctctgaggatgaacgactgataaatgcttttaaaaataaccttgatattcattcacagacggcggcagagatctttggtgtggatataagtcaggttacaccaattatgcgaagccaggcaaaagcagttaactttggaattgtatatggtatatctgattatggactttcacgggatataaagatttcaagaaaagaagcagccgagtttattaatcgttattttgaaaagtatcccagagtaaaagaatatttggacaatgtcgtcaagtttgcccgtgaaaacggatttgttttgacaatatttaacaggaaaaggtatatcaaggatataaagtctactaataaaaacctgagaaactatattgagagaatagcaatgaattcacctatccagggaagtgctgcagatattatgaaaatagcaatgataagagtttataaaaagctaaaagaaaacaatttaaaatcaagaattattctgcaggtccatgacgaacttttgattgaatcaccctatgaagagaaagagatagtaaaggaaatagtaaaatcggagatggaaaatgcggttttattgaaagttcctttggtagttgaagtgaaagaaggttcaaattggtatgaaacaaagtaaaggatcc

SEQ ID NO: 1776 - DNA, 2623 bp, Artificial Sequence
  Description of Artificial Sequence: Synthetic DNA sequence of Caldicellulosiruptor TOK13B DNA Polymerase A782L
atgaaatacctgctgccgaccgctgctgctggtctgctgctcctcgctgcccagccggcgatggccatggaatttgttatttttgatgggaatagtattctgtatagagctttttttgccttgccacagcttactacctcaacaggcatacctacaaatgctatatatggttttttgaatgtgctgttaaaatacttagattctgaaaaaccggattatgtagcagtagcttttgacaaaaaaggcagagctgtccgaaaaagtgaatatgaagaatacaaggctaacagaaaaccgatgccagattctcttcaggttcagataccttacgtaagagaaatacttgctgctctgaacattcctgtactgaaatgtgaagggtatgaagctgatgacgttataggcacacttgtaaatagatttaaagcccaggatttagagattgtgataataaccggagacagagatacacttcagttacttgataaaaatgtaattgtcaaaatagtcacaacaaggtttgacaggacaactgaagatttgtatgctgtagaaaatgtaaaagaaaaatatggtgtttttgcgcatcaggttgttgactataaagcattagtaggtgatgcgtcagacaatataccaggtgttaagggaattggagataaaactgccataaagctgttagaagagtaccagactctggagaatatatatcagaatctaaataacattaaaggagcgctaaaagagaagttggaatcaggaaaagacatggcatttttatcaaaaagactggctactatcatatgcgatttaccaattgaggtgaatcttgaagaattaaaaaccaaagaatgggacaaagaaagactttatcagattttacttcaacttgagtttaaaagctttattaaaagactgggcttttcagaagagattaactatgcaaggcagaactttcagctacctgaatttagtattaaagaacttcgtgatgtttcagcaatagggggcaaagaaatctatctattgtactcagatgaagaaggacttttttatatttatgaccatcaaacctcaaccatttttacaacttctgataaggaagctattaaagatcttttaacactccaaagcattcaaaaggttgtatatgatttaaaaaatatactccataaggtggactttgatgaagctaatcagataaaaaattgtaatgatgttatgttggcttcatatgttttggacagtacacgcagttcgtacgatttggaaacattgtttatttcttatctcaacactgatatagctgcaatcaaagagaatagatgggctggtgctacagttttattaagaaatctttgggatgaactttcaaaactcattgatttaaactcggcccaatacgtttatgagagcatagagatgcctcttgttcccattttatatgaaatggagaaaatcggttttaaggttgacaaaaacactttgcaggagtatacaaaagagattgagagcaagcttttaaagttggaatcacagatttatcaaatagccggtgaatggtttaacataaactcgccaaaacaactctcatatatattattcgaaaaactgaagcttccggttgttaaaaagaccaaaacaggatattcaacagatgccgaggtattagaagagctgtatgataaacatgacataataccgcttattctggattatagaatgtatacgaaaatactgacaacttactgtcagggactggttcaggcaataaatcctgcaactggaagaattcataccaactttattcagacaggtacggcaactggaagacttgcaagtgcagagcccaatctgcaaaatattcctgtaaaatatgatgagggaaagctaataagaaaggcatttgttccagatgaaggttatgtgttgatagatgctgattattctcagattgagcttagaatacttgcacatatctctgaggatgaacgactgataaatgcttttaaaaataaccttgatattcattcacagacggcggcagagatctttggtgtggatataagtcaggttacaccaattatgcgaagccaggcaaaagcagttaactttggaattgtatatggtatatctgattatggactttcacgggatataaagatttcaagaaaagaagcagccgagtttattaatcgttattttgaaaagtatcccagagtaaaagaatatttggacaatgtcgtcaagtttgcccgtgaaaacggatttgttttgacaatatttaacaggaaaaggtatatcaaggatataaagtctactaataaaaacctgagaaactatcttgagagaatagcaatgaattcacctatccagggaagtgctgcagatattatgaaaatagcaatgataagagtttataaaaagctaaaagaaaacaatttaaaatcaagaattattctgcaggtccatgacgaacttttgattgaatcaccctatgaagagaaagagatagtaaaggaaatagtaaaatcggagatggaaaatgcggttttattgaaagttcctttggtagttgaagtgaaagaaggttcaaattggtatgaaacaaagtaaaggatcc

SEQ ID NO: 1777 - DNA, 2623 bp, Artificial Sequence
  Description of Artificial Sequence: Synthetic DNA sequence of Caldicellulosiruptor TOK13B DNA Polymerase A782K
atgaaatacctgctgccgaccgctgctgctggtctgctgctcctcgctgcccagccggcgatggccatggaatttgttatttttgatgggaatagtattctgtatagagctttttttgccttgccacagcttactacctcaacaggcatacctacaaatgctatatatggttttttgaatgtgctgttaaaatacttagattctgaaaaaccggattatgtagcagtagcttttgacaaaaaaggcagagctgtccgaaaaagtgaatatgaagaatacaaggctaacagaaaaccgatgccagattctcttcaggttcagataccttacgtaagagaaatacttgctgctctgaacattcctgtactgaaatgtgaagggtatgaagctgatgacgttataggcacacttgtaaatagatttaaagcccaggatttagagattgtgataataaccggagacagagatacacttcagttacttgataaaaatgtaattgtcaaaatagtcacaacaaggtttgacaggacaactgaagatttgtatgctgtagaaaatgtaaaagaaaaatatggtgtttttgcgcatcaggttgttgactataaagcattagtaggtgatgcgtcagacaatataccaggtgttaagggaattggagataaaactgccataaagctgttagaagagtaccagactctggagaatatatatcagaatctaaataacattaaaggagcgctaaaagagaagttggaatcaggaaaagacatggcatttttatcaaaaagactggctactatcatatgcgatttaccaattgaggtgaatcttgaagaattaaaaaccaaagaatgggacaaagaaagactttatcagattttacttcaacttgagtttaaaagctttattaaaagactgggcttttcagaagagattaactatgcaaggcagaactttcagctacctgaatttagtattaaagaacttcgtgatgtttcagcaatagggggcaaagaaatctatctattgtactcagatgaagaaggacttttttatatttatgaccatcaaacctcaaccatttttacaacttctgataaggaagctattaaagatcttttaacactccaaagcattcaaaaggttgtatatgatttaaaaaatatactccataaggtggactttgatgaagctaatcagataaaaaattgtaatgatgttatgttggcttcatatgttttggacagtacacgcagttcgtacgatttggaaacattgtttatttcttatctcaacactgatatagctgcaatcaaagagaatagatgggctggtgctacagttttattaagaaatctttgggatgaactttcaaaactcattgatttaaactcggcccaatacgtttatgagagcatagagatgcctcttgttcccattttatatgaaatggagaaaatcggttttaaggttgacaaaaacactttgcaggagtatacaaaagagattgagagcaagcttttaaagttggaatcacagatttatcaaatagccggtgaatggtttaacataaactcgccaaaacaactctcatatatattattcgaaaaactgaagcttccggttgttaaaaagaccaaaacaggatattcaacagatgccgaggtattagaagagctgtatgataaacatgacataataccgcttattctggattatagaatgtatacgaaaatactgacaacttactgtcagggactggttcaggcaataaatcctgcaactggaagaattcataccaactttattcagacaggtacggcaactggaagacttgcaagtgcagagcccaatctgcaaaatattcctgtaaaatatgatgagggaaagctaataagaaaggcatttgttccagatgaaggttatgtgttgatagatgctgattattctcagattgagcttagaatacttgcacatatctctgaggatgaacgactgataaatgcttttaaaaataaccttgatattcattcacagacggcggcagagatctttggtgtggatataagtcaggttacaccaattatgcgaagccaggcaaaagcagttaactttggaattgtatatggtatatctgattatggactttcacgggatataaagatttcaagaaaagaagcagccgagtttattaatcgttattttgaaaagtatcccagagtaaaagaatatttggacaatgtcgtcaagtttgcccgtgaaaacggatttgttttgacaatatttaacaggaaaaggtatatcaaggatataaagtctactaataaaaacctgagaaactataaagagagaatagcaatgaattcacctatccagggaagtgctgcagatattatgaaaatagcaatgataagagtttataaaaagctaaaagaaaacaatttaaaatcaagaattattctgcaggtccatgacgaacttttgattgaatcaccctatgaagagaaagagatagtaaaggaaatagtaaaatcggagatggaaaatgcggttttattgaaagttcctttggtagttgaagtgaaagaaggttcaaattggtatgaaacaaagtaaaggatcc

SEQ ID NO: 1778 - DNA, 2623 bp, Artificial Sequence
  Description of Artificial Sequence: Synthetic DNA sequence of Caldicellulosiruptor TOK13B DNA Polymerase A782M
atgaaatacctgctgccgaccgctgctgctggtctgctgctcctcgctgcccagccggcgatggccatggaatttgttatttttgatgggaatagtattctgtatagagctttttttgccttgccacagcttactacctcaacaggcatacctacaaatgctatatatggttttttgaatgtgctgttaaaatacttagattctgaaaaaccggattatgtagcagtagcttttgacaaaaaaggcagagctgtccgaaaaagtgaatatgaagaatacaaggctaacagaaaaccgatgccagattctcttcaggttcagataccttacgtaagagaaatacttgctgctctgaacattcctgtactgaaatgtgaagggtatgaagctgatgacgttataggcacacttgtaaatagatttaaagcccaggatttagagattgtgataataaccggagacagagatacacttcagttacttgataaaaatgtaattgtcaaaatagtcacaacaaggtttgacaggacaactgaagatttgtatgctgtagaaaatgtaaaagaaaaatatggtgtttttgcgcatcaggttgttgactataaagcattagtaggtgatgcgtcagacaatataccaggtgttaagggaattggagataaaactgccataaagctgttagaagagtaccagactctggagaatatatatcagaatctaaataacattaaaggagcgctaaaagagaagttggaatcaggaaaagacatggcatttttatcaaaaagactggctactatcatatgcgatttaccaattgaggtgaatcttgaagaattaaaaaccaaagaatgggacaaagaaagactttatcagattttacttcaacttgagtttaaaagctttattaaaagactgggcttttcagaagagattaactatgcaaggcagaactttcagctacctgaatttagtattaaagaacttcgtgatgtttcagcaatagggggcaaagaaatctatctattgtactcagatgaagaaggacttttttatatttatgaccatcaaacctcaaccatttttacaacttctgataaggaagctattaaagatcttttaacactccaaagcattcaaaaggttgtatatgatttaaaaaatatactccataaggtggactttgatgaagctaatcagataaaaaattgtaatgatgttatgttggcttcatatgttttggacagtacacgcagttcgtacgatttggaaacattgtttatttcttatctcaacactgatatagctgcaatcaaagagaatagatgggctggtgctacagttttattaagaaatctttgggatgaactttcaaaactcattgatttaaactcggcccaatacgtttatgagagcatagagatgcctcttgttcccattttatatgaaatggagaaaatcggttttaaggttgacaaaaacactttgcaggagtatacaaaagagattgagagcaagcttttaaagttggaatcacagatttatcaaatagccggtgaatggtttaacataaactcgccaaaacaactctcatatatattattcgaaaaactgaagcttccggttgttaaaaagaccaaaacaggatattcaacagatgccgaggtattagaagagctgtatgataaacatgacataataccgcttattctggattatagaatgtatacgaaaatactgacaacttactgtcagggactggttcaggcaataaatcctgcaactggaagaattcataccaactttattcagacaggtacggcaactggaagacttgcaagtgcagagcccaatctgcaaaatattcctgtaaaatatgatgagggaaagctaataagaaaggcatttgttccagatgaaggttatgtgttgatagatgctgattattctcagattgagcttagaatacttgcacatatctctgaggatgaacgactgataaatgcttttaaaaataaccttgatattcattcacagacggcggcagagatctttggtgtggatataagtcaggttacaccaattatgcgaagccaggcaaaagcagttaactttggaattgtatatggtatatctgattatggactttcacgggatataaagatttcaagaaaagaagcagccgagtttattaatcgttattttgaaaagtatcccagagtaaaagaatatttggacaatgtcgtcaagtttgcccgtgaaaacggatttgttttgacaatatttaacaggaaaaggtatatcaaggatataaagtctactaataaaaacctgagaaactatatggagagaatagcaatgaattcacctatccagggaagtgctgcagatattatgaaaatagcaatgataagagtttataaaaagctaaaagaaaacaatttaaaatcaagaattattctgcaggtccatgacgaacttttgattgaatcaccctatgaagagaaagagatagtaaaggaaatagtaaaatcggagatggaaaatgcggttttattgaaagttcctttggtagttgaagtgaaagaaggttcaaattggtatgaaacaaagtaaaggatcc

SEQ ID NO: 1779 - DNA, 2623 bp, Artificial Sequence
  Description of Artificial Sequence: Synthetic DNA sequence of Caldicellulosiruptor TOK13B DNA Polymerase A782F
atgaaatacctgctgccgaccgctgctgctggtctgctgctcctcgctgcccagccggcgatggccatggaatttgttatttttgatgggaatagtattctgtatagagctttttttgccttgccacagcttactacctcaacaggcatacctacaaatgctatatatggttttttgaatgtgctgttaaaatacttagattctgaaaaaccggattatgtagcagtagcttttgacaaaaaaggcagagctgtccgaaaaagtgaatatgaagaatacaaggctaacagaaaaccgatgccagattctcttcaggttcagataccttacgtaagagaaatacttgctgctctgaacattcctgtactgaaatgtgaagggtatgaagctgatgacgttataggcacacttgtaaatagatttaaagcccaggatttagagattgtgataataaccggagacagagatacacttcagttacttgataaaaatgtaattgtcaaaatagtcacaacaaggtttgacaggacaactgaagatttgtatgctgtagaaaatgtaaaagaaaaatatggtgtttttgcgcatcaggttgttgactataaagcattagtaggtgatgcgtcagacaatataccaggtgttaagggaattggagataaaactgccataaagctgttagaagagtaccagactctggagaatatatatcagaatctaaataacattaaaggagcgctaaaagagaagttggaatcaggaaaagacatggcatttttatcaaaaagactggctactatcatatgcgatttaccaattgaggtgaatcttgaagaattaaaaaccaaagaatgggacaaagaaagactttatcagattttacttcaacttgagtttaaaagctttattaaaagactgggcttttcagaagagattaactatgcaaggcagaactttcagctacctgaatttagtattaaagaacttcgtgatgtttcagcaatagggggcaaagaaatctatctattgtactcagatgaagaaggacttttttatatttatgaccatcaaacctcaaccatttttacaacttctgataaggaagctattaaagatcttttaacactccaaagcattcaaaaggttgtatatgatttaaaaaatatactccataaggtggactttgatgaagctaatcagataaaaaattgtaatgatgttatgttggcttcatatgttttggacagtacacgcagttcgtacgatttggaaacattgtttatttcttatctcaacactgatatagctgcaatcaaagagaatagatgggctggtgctacagttttattaagaaatctttgggatgaactttcaaaactcattgatttaaactcggcccaatacgtttatgagagcatagagatgcctcttgttcccattttatatgaaatggagaaaatcggttttaaggttgacaaaaacactttgcaggagtatacaaaagagattgagagcaagcttttaaagttggaatcacagatttatcaaatagccggtgaatggtttaacataaactcgccaaaacaactctcatatatattattcgaaaaactgaagcttccggttgttaaaaagaccaaaacaggatattcaacagatgccgaggtattagaagagctgtatgataaacatgacataataccgcttattctggattatagaatgtatacgaaaatactgacaacttactgtcagggactggttcaggcaataaatcctgcaactggaagaattcataccaactttattcagacaggtacggcaactggaagacttgcaagtgcagagcccaatctgcaaaatattcctgtaaaatatgatgagggaaagctaataagaaaggcatttgttccagatgaaggttatgtgttgatagatgctgattattctcagattgagcttagaatacttgcacatatctctgaggatgaacgactgataaatgcttttaaaaataaccttgatattcattcacagacggcggcagagatctttggtgtggatataagtcaggttacaccaattatgcgaagccaggcaaaagcagttaactttggaattgtatatggtatatctgattatggactttcacgggatataaagatttcaagaaaagaagcagccgagtttattaatcgttattttgaaaagtatcccagagtaaaagaatatttggacaatgtcgtcaagtttgcccgtgaaaacggatttgttttgacaatatttaacaggaaaaggtatatcaaggatataaagtctactaataaaaacctgagaaactattttgagagaatagcaatgaattcacctatccagggaagtgctgcagatattatgaaaatagcaatgataagagtttataaaaagctaaaagaaaacaatttaaaatcaagaattattctgcaggtccatgacgaacttttgattgaatcaccctatgaagagaaagagatagtaaaggaaatagtaaaatcggagatggaaaatgcggttttattgaaagttcctttggtagttgaagtgaaagaaggttcaaattggtatgaaacaaagtaaaggatcc

SEQ ID NO: 1780 - DNA, 2623 bp, Artificial Sequence
  Description of Artificial Sequence: Synthetic DNA sequence of Caldicellulosiruptor TOK13B DNA Polymerase A782P
atgaaatacctgctgccgaccgctgctgctggtctgctgctcctcgctgcccagccggcgatggccatggaatttgttatttttgatgggaatagtattctgtatagagctttttttgccttgccacagcttactacctcaacaggcatacctacaaatgctatatatggttttttgaatgtgctgttaaaatacttagattctgaaaaaccggattatgtagcagtagcttttgacaaaaaaggcagagctgtccgaaaaagtgaatatgaagaatacaaggctaacagaaaaccgatgccagattctcttcaggttcagataccttacgtaagagaaatacttgctgctctgaacattcctgtactgaaatgtgaagggtatgaagctgatgacgttataggcacacttgtaaatagatttaaagcccaggatttagagattgtgataataaccggagacagagatacacttcagttacttgataaaaatgtaattgtcaaaatagtcacaacaaggtttgacaggacaactgaagatttgtatgctgtagaaaatgtaaaagaaaaatatggtgtttttgcgcatcaggttgttgactataaagcattagtaggtgatgcgtcagacaatataccaggtgttaagggaattggagataaaactgccataaagctgttagaagagtaccagactctggagaatatatatcagaatctaaataacattaaaggagcgctaaaagagaagttggaatcaggaaaagacatggcatttttatcaaaaagactggctactatcatatgcgatttaccaattgaggtgaatcttgaagaattaaaaaccaaagaatgggacaaagaaagactttatcagattttacttcaacttgagtttaaaagctttattaaaagactgggcttttcagaagagattaactatgcaaggcagaactttcagctacctgaatttagtattaaagaacttcgtgatgtttcagcaatagggggcaaagaaatctatctattgtactcagatgaagaaggacttttttatatttatgaccatcaaacctcaaccatttttacaacttctgataaggaagctattaaagatcttttaacactccaaagcattcaaaaggttgtatatgatttaaaaaatatactccataaggtggactttgatgaagctaatcagataaaaaattgtaatgatgttatgttggcttcatatgttttggacagtacacgcagttcgtacgatttggaaacattgtttatttcttatctcaacactgatatagctgcaatcaaagagaatagatgggctggtgctacagttttattaagaaatctttgggatgaactttcaaaactcattgatttaaactcggcccaatacgtttatgagagcatagagatgcctcttgttcccattttatatgaaatggagaaaatcggttttaaggttgacaaaaacactttgcaggagtatacaaaagagattgagagcaagcttttaaagttggaatcacagatttatcaaatagccggtgaatggtttaacataaactcgccaaaacaactctcatatatattattcgaaaaactgaagcttccggttgttaaaaagaccaaaacaggatattcaacagatgccgaggtattagaagagctgtatgataaacatgacataataccgcttattctggattatagaatgtatacgaaaatactgacaacttactgtcagggactggttcaggcaataaatcctgcaactggaagaattcataccaactttattcagacaggtacggcaactggaagacttgcaagtgcagagcccaatctgcaaaatattcctgtaaaatatgatgagggaaagctaataagaaaggcatttgttccagatgaaggttatgtgttgatagatgctgattattctcagattgagcttagaatacttgcacatatctctgaggatgaacgactgataaatgcttttaaaaataaccttgatattcattcacagacggcggcagagatctttggtgtggatataagtcaggttacaccaattatgcgaagccaggcaaaagcagttaactttggaattgtatatggtatatctgattatggactttcacgggatataaagatttcaagaaaagaagcagccgagtttattaatcgttattttgaaaagtatcccagagtaaaagaatatttggacaatgtcgtcaagtttgcccgtgaaaacggatttgttttgacaatatttaacaggaaaaggtatatcaaggatataaagtctactaataaaaacctgagaaactatcctgagagaatagcaatgaattcacctatccagggaagtgctgcagatattatgaaaatagcaatgataagagtttataaaaagctaaaagaaaacaatttaaaatcaagaattattctgcaggtccatgacgaacttttgattgaatcaccctatgaagagaaagagatagtaaaggaaatagtaaaatcggagatggaaaatgcggttttattgaaagttcctttggtagttgaagtgaaagaaggttcaaattggtatgaaacaaagtaaaggatcc

SEQ ID NO: 1781 - DNA, 2623 bp, Artificial Sequence
  Description of Artificial Sequence: Synthetic DNA sequence of Caldicellulosiruptor TOK13B DNA Polymerase A782S
atgaaatacctgctgccgaccgctgctgctggtctgctgctcctcgctgcccagccggcgatggccatggaatttgttatttttgatgggaatagtattctgtatagagctttttttgccttgccacagcttactacctcaacaggcatacctacaaatgctatatatggttttttgaatgtgctgttaaaatacttagattctgaaaaaccggattatgtagcagtagcttttgacaaaaaaggcagagctgtccgaaaaagtgaatatgaagaatacaaggctaacagaaaaccgatgccagattctcttcaggttcagataccttacgtaagagaaatacttgctgctctgaacattcctgtactgaaatgtgaagggtatgaagctgatgacgttataggcacacttgtaaatagatttaaagcccaggatttagagattgtgataataaccggagacagagatacacttcagttacttgataaaaatgtaattgtcaaaatagtcacaacaaggtttgacaggacaactgaagatttgtatgctgtagaaaatgtaaaagaaaaatatggtgtttttgcgcatcaggttgttgactataaagcattagtaggtgatgcgtcagacaatataccaggtgttaagggaattggagataaaactgccataaagctgttagaagagtaccagactctggagaatatatatcagaatctaaataacattaaaggagcgctaaaagagaagttggaatcaggaaaagacatggcatttttatcaaaaagactggctactatcatatgcgatttaccaattgaggtgaatcttgaagaattaaaaaccaaagaatgggacaaagaaagactttatcagattttacttcaacttgagtttaaaagctttattaaaagactgggcttttcagaagagattaactatgcaaggcagaactttcagctacctgaatttagtattaaagaacttcgtgatgtttcagcaatagggggcaaagaaatctatctattgtactcagatgaagaaggacttttttatatttatgaccatcaaacctcaaccatttttacaacttctgataaggaagctattaaagatcttttaacactccaaagcattcaaaaggttgtatatgatttaaaaaatatactccataaggtggactttgatgaagctaatcagataaaaaattgtaatgatgttatgttggcttcatatgttttggacagtacacgcagttcgtacgatttggaaacattgtttatttcttatctcaacactgatatagctgcaatcaaagagaatagatgggctggtgctacagttttattaagaaatctttgggatgaactttcaaaactcattgatttaaactcggcccaatacgtttatgagagcatagagatgcctcttgttcccattttatatgaaatggagaaaatcggttttaaggttgacaaaaacactttgcaggagtatacaaaagagattgagagcaagcttttaaagttggaatcacagatttatcaaatagccggtgaatggtttaacataaactcgccaaaacaactctcatatatattattcgaaaaactgaagcttccggttgttaaaaagaccaaaacaggatattcaacagatgccgaggtattagaagagctgtatgataaacatgacataataccgcttattctggattatagaatgtatacgaaaatactgacaacttactgtcagggactggttcaggcaataaatcctgcaactggaagaattcataccaactttattcagacaggtacggcaactggaagacttgcaagtgcagagcccaatctgcaaaatattcctgtaaaatatgatgagggaaagctaataagaaaggcatttgttccagatgaaggttatgtgttgatagatgctgattattctcagattgagcttagaatacttgcacatatctctgaggatgaacgactgataaatgcttttaaaaataaccttgatattcattcacagacggcggcagagatctttggtgtggatataagtcaggttacaccaattatgcgaagccaggcaaaagcagttaactttggaattgtatatggtatatctgattatggactttcacgggatataaagatttcaagaaaagaagcagccgagtttattaatcgttattttgaaaagtatcccagagtaaaagaatatttggacaatgtcgtcaagtttgcccgtgaaaacggatttgttttgacaatatttaacaggaaaaggtatatcaaggatataaagtctactaataaaaacctgagaaactattctgagagaatagcaatgaattcacctatccagggaagtgctgcagatattatgaaaatagcaatgataagagtttataaaaagctaaaagaaaacaatttaaaatcaagaattattctgcaggtccatgacgaacttttgattgaatcaccctatgaagagaaagagatagtaaaggaaatagtaaaatcggagatggaaaatgcggttttattgaaagttcctttggtagttgaagtgaaagaaggttcaaattggtatgaaacaaagtaaaggatcc

SEQ ID NO: 1782 - DNA, 2623 bp, Artificial Sequence
  Description of Artificial Sequence: Synthetic DNA sequence of Caldicellulosiruptor TOK13B DNA Polymerase A782T
atgaaatacctgctgccgaccgctgctgctggtctgctgctcctcgctgcccagccggcgatggccatggaatttgttatttttgatgggaatagtattctgtatagagctttttttgccttgccacagcttactacctcaacaggcatacctacaaatgctatatatggttttttgaatgtgctgttaaaatacttagattctgaaaaaccggattatgtagcagtagcttttgacaaaaaaggcagagctgtccgaaaaagtgaatatgaagaatacaaggctaacagaaaaccgatgccagattctcttcaggttcagataccttacgtaagagaaatacttgctgctctgaacattcctgtactgaaatgtgaagggtatgaagctgatgacgttataggcacacttgtaaatagatttaaagcccaggatttagagattgtgataataaccggagacagagatacacttcagttacttgataaaaatgtaattgtcaaaatagtcacaacaaggtttgacaggacaactgaagatttgtatgctgtagaaaatgtaaaagaaaaatatggtgtttttgcgcatcaggttgttgactataaagcattagtaggtgatgcgtcagacaatataccaggtgttaagggaattggagataaaactgccataaagctgttagaagagtaccagactctggagaatatatatcagaatctaaataacattaaaggagcgctaaaagagaagttggaatcaggaaaagacatggcatttttatcaaaaagactggctactatcatatgcgatttaccaattgaggtgaatcttgaagaattaaaaaccaaagaatgggacaaagaaagactttatcagattttacttcaacttgagtttaaaagctttattaaaagactgggcttttcagaagagattaactatgcaaggcagaactttcagctacctgaatttagtattaaagaacttcgtgatgtttcagcaatagggggcaaagaaatctatctattgtactcagatgaagaaggacttttttatatttatgaccatcaaacctcaaccatttttacaacttctgataaggaagctattaaagatcttttaacactccaaagcattcaaaaggttgtatatgatttaaaaaatatactccataaggtggactttgatgaagctaatcagataaaaaattgtaatgatgttatgttggcttcatatgttttggacagtacacgcagttcgtacgatttggaaacattgtttatttcttatctcaacactgatatagctgcaatcaaagagaatagatgggctggtgctacagttttattaagaaatctttgggatgaactttcaaaactcattgatttaaactcggcccaatacgtttatgagagcatagagatgcctcttgttcccattttatatgaaatggagaaaatcggttttaaggttgacaaaaacactttgcaggagtatacaaaagagattgagagcaagcttttaaagttggaatcacagatttatcaaatagccggtgaatggtttaacataaactcgccaaaacaactctcatatatattattcgaaaaactgaagcttccggttgttaaaaagaccaaaacaggatattcaacagatgccgaggtattagaagagctgtatgataaacatgacataataccgcttattctggattatagaatgtatacgaaaatactgacaacttactgtcagggactggttcaggcaataaatcctgcaactggaagaattcataccaactttattcagacaggtacggcaactggaagacttgcaagtgcagagcccaatctgcaaaatattcctgtaaaatatgatgagggaaagctaataagaaaggcatttgttccagatgaaggttatgtgttgatagatgctgattattctcagattgagcttagaatacttgcacatatctctgaggatgaacgactgataaatgcttttaaaaataaccttgatattcattcacagacggcggcagagatctttggtgtggatataagtcaggttacaccaattatgcgaagccaggcaaaagcagttaactttggaattgtatatggtatatctgattatggactttcacgggatataaagatttcaagaaaagaagcagccgagtttattaatcgttattttgaaaagtatcccagagtaaaagaatatttggacaatgtcgtcaagtttgcccgtgaaaacggatttgttttgacaatatttaacaggaaaaggtatatcaaggatataaagtctactaataaaaacctgagaaactatactgagagaatagcaatgaattcacctatccagggaagtgctgcagatattatgaaaatagcaatgataagagtttataaaaagctaaaagaaaacaatttaaaatcaagaattattctgcaggtccatgacgaacttttgattgaatcaccctatgaagagaaagagatagtaaaggaaatagtaaaatcggagatggaaaatgcggttttattgaaagttcctttggtagttgaagtgaaagaaggttcaaattggtatgaaacaaagtaaaggatcc

SEQ ID NO: 1783 - DNA, 2623 bp, Artificial Sequence
  Description of Artificial Sequence: Synthetic DNA sequence of Caldicellulosiruptor TOK13B DNA Polymerase A782W
atgaaatacctgctgccgaccgctgctgctggtctgctgctcctcgctgcccagccggcgatggccatggaatttgttatttttgatgggaatagtattctgtatagagctttttttgccttgccacagcttactacctcaacaggcatacctacaaatgctatatatggttttttgaatgtgctgttaaaatacttagattctgaaaaaccggattatgtagcagtagcttttgacaaaaaaggcagagctgtccgaaaaagtgaatatgaagaatacaaggctaacagaaaaccgatgccagattctcttcaggttcagataccttacgtaagagaaatacttgctgctctgaacattcctgtactgaaatgtgaagggtatgaagctgatgacgttataggcacacttgtaaatagatttaaagcccaggatttagagattgtgataataaccggagacagagatacacttcagttacttgataaaaatgtaattgtcaaaatagtcacaacaaggtttgacaggacaactgaagatttgtatgctgtagaaaatgtaaaagaaaaatatggtgtttttgcgcatcaggttgttgactataaagcattagtaggtgatgcgtcagacaatataccaggtgttaagggaattggagataaaactgccataaagctgttagaagagtaccagactctggagaatatatatcagaatctaaataacattaaaggagcgctaaaagagaagttggaatcaggaaaagacatggcatttttatcaaaaagactggctactatcatatgcgatttaccaattgaggtgaatcttgaagaattaaaaaccaaagaatgggacaaagaaagactttatcagattttacttcaacttgagtttaaaagctttattaaaagactgggcttttcagaagagattaactatgcaaggcagaactttcagctacctgaatttagtattaaagaacttcgtgatgtttcagcaatagggggcaaagaaatctatctattgtactcagatgaagaaggacttttttatatttatgaccatcaaacctcaaccatttttacaacttctgataaggaagctattaaagatcttttaacactccaaagcattcaaaaggttgtatatgatttaaaaaatatactccataaggtggactttgatgaagctaatcagataaaaaattgtaatgatgttatgttggcttcatatgttttggacagtacacgcagttcgtacgatttggaaacattgtttatttcttatctcaacactgatatagctgcaatcaaagagaatagatgggctggtgctacagttttattaagaaatctttgggatgaactttcaaaactcattgatttaaactcggcccaatacgtttatgagagcatagagatgcctcttgttcccattttatatgaaatggagaaaatcggttttaaggttgacaaaaacactttgcaggagtatacaaaagagattgagagcaagcttttaaagttggaatcacagatttatcaaatagccggtgaatggtttaacataaactcgccaaaacaactctcatatatattattcgaaaaactgaagcttccggttgttaaaaagaccaaaacaggatattcaacagatgccgaggtattagaagagctgtatgataaacatgacataataccgcttattctggattatagaatgtatacgaaaatactgacaacttactgtcagggactggttcaggcaataaatcctgcaactggaagaattcataccaactttattcagacaggtacggcaactggaagacttgcaagtgcagagcccaatctgcaaaatattcctgtaaaatatgatgagggaaagctaataagaaaggcatttgttccagatgaaggttatgtgttgatagatgctgattattctcagattgagcttagaatacttgcacatatctctgaggatgaacgactgataaatgcttttaaaaataaccttgatattcattcacagacggcggcagagatctttggtgtggatataagtcaggttacaccaattatgcgaagccaggcaaaagcagttaactttggaattgtatatggtatatctgattatggactttcacgggatataaagatttcaagaaaagaagcagccgagtttattaatcgttattttgaaaagtatcccagagtaaaagaatatttggacaatgtcgtcaagtttgcccgtgaaaacggatttgttttgacaatatttaacaggaaaaggtatatcaaggatataaagtctactaataaaaacctgagaaactattgggagagaatagcaatgaattcacctatccagggaagtgctgcagatattatgaaaatagcaatgataagagtttataaaaagctaaaagaaaacaatttaaaatcaagaattattctgcaggtccatgacgaacttttgattgaatcaccctatgaagagaaagagatagtaaaggaaatagtaaaatcggagatggaaaatgcggttttattgaaagttcctttggtagttgaagtgaaagaaggttcaaattggtatgaaacaaagtaaaggatcc

SEQ ID NO: 1784 - DNA, 2623 bp, Artificial Sequence
  Description of Artificial Sequence: Synthetic DNA sequence of Caldicellulosiruptor TOK13B DNA Polymerase A782Y
atgaaatacctgctgccgaccgctgctgctggtctgctgctcctcgctgcccagccggcgatggccatggaatttgttatttttgatgggaatagtattctgtatagagctttttttgccttgccacagcttactacctcaacaggcatacctacaaatgctatatatggttttttgaatgtgctgttaaaatacttagattctgaaaaaccggattatgtagcagtagcttttgacaaaaaaggcagagctgtccgaaaaagtgaatatgaagaatacaaggctaacagaaaaccgatgccagattctcttcaggttcagataccttacgtaagagaaatacttgctgctctgaacattcctgtactgaaatgtgaagggtatgaagctgatgacgttataggcacacttgtaaatagatttaaagcccaggatttagagattgtgataataaccggagacagagatacacttcagttacttgataaaaatgtaattgtcaaaatagtcacaacaaggtttgacaggacaactgaagatttgtatgctgtagaaaatgtaaaagaaaaatatggtgtttttgcgcatcaggttgttgactataaagcattagtaggtgatgcgtcagacaatataccaggtgttaagggaattggagataaaactgccataaagctgttagaagagtaccagactctggagaatatatatcagaatctaaataacattaaaggagcgctaaaagagaagttggaatcaggaaaagacatggcatttttatcaaaaagactggctactatcatatgcgatttaccaattgaggtgaatcttgaagaattaaaaaccaaagaatgggacaaagaaagactttatcagattttacttcaacttgagtttaaaagctttattaaaagactgggcttttcagaagagattaactatgcaaggcagaactttcagctacctgaatttagtattaaagaacttcgtgatgtttcagcaatagggggcaaagaaatctatctattgtactcagatgaagaaggacttttttatatttatgaccatcaaacctcaaccatttttacaacttctgataaggaagctattaaagatcttttaacactccaaagcattcaaaaggttgtatatgatttaaaaaatatactccataaggtggactttgatgaagctaatcagataaaaaattgtaatgatgttatgttggcttcatatgttttggacagtacacgcagttcgtacgatttggaaacattgtttatttcttatctcaacactgatatagctgcaatcaaagagaatagatgggctggtgctacagttttattaagaaatctttgggatgaactttcaaaactcattgatttaaactcggcccaatacgtttatgagagcatagagatgcctcttgttcccattttatatgaaatggagaaaatcggttttaaggttgacaaaaacactttgcaggagtatacaaaagagattgagagcaagcttttaaagttggaatcacagatttatcaaatagccggtgaatggtttaacataaactcgccaaaacaactctcatatatattattcgaaaaactgaagcttccggttgttaaaaagaccaaaacaggatattcaacagatgccgaggtattagaagagctgtatgataaacatgacataataccgcttattctggattatagaatgtatacgaaaatactgacaacttactgtcagggactggttcaggcaataaatcctgcaactggaagaattcataccaactttattcagacaggtacggcaactggaagacttgcaagtgcagagcccaatctgcaaaatattcctgtaaaatatgatgagggaaagctaataagaaaggcatttgttccagatgaaggttatgtgttgatagatgctgattattctcagattgagcttagaatacttgcacatatctctgaggatgaacgactgataaatgcttttaaaaataaccttgatattcattcacagacggcggcagagatctttggtgtggatataagtcaggttacaccaattatgcgaagccaggcaaaagcagttaactttggaattgtatatggtatatctgattatggactttcacgggatataaagatttcaagaaaagaagcagccgagtttattaatcgttattttgaaaagtatcccagagtaaaagaatatttggacaatgtcgtcaagtttgcccgtgaaaacggatttgttttgacaatatttaacaggaaaaggtatatcaaggatataaagtctactaataaaaacctgagaaactattatgagagaatagcaatgaattcacctatccagggaagtgctgcagatattatgaaaatagcaatgataagagtttataaaaagctaaaagaaaacaatttaaaatcaagaattattctgcaggtccatgacgaacttttgattgaatcaccctatgaagagaaagagatagtaaaggaaatagtaaaatcggagatggaaaatgcggttttattgaaagttcctttggtagttgaagtgaaagaaggttcaaattggtatgaaacaaagtaaaggatcc

SEQ ID NO: 1785 - DNA, 2623 bp, Artificial Sequence
  Description of Artificial Sequence: Synthetic DNA sequence of Caldicellulosiruptor TOK13B DNA Polymerase A782V
atgaaatacctgctgccgaccgctgctgctggtctgctgctcctcgctgcccagccggcgatggccatggaatttgttatttttgatgggaatagtattctgtatagagctttttttgccttgccacagcttactacctcaacaggcatacctacaaatgctatatatggttttttgaatgtgctgttaaaatacttagattctgaaaaaccggattatgtagcagtagcttttgacaaaaaaggcagagctgtccgaaaaagtgaatatgaagaatacaaggctaacagaaaaccgatgccagattctcttcaggttcagataccttacgtaagagaaatacttgctgctctgaacattcctgtactgaaatgtgaagggtatgaagctgatgacgttataggcacacttgtaaatagatttaaagcccaggatttagagattgtgataataaccggagacagagatacacttcagttacttgataaaaatgtaattgtcaaaatagtcacaacaaggtttgacaggacaactgaagatttgtatgctgtagaaaatgtaaaagaaaaatatggtgtttttgcgcatcaggttgttgactataaagcattagtaggtgatgcgtcagacaatataccaggtgttaagggaattggagataaaactgccataaagctgttagaagagtaccagactctggagaatatatatcagaatctaaataacattaaaggagcgctaaaagagaagttggaatcaggaaaagacatggcatttttatcaaaaagactggctactatcatatgcgatttaccaattgaggtgaatcttgaagaattaaaaaccaaagaatgggacaaagaaagactttatcagattttacttcaacttgagtttaaaagctttattaaaagactgggcttttcagaagagattaactatgcaaggcagaactttcagctacctgaatttagtattaaagaacttcgtgatgtttcagcaatagggggcaaagaaatctatctattgtactcagatgaagaaggacttttttatatttatgaccatcaaacctcaaccatttttacaacttctgataaggaagctattaaagatcttttaacactccaaagcattcaaaaggttgtatatgatttaaaaaatatactccataaggtggactttgatgaagctaatcagataaaaaattgtaatgatgttatgttggcttcatatgttttggacagtacacgcagttcgtacgatttggaaacattgtttatttcttatctcaacactgatatagctgcaatcaaagagaatagatgggctggtgctacagttttattaagaaatctttgggatgaactttcaaaactcattgatttaaactcggcccaatacgtttatgagagcatagagatgcctcttgttcccattttatatgaaatggagaaaatcggttttaaggttgacaaaaacactttgcaggagtatacaaaagagattgagagcaagcttttaaagttggaatcacagatttatcaaatagccggtgaatggtttaacataaactcgccaaaacaactctcatatatattattcgaaaaactgaagcttccggttgttaaaaagaccaaaacaggatattcaacagatgccgaggtattagaagagctgtatgataaacatgacataataccgcttattctggattatagaatgtatacgaaaatactgacaacttactgtcagggactggttcaggcaataaatcctgcaactggaagaattcataccaactttattcagacaggtacggcaactggaagacttgcaagtgcagagcccaatctgcaaaatattcctgtaaaatatgatgagggaaagctaataagaaaggcatttgttccagatgaaggttatgtgttgatagatgctgattattctcagattgagcttagaatacttgcacatatctctgaggatgaacgactgataaatgcttttaaaaataaccttgatattcattcacagacggcggcagagatctttggtgtggatataagtcaggttacaccaattatgcgaagccaggcaaaagcagttaactttggaattgtatatggtatatctgattatggactttcacgggatataaagatttcaagaaaagaagcagccgagtttattaatcgttattttgaaaagtatcccagagtaaaagaatatttggacaatgtcgtcaagtttgcccgtgaaaacggatttgttttgacaatatttaacaggaaaaggtatatcaaggatataaagtctactaataaaaacctgagaaactatgttgagagaatagcaatgaattcacctatccagggaagtgctgcagatattatgaaaatagcaatgataagagtttataaaaagctaaaagaaaacaatttaaaatcaagaattattctgcaggtccatgacgaacttttgattgaatcaccctatgaagagaaagagatagtaaaggaaatagtaaaatcggagatggaaaatgcggttttattgaaagttcctttggtagttgaagtgaaagaaggttcaaattggtatgaaacaaagtaaaggatcc

SEQ ID NO: 1786 - DNA, 2623 bp, Artificial Sequence
  Description of Artificial Sequence: Synthetic DNA sequence of Caldicellulosiruptor TOK13B DNA Polymerase E783A
atgaaatacctgctgccgaccgctgctgctggtctgctgctcctcgctgcccagccggcgatggccatggaatttgttatttttgatgggaatagtattctgtatagagctttttttgccttgccacagcttactacctcaacaggcatacctacaaatgctatatatggttttttgaatgtgctgttaaaatacttagattctgaaaaaccggattatgtagcagtagcttttgacaaaaaaggcagagctgtccgaaaaagtgaatatgaagaatacaaggctaacagaaaaccgatgccagattctcttcaggttcagataccttacgtaagagaaatacttgctgctctgaacattcctgtactgaaatgtgaagggtatgaagctgatgacgttataggcacacttgtaaatagatttaaagcccaggatttagagattgtgataataaccggagacagagatacacttcagttacttgataaaaatgtaattgtcaaaatagtcacaacaaggtttgacaggacaactgaagatttgtatgctgtagaaaatgtaaaagaaaaatatggtgtttttgcgcatcaggttgttgactataaagcattagtaggtgatgcgtcagacaatataccaggtgttaagggaattggagataaaactgccataaagctgttagaagagtaccagactctggagaatatatatcagaatctaaataacattaaaggagcgctaaaagagaagttggaatcaggaaaagacatggcatttttatcaaaaagactggctactatcatatgcgatttaccaattgaggtgaatcttgaagaattaaaaaccaaagaatgggacaaagaaagactttatcagattttacttcaacttgagtttaaaagctttattaaaagactgggcttttcagaagagattaactatgcaaggcagaactttcagctacctgaatttagtattaaagaacttcgtgatgtttcagcaatagggggcaaagaaatctatctattgtactcagatgaagaaggacttttttatatttatgaccatcaaacctcaaccatttttacaacttctgataaggaagctattaaagatcttttaacactccaaagcattcaaaaggttgtatatgatttaaaaaatatactccataaggtggactttgatgaagctaatcagataaaaaattgtaatgatgttatgttggcttcatatgttttggacagtacacgcagttcgtacgatttggaaacattgtttatttcttatctcaacactgatatagctgcaatcaaagagaatagatgggctggtgctacagttttattaagaaatctttgggatgaactttcaaaactcattgatttaaactcggcccaatacgtttatgagagcatagagatgcctcttgttcccattttatatgaaatggagaaaatcggttttaaggttgacaaaaacactttgcaggagtatacaaaagagattgagagcaagcttttaaagttggaatcacagatttatcaaatagccggtgaatggtttaacataaactcgccaaaacaactctcatatatattattcgaaaaactgaagcttccggttgttaaaaagaccaaaacaggatattcaacagatgccgaggtattagaagagctgtatgataaacatgacataataccgcttattctggattatagaatgtatacgaaaatactgacaacttactgtcagggactggttcaggcaataaatcctgcaactggaagaattcataccaactttattcagacaggtacggcaactggaagacttgcaagtgcagagcccaatctgcaaaatattcctgtaaaatatgatgagggaaagctaataagaaaggcatttgttccagatgaaggttatgtgttgatagatgctgattattctcagattgagcttagaatacttgcacatatctctgaggatgaacgactgataaatgcttttaaaaataaccttgatattcattcacagacggcggcagagatctttggtgtggatataagtcaggttacaccaattatgcgaagccaggcaaaagcagttaactttggaattgtatatggtatatctgattatggactttcacgggatataaagatttcaagaaaagaagcagccgagtttattaatcgttattttgaaaagtatcccagagtaaaagaatatttggacaatgtcgtcaagtttgcccgtgaaaacggatttgttttgacaatatttaacaggaaaaggtatatcaaggatataaagtctactaataaaaacctgagaaactatgcagctagaatagcaatgaattcacctatccagggaagtgctgcagatattatgaaaatagcaatgataagagtttataaaaagctaaaagaaaacaatttaaaatcaagaattattctgcaggtccatgacgaacttttgattgaatcaccctatgaagagaaagagatagtaaaggaaatagtaaaatcggagatggaaaatgcggttttattgaaagttcctttggtagttgaagtgaaagaaggttcaaattggtatgaaacaaagtaaaggatcc

SEQ ID NO: 1787 - DNA, 2623 bp, Artificial Sequence
  Description of Artificial Sequence: Synthetic DNA sequence of Caldicellulosiruptor TOK13B DNA Polymerase E783R
atgaaatacctgctgccgaccgctgctgctggtctgctgctcctcgctgcccagccggcgatggccatggaatttgttatttttgatgggaatagtattctgtatagagctttttttgccttgccacagcttactacctcaacaggcatacctacaaatgctatatatggttttttgaatgtgctgttaaaatacttagattctgaaaaaccggattatgtagcagtagcttttgacaaaaaaggcagagctgtccgaaaaagtgaatatgaagaatacaaggctaacagaaaaccgatgccagattctcttcaggttcagataccttacgtaagagaaatacttgctgctctgaacattcctgtactgaaatgtgaagggtatgaagctgatgacgttataggcacacttgtaaatagatttaaagcccaggatttagagattgtgataataaccggagacagagatacacttcagttacttgataaaaatgtaattgtcaaaatagtcacaacaaggtttgacaggacaactgaagatttgtatgctgtagaaaatgtaaaagaaaaatatggtgtttttgcgcatcaggttgttgactataaagcattagtaggtgatgcgtcagacaatataccaggtgttaagggaattggagataaaactgccataaagctgttagaagagtaccagactctggagaatatatatcagaatctaaataacattaaaggagcgctaaaagagaagttggaatcaggaaaagacatggcatttttatcaaaaagactggctactatcatatgcgatttaccaattgaggtgaatcttgaagaattaaaaaccaaagaatgggacaaagaaagactttatcagattttacttcaacttgagtttaaaagctttattaaaagactgggcttttcagaagagattaactatgcaaggcagaactttcagctacctgaatttagtattaaagaacttcgtgatgtttcagcaatagggggcaaagaaatctatctattgtactcagatgaagaaggacttttttatatttatgaccatcaaacctcaaccatttttacaacttctgataaggaagctattaaagatcttttaacactccaaagcattcaaaaggttgtatatgatttaaaaaatatactccataaggtggactttgatgaagctaatcagataaaaaattgtaatgatgttatgttggcttcatatgttttggacagtacacgcagttcgtacgatttggaaacattgtttatttcttatctcaacactgatatagctgcaatcaaagagaatagatgggctggtgctacagttttattaagaaatctttgggatgaactttcaaaactcattgatttaaactcggcccaatacgtttatgagagcatagagatgcctcttgttcccattttatatgaaatggagaaaatcggttttaaggttgacaaaaacactttgcaggagtatacaaaagagattgagagcaagcttttaaagttggaatcacagatttatcaaatagccggtgaatggtttaacataaactcgccaaaacaactctcatatatattattcgaaaaactgaagcttccggttgttaaaaagaccaaaacaggatattcaacagatgccgaggtattagaagagctgtatgataaacatgacataataccgcttattctggattatagaatgtatacgaaaatactgacaacttactgtcagggactggttcaggcaataaatcctgcaactggaagaattcataccaactttattcagacaggtacggcaactggaagacttgcaagtgcagagcccaatctgcaaaatattcctgtaaaatatgatgagggaaagctaataagaaaggcatttgttccagatgaaggttatgtgttgatagatgctgattattctcagattgagcttagaatacttgcacatatctctgaggatgaacgactgataaatgcttttaaaaataaccttgatattcattcacagacggcggcagagatctttggtgtggatataagtcaggttacaccaattatgcgaagccaggcaaaagcagttaactttggaattgtatatggtatatctgattatggactttcacgggatataaagatttcaagaaaagaagcagccgagtttattaatcgttattttgaaaagtatcccagagtaaaagaatatttggacaatgtcgtcaagtttgcccgtgaaaacggatttgttttgacaatatttaacaggaaaaggtatatcaaggatataaagtctactaataaaaacctgagaaactatgcacgtagaatagcaatgaattcacctatccagggaagtgctgcagatattatgaaaatagcaatgataagagtttataaaaagctaaaagaaaacaatttaaaatcaagaattattctgcaggtccatgacgaacttttgattgaatcaccctatgaagagaaagagatagtaaaggaaatagtaaaatcggagatggaaaatgcggttttattgaaagttcctttggtagttgaagtgaaagaaggttcaaattggtatgaaacaaagtaaaggatcc

SEQ ID NO: 1788 - DNA, 2623 bp, Artificial Sequence
  Description of Artificial Sequence: Synthetic DNA sequence of Caldicellulosiruptor TOK13B DNA Polymerase E783N
atgaaatacctgctgccgaccgctgctgctggtctgctgctcctcgctgcccagccggcgatggccatggaatttgttatttttgatgggaatagtattctgtatagagctttttttgccttgccacagcttactacctcaacaggcatacctacaaatgctatatatggttttttgaatgtgctgttaaaatacttagattctgaaaaaccggattatgtagcagtagcttttgacaaaaaaggcagagctgtccgaaaaagtgaatatgaagaatacaaggctaacagaaaaccgatgccagattctcttcaggttcagataccttacgtaagagaaatacttgctgctctgaacattcctgtactgaaatgtgaagggtatgaagctgatgacgttataggcacacttgtaaatagatttaaagcccaggatttagagattgtgataataaccggagacagagatacacttcagttacttgataaaaatgtaattgtcaaaatagtcacaacaaggtttgacaggacaactgaagatttgtatgctgtagaaaatgtaaaagaaaaatatggtgtttttgcgcatcaggttgttgactataaagcattagtaggtgatgcgtcagacaatataccaggtgttaagggaattggagataaaactgccataaagctgttagaagagtaccagactctggagaatatatatcagaatctaaataacattaaaggagcgctaaaagagaagttggaatcaggaaaagacatggcatttttatcaaaaagactggctactatcatatgcgatttaccaattgaggtgaatcttgaagaattaaaaaccaaagaatgggacaaagaaagactttatcagattttacttcaacttgagtttaaaagctttattaaaagactgggcttttcagaagagattaactatgcaaggcagaactttcagctacctgaatttagtattaaagaacttcgtgatgtttcagcaatagggggcaaagaaatctatctattgtactcagatgaagaaggacttttttatatttatgaccatcaaacctcaaccatttttacaacttctgataaggaagctattaaagatcttttaacactccaaagcattcaaaaggttgtatatgatttaaaaaatatactccataaggtggactttgatgaagctaatcagataaaaaattgtaatgatgttatgttggcttcatatgttttggacagtacacgcagttcgtacgatttggaaacattgtttatttcttatctcaacactgatatagctgcaatcaaagagaatagatgggctggtgctacagttttattaagaaatctttgggatgaactttcaaaactcattgatttaaactcggcccaatacgtttatgagagcatagagatgcctcttgttcccattttatatgaaatggagaaaatcggttttaaggttgacaaaaacactttgcaggagtatacaaaagagattgagagcaagcttttaaagttggaatcacagatttatcaaatagccggtgaatggtttaacataaactcgccaaaacaactctcatatatattattcgaaaaactgaagcttccggttgttaaaaagaccaaaacaggatattcaacagatgccgaggtattagaagagctgtatgataaacatgacataataccgcttattctggattatagaatgtatacgaaaatactgacaacttactgtcagggactggttcaggcaataaatcctgcaactggaagaattcataccaactttattcagacaggtacggcaactggaagacttgcaagtgcagagcccaatctgcaaaatattcctgtaaaatatgatgagggaaagctaataagaaaggcatttgttccagatgaaggttatgtgttgatagatgctgattattctcagattgagcttagaatacttgcacatatctctgaggatgaacgactgataaatgcttttaaaaataaccttgatattcattcacagacggcggcagagatctttggtgtggatataagtcaggttacaccaattatgcgaagccaggcaaaagcagttaactttggaattgtatatggtatatctgattatggactttcacgggatataaagatttcaagaaaagaagcagccgagtttattaatcgttattttgaaaagtatcccagagtaaaagaatatttggacaatgtcgtcaagtttgcccgtgaaaacggatttgttttgacaatatttaacaggaaaaggtatatcaaggatataaagtctactaataaaaacctgagaaactatgcaaatagaatagcaatgaattcacctatccagggaagtgctgcagatattatgaaaatagcaatgataagagtttataaaaagctaaaagaaaacaatttaaaatcaagaattattctgcaggtccatgacgaacttttgattgaatcaccctatgaagagaaagagatagtaaaggaaatagtaaaatcggagatggaaaatgcggttttattgaaagttcctttggtagttgaagtgaaagaaggttcaaattggtatgaaacaaagtaaaggatcc

SEQ ID NO: 1789 - DNA, 2623 bp, Artificial Sequence
  Description of Artificial Sequence: Synthetic DNA sequence of Caldicellulosiruptor TOK13B DNA Polymerase E783D
atgaaatacctgctgccgaccgctgctgctggtctgctgctcctcgctgcccagccggcgatggccatggaatttgttatttttgatgggaatagtattctgtatagagctttttttgccttgccacagcttactacctcaacaggcatacctacaaatgctatatatggttttttgaatgtgctgttaaaatacttagattctgaaaaaccggattatgtagcagtagcttttgacaaaaaaggcagagctgtccgaaaaagtgaatatgaagaatacaaggctaacagaaaaccgatgccagattctcttcaggttcagataccttacgtaagagaaatacttgctgctctgaacattcctgtactgaaatgtgaagggtatgaagctgatgacgttataggcacacttgtaaatagatttaaagcccaggatttagagattgtgataataaccggagacagagatacacttcagttacttgataaaaatgtaattgtcaaaatagtcacaacaaggtttgacaggacaactgaagatttgtatgctgtagaaaatgtaaaagaaaaatatggtgtttttgcgcatcaggttgttgactataaagcattagtaggtgatgcgtcagacaatataccaggtgttaagggaattggagataaaactgccataaagctgttagaagagtaccagactctggagaatatatatcagaatctaaataacattaaaggagcgctaaaagagaagttggaatcaggaaaagacatggcatttttatcaaaaagactggctactatcatatgcgatttaccaattgaggtgaatcttgaagaattaaaaaccaaagaatgggacaaagaaagactttatcagattttacttcaacttgagtttaaaagctttattaaaagactgggcttttcagaagagattaactatgcaaggcagaactttcagctacctgaatttagtattaaagaacttcgtgatgtttcagcaatagggggcaaagaaatctatctattgtactcagatgaagaaggacttttttatatttatgaccatcaaacctcaaccatttttacaacttctgataaggaagctattaaagatcttttaacactccaaagcattcaaaaggttgtatatgatttaaaaaatatactccataaggtggactttgatgaagctaatcagataaaaaattgtaatgatgttatgttggcttcatatgttttggacagtacacgcagttcgtacgatttggaaacattgtttatttcttatctcaacactgatatagctgcaatcaaagagaatagatgggctggtgctacagttttattaagaaatctttgggatgaactttcaaaactcattgatttaaactcggcccaatacgtttatgagagcatagagatgcctcttgttcccattttatatgaaatggagaaaatcggttttaaggttgacaaaaacactttgcaggagtatacaaaagagattgagagcaagcttttaaagttggaatcacagatttatcaaatagccggtgaatggtttaacataaactcgccaaaacaactctcatatatattattcgaaaaactgaagcttccggttgttaaaaagaccaaaacaggatattcaacagatgccgaggtattagaagagctgtatgataaacatgacataataccgcttattctggattatagaatgtatacgaaaatactgacaacttactgtcagggactggttcaggcaataaatcctgcaactggaagaattcataccaactttattcagacaggtacggcaactggaagacttgcaagtgcagagcccaatctgcaaaatattcctgtaaaatatgatgagggaaagctaataagaaaggcatttgttccagatgaaggttatgtgttgatagatgctgattattctcagattgagcttagaatacttgcacatatctctgaggatgaacgactgataaatgcttttaaaaataaccttgatattcattcacagacggcggcagagatctttggtgtggatataagtcaggttacaccaattatgcgaagccaggcaaaagcagttaactttggaattgtatatggtatatctgattatggactttcacgggatataaagatttcaagaaaagaagcagccgagtttattaatcgttattttgaaaagtatcccagagtaaaagaatatttggacaatgtcgtcaagtttgcccgtgaaaacggatttgttttgacaatatttaacaggaaaaggtatatcaaggatataaagtctactaataaaaacctgagaaactatgcagatagaatagcaatgaattcacctatccagggaagtgctgcagatattatgaaaatagcaatgataagagtttataaaaagctaaaagaaaacaatttaaaatcaagaattattctgcaggtccatgacgaacttttgattgaatcaccctatgaagagaaagagatagtaaaggaaatagtaaaatcggagatggaaaatgcggttttattgaaagttcctttggtagttgaagtgaaagaaggttcaaattggtatgaaacaaagtaaaggatcc

SEQ ID NO: 1790 - DNA, 2623 bp, Artificial Sequence
  Description of Artificial Sequence: Synthetic DNA sequence of Caldicellulosiruptor TOK13B DNA Polymerase E783C
atgaaatacctgctgccgaccgctgctgctggtctgctgctcctcgctgcccagccggcgatggccatggaatttgttatttttgatgggaatagtattctgtatagagctttttttgccttgccacagcttactacctcaacaggcatacctacaaatgctatatatggttttttgaatgtgctgttaaaatacttagattctgaaaaaccggattatgtagcagtagcttttgacaaaaaaggcagagctgtccgaaaaagtgaatatgaagaatacaaggctaacagaaaaccgatgccagattctcttcaggttcagataccttacgtaagagaaatacttgctgctctgaacattcctgtactgaaatgtgaagggtatgaagctgatgacgttataggcacacttgtaaatagatttaaagcccaggatttagagattgtgataataaccggagacagagatacacttcagttacttgataaaaatgtaattgtcaaaatagtcacaacaaggtttgacaggacaactgaagatttgtatgctgtagaaaatgtaaaagaaaaatatggtgtttttgcgcatcaggttgttgactataaagcattagtaggtgatgcgtcagacaatataccaggtgttaagggaattggagataaaactgccataaagctgttagaagagtaccagactctggagaatatatatcagaatctaaataacattaaaggagcgctaaaagagaagttggaatcaggaaaagacatggcatttttatcaaaaagactggctactatcatatgcgatttaccaattgaggtgaatcttgaagaattaaaaaccaaagaatgggacaaagaaagactttatcagattttacttcaacttgagtttaaaagctttattaaaagactgggcttttcagaagagattaactatgcaaggcagaactttcagctacctgaatttagtattaaagaacttcgtgatgtttcagcaatagggggcaaagaaatctatctattgtactcagatgaagaaggacttttttatatttatgaccatcaaacctcaaccatttttacaacttctgataaggaagctattaaagatcttttaacactccaaagcattcaaaaggttgtatatgatttaaaaaatatactccataaggtggactttgatgaagctaatcagataaaaaattgtaatgatgttatgttggcttcatatgttttggacagtacacgcagttcgtacgatttggaaacattgtttatttcttatctcaacactgatatagctgcaatcaaagagaatagatgggctggtgctacagttttattaagaaatctttgggatgaactttcaaaactcattgatttaaactcggcccaatacgtttatgagagcatagagatgcctcttgttcccattttatatgaaatggagaaaatcggttttaaggttgacaaaaacactttgcaggagtatacaaaagagattgagagcaagcttttaaagttggaatcacagatttatcaaatagccggtgaatggtttaacataaactcgccaaaacaactctcatatatattattcgaaaaactgaagcttccggttgttaaaaagaccaaaacaggatattcaacagatgccgaggtattagaagagctgtatgataaacatgacataataccgcttattctggattatagaatgtatacgaaaatactgacaacttactgtcagggactggttcaggcaataaatcctgcaactggaagaattcataccaactttattcagacaggtacggcaactggaagacttgcaagtgcagagcccaatctgcaaaatattcctgtaaaatatgatgagggaaagctaataagaaaggcatttgttccagatgaaggttatgtgttgatagatgctgattattctcagattgagcttagaatacttgcacatatctctgaggatgaacgactgataaatgcttttaaaaataaccttgatattcattcacagacggcggcagagatctttggtgtggatataagtcaggttacaccaattatgcgaagccaggcaaaagcagttaactttggaattgtatatggtatatctgattatggactttcacgggatataaagatttcaagaaaagaagcagccgagtttattaatcgttattttgaaaagtatcccagagtaaaagaatatttggacaatgtcgtcaagtttgcccgtgaaaacggatttgttttgacaatatttaacaggaaaaggtatatcaaggatataaagtctactaataaaaacctgagaaactatgcatgtagaatagcaatgaattcacctatccagggaagtgctgcagatattatgaaaatagcaatgataagagtttataaaaagctaaaagaaaacaatttaaaatcaagaattattctgcaggtccatgacgaacttttgattgaatcaccctatgaagagaaagagatagtaaaggaaatagtaaaatcggagatggaaaatgcggttttattgaaagttcctttggtagttgaagtgaaagaaggttcaaattggtatgaaacaaagtaaaggatcc

SEQ ID NO: 1791 - DNA, 2623 bp, Artificial Sequence
  Description of Artificial Sequence: Synthetic DNA sequence of Caldicellulosiruptor TOK13B DNA Polymerase E783Q
atgaaatacctgctgccgaccgctgctgctggtctgctgctcctcgctgcccagccggcgatggccatggaatttgttatttttgatgggaatagtattctgtatagagctttttttgccttgccacagcttactacctcaacaggcatacctacaaatgctatatatggttttttgaatgtgctgttaaaatacttagattctgaaaaaccggattatgtagcagtagcttttgacaaaaaaggcagagctgtccgaaaaagtgaatatgaagaatacaaggctaacagaaaaccgatgccagattctcttcaggttcagataccttacgtaagagaaatacttgctgctctgaacattcctgtactgaaatgtgaagggtatgaagctgatgacgttataggcacacttgtaaatagatttaaagcccaggatttagagattgtgataataaccggagacagagatacacttcagttacttgataaaaatgtaattgtcaaaatagtcacaacaaggtttgacaggacaactgaagatttgtatgctgtagaaaatgtaaaagaaaaatatggtgtttttgcgcatcaggttgttgactataaagcattagtaggtgatgcgtcagacaatataccaggtgttaagggaattggagataaaactgccataaagctgttagaagagtaccagactctggagaatatatatcagaatctaaataacattaaaggagcgctaaaagagaagttggaatcaggaaaagacatggcatttttatcaaaaagactggctactatcatatgcgatttaccaattgaggtgaatcttgaagaattaaaaaccaaagaatgggacaaagaaagactttatcagattttacttcaacttgagtttaaaagctttattaaaagactgggcttttcagaagagattaactatgcaaggcagaactttcagctacctgaatttagtattaaagaacttcgtgatgtttcagcaatagggggcaaagaaatctatctattgtactcagatgaagaaggacttttttatatttatgaccatcaaacctcaaccatttttacaacttctgataaggaagctattaaagatcttttaacactccaaagcattcaaaaggttgtatatgatttaaaaaatatactccataaggtggactttgatgaagctaatcagataaaaaattgtaatgatgttatgttggcttcatatgttttggacagtacacgcagttcgtacgatttggaaacattgtttatttcttatctcaacactgatatagctgcaatcaaagagaatagatgggctggtgctacagttttattaagaaatctttgggatgaactttcaaaactcattgatttaaactcggcccaatacgtttatgagagcatagagatgcctcttgttcccattttatatgaaatggagaaaatcggttttaaggttgacaaaaacactttgcaggagtatacaaaagagattgagagcaagcttttaaagttggaatcacagatttatcaaatagccggtgaatggtttaacataaactcgccaaaacaactctcatatatattattcgaaaaactgaagcttccggttgttaaaaagaccaaaacaggatattcaacagatgccgaggtattagaagagctgtatgataaacatgacataataccgcttattctggattatagaatgtatacgaaaatactgacaacttactgtcagggactggttcaggcaataaatcctgcaactggaagaattcataccaactttattcagacaggtacggcaactggaagacttgcaagtgcagagcccaatctgcaaaatattcctgtaaaatatgatgagggaaagctaataagaaaggcatttgttccagatgaaggttatgtgttgatagatgctgattattctcagattgagcttagaatacttgcacatatctctgaggatgaacgactgataaatgcttttaaaaataaccttgatattcattcacagacggcggcagagatctttggtgtggatataagtcaggttacaccaattatgcgaagccaggcaaaagcagttaactttggaattgtatatggtatatctgattatggactttcacgggatataaagatttcaagaaaagaagcagccgagtttattaatcgttattttgaaaagtatcccagagtaaaagaatatttggacaatgtcgtcaagtttgcccgtgaaaacggatttgttttgacaatatttaacaggaaaaggtatatcaaggatataaagtctactaataaaaacctgagaaactatgcacaaagaatagcaatgaattcacctatccagggaagtgctgcagatattatgaaaatagcaatgataagagtttataaaaagctaaaagaaaacaatttaaaatcaagaattattctgcaggtccatgacgaacttttgattgaatcaccctatgaagagaaagagatagtaaaggaaatagtaaaatcggagatggaaaatgcggttttattgaaagttcctttggtagttgaagtgaaagaaggttcaaattggtatgaaacaaagtaaaggatcc

SEQ ID NO: 1792 - DNA, 2623 bp, Artificial Sequence
  Description of Artificial Sequence: Synthetic DNA sequence of Caldicellulosiruptor TOK13B DNA Polymerase E783G
atgaaatacctgctgccgaccgctgctgctggtctgctgctcctcgctgcccagccggcgatggccatggaatttgttatttttgatgggaatagtattctgtatagagctttttttgccttgccacagcttactacctcaacaggcatacctacaaatgctatatatggttttttgaatgtgctgttaaaatacttagattctgaaaaaccggattatgtagcagtagcttttgacaaaaaaggcagagctgtccgaaaaagtgaatatgaagaatacaaggctaacagaaaaccgatgccagattctcttcaggttcagataccttacgtaagagaaatacttgctgctctgaacattcctgtactgaaatgtgaagggtatgaagctgatgacgttataggcacacttgtaaatagatttaaagcccaggatttagagattgtgataataaccggagacagagatacacttcagttacttgataaaaatgtaattgtcaaaatagtcacaacaaggtttgacaggacaactgaagatttgtatgctgtagaaaatgtaaaagaaaaatatggtgtttttgcgcatcaggttgttgactataaagcattagtaggtgatgcgtcagacaatataccaggtgttaagggaattggagataaaactgccataaagctgttagaagagtaccagactctggagaatatatatcagaatctaaataacattaaaggagcgctaaaagagaagttggaatcaggaaaagacatggcatttttatcaaaaagactggctactatcatatgcgatttaccaattgaggtgaatcttgaagaattaaaaaccaaagaatgggacaaagaaagactttatcagattttacttcaacttgagtttaaaagctttattaaaagactgggcttttcagaagagattaactatgcaaggcagaactttcagctacctgaatttagtattaaagaacttcgtgatgtttcagcaatagggggcaaagaaatctatctattgtactcagatgaagaaggacttttttatatttatgaccatcaaacctcaaccatttttacaacttctgataaggaagctattaaagatcttttaacactccaaagcattcaaaaggttgtatatgatttaaaaaatatactccataaggtggactttgatgaagctaatcagataaaaaattgtaatgatgttatgttggcttcatatgttttggacagtacacgcagttcgtacgatttggaaacattgtttatttcttatctcaacactgatatagctgcaatcaaagagaatagatgggctggtgctacagttttattaagaaatctttgggatgaactttcaaaactcattgatttaaactcggcccaatacgtttatgagagcatagagatgcctcttgttcccattttatatgaaatggagaaaatcggttttaaggttgacaaaaacactttgcaggagtatacaaaagagattgagagcaagcttttaaagttggaatcacagatttatcaaatagccggtgaatggtttaacataaactcgccaaaacaactctcatatatattattcgaaaaactgaagcttccggttgttaaaaagaccaaaacaggatattcaacagatgccgaggtattagaagagctgtatgataaacatgacataataccgcttattctggattatagaatgtatacgaaaatactgacaacttactgtcagggactggttcaggcaataaatcctgcaactggaagaattcataccaactttattcagacaggtacggcaactggaagacttgcaagtgcagagcccaatctgcaaaatattcctgtaaaatatgatgagggaaagctaataagaaaggcatttgttccagatgaaggttatgtgttgatagatgctgattattctcagattgagcttagaatacttgcacatatctctgaggatgaacgactgataaatgcttttaaaaataaccttgatattcattcacagacggcggcagagatctttggtgtggatataagtcaggttacaccaattatgcgaagccaggcaaaagcagttaactttggaattgtatatggtatatctgattatggactttcacgggatataaagatttcaagaaaagaagcagccgagtttattaatcgttattttgaaaagtatcccagagtaaaagaatatttggacaatgtcgtcaagtttgcccgtgaaaacggatttgttttgacaatatttaacaggaaaaggtatatcaaggatataaagtctactaataaaaacctgagaaactatgcaggtagaatagcaatgaattcacctatccagggaagtgctgcagatattatgaaaatagcaatgataagagtttataaaaagctaaaagaaaacaatttaaaatcaagaattattctgcaggtccatgacgaacttttgattgaatcaccctatgaagagaaagagatagtaaaggaaatagtaaaatcggagatggaaaatgcggttttattgaaagttcctttggtagttgaagtgaaagaaggttcaaattggtatgaaacaaagtaaaggatcc

SEQ ID NO: 1793 - DNA, 2623 bp, Artificial Sequence
  Description of Artificial Sequence: Synthetic DNA sequence of Caldicellulosiruptor TOK13B DNA Polymerase E783H
atgaaatacctgctgccgaccgctgctgctggtctgctgctcctcgctgcccagccggcgatggccatggaatttgttatttttgatgggaatagtattctgtatagagctttttttgccttgccacagcttactacctcaacaggcatacctacaaatgctatatatggttttttgaatgtgctgttaaaatacttagattctgaaaaaccggattatgtagcagtagcttttgacaaaaaaggcagagctgtccgaaaaagtgaatatgaagaatacaaggctaacagaaaaccgatgccagattctcttcaggttcagataccttacgtaagagaaatacttgctgctctgaacattcctgtactgaaatgtgaagggtatgaagctgatgacgttataggcacacttgtaaatagatttaaagcccaggatttagagattgtgataataaccggagacagagatacacttcagttacttgataaaaatgtaattgtcaaaatagtcacaacaaggtttgacaggacaactgaagatttgtatgctgtagaaaatgtaaaagaaaaatatggtgtttttgcgcatcaggttgttgactataaagcattagtaggtgatgcgtcagacaatataccaggtgttaagggaattggagataaaactgccataaagctgttagaagagtaccagactctggagaatatatatcagaatctaaataacattaaaggagcgctaaaagagaagttggaatcaggaaaagacatggcatttttatcaaaaagactggctactatcatatgcgatttaccaattgaggtgaatcttgaagaattaaaaaccaaagaatgggacaaagaaagactttatcagattttacttcaacttgagtttaaaagctttattaaaagactgggcttttcagaagagattaactatgcaaggcagaactttcagctacctgaatttagtattaaagaacttcgtgatgtttcagcaatagggggcaaagaaatctatctattgtactcagatgaagaaggacttttttatatttatgaccatcaaacctcaaccatttttacaacttctgataaggaagctattaaagatcttttaacactccaaagcattcaaaaggttgtatatgatttaaaaaatatactccataaggtggactttgatgaagctaatcagataaaaaattgtaatgatgttatgttggcttcatatgttttggacagtacacgcagttcgtacgatttggaaacattgtttatttcttatctcaacactgatatagctgcaatcaaagagaatagatgggctggtgctacagttttattaagaaatctttgggatgaactttcaaaactcattgatttaaactcggcccaatacgtttatgagagcatagagatgcctcttgttcccattttatatgaaatggagaaaatcggttttaaggttgacaaaaacactttgcaggagtatacaaaagagattgagagcaagcttttaaagttggaatcacagatttatcaaatagccggtgaatggtttaacataaactcgccaaaacaactctcatatatattattcgaaaaactgaagcttccggttgttaaaaagaccaaaacaggatattcaacagatgccgaggtattagaagagctgtatgataaacatgacataataccgcttattctggattatagaatgtatacgaaaatactgacaacttactgtcagggactggttcaggcaataaatcctgcaactggaagaattcataccaactttattcagacaggtacggcaactggaagacttgcaagtgcagagcccaatctgcaaaatattcctgtaaaatatgatgagggaaagctaataagaaaggcatttgttccagatgaaggttatgtgttgatagatgctgattattctcagattgagcttagaatacttgcacatatctctgaggatgaacgactgataaatgcttttaaaaataaccttgatattcattcacagacggcggcagagatctttggtgtggatataagtcaggttacaccaattatgcgaagccaggcaaaagcagttaactttggaattgtatatggtatatctgattatggactttcacgggatataaagatttcaagaaaagaagcagccgagtttattaatcgttattttgaaaagtatcccagagtaaaagaatatttggacaatgtcgtcaagtttgcccgtgaaaacggatttgttttgacaatatttaacaggaaaaggtatatcaaggatataaagtctactaataaaaacctgagaaactatgcacatagaatagcaatgaattcacctatccagggaagtgctgcagatattatgaaaatagcaatgataagagtttataaaaagctaaaagaaaacaatttaaaatcaagaattattctgcaggtccatgacgaacttttgattgaatcaccctatgaagagaaagagatagtaaaggaaatagtaaaatcggagatggaaaatgcggttttattgaaagttcctttggtagttgaagtgaaagaaggttcaaattggtatgaaacaaagtaaaggatcc

SEQ ID NO: 1794 - DNA, 2623 bp, Artificial Sequence
  Description of Artificial Sequence: Synthetic DNA sequence of Caldicellulosiruptor TOK13B DNA Polymerase E783I
atgaaatacctgctgccgaccgctgctgctggtctgctgctcctcgctgcccagccggcgatggccatggaatttgttatttttgatgggaatagtattctgtatagagctttttttgccttgccacagcttactacctcaacaggcatacctacaaatgctatatatggttttttgaatgtgctgttaaaatacttagattctgaaaaaccggattatgtagcagtagcttttgacaaaaaaggcagagctgtccgaaaaagtgaatatgaagaatacaaggctaacagaaaaccgatgccagattctcttcaggttcagataccttacgtaagagaaatacttgctgctctgaacattcctgtactgaaatgtgaagggtatgaagctgatgacgttataggcacacttgtaaatagatttaaagcccaggatttagagattgtgataataaccggagacagagatacacttcagttacttgataaaaatgtaattgtcaaaatagtcacaacaaggtttgacaggacaactgaagatttgtatgctgtagaaaatgtaaaagaaaaatatggtgtttttgcgcatcaggttgttgactataaagcattagtaggtgatgcgtcagacaatataccaggtgttaagggaattggagataaaactgccataaagctgttagaagagtaccagactctggagaatatatatcagaatctaaataacattaaaggagcgctaaaagagaagttggaatcaggaaaagacatggcatttttatcaaaaagactggctactatcatatgcgatttaccaattgaggtgaatcttgaagaattaaaaaccaaagaatgggacaaagaaagactttatcagattttacttcaacttgagtttaaaagctttattaaaagactgggcttttcagaagagattaactatgcaaggcagaactttcagctacctgaatttagtattaaagaacttcgtgatgtttcagcaatagggggcaaagaaatctatctattgtactcagatgaagaaggacttttttatatttatgaccatcaaacctcaaccatttttacaacttctgataaggaagctattaaagatcttttaacactccaaagcattcaaaaggttgtatatgatttaaaaaatatactccataaggtggactttgatgaagctaatcagataaaaaattgtaatgatgttatgttggcttcatatgttttggacagtacacgcagttcgtacgatttggaaacattgtttatttcttatctcaacactgatatagctgcaatcaaagagaatagatgggctggtgctacagttttattaagaaatctttgggatgaactttcaaaactcattgatttaaactcggcccaatacgtttatgagagcatagagatgcctcttgttcccattttatatgaaatggagaaaatcggttttaaggttgacaaaaacactttgcaggagtatacaaaagagattgagagcaagcttttaaagttggaatcacagatttatcaaatagccggtgaatggtttaacataaactcgccaaaacaactctcatatatattattcgaaaaactgaagcttccggttgttaaaaagaccaaaacaggatattcaacagatgccgaggtattagaagagctgtatgataaacatgacataataccgcttattctggattatagaatgtatacgaaaatactgacaacttactgtcagggactggttcaggcaataaatcctgcaactggaagaattcataccaactttattcagacaggtacggcaactggaagacttgcaagtgcagagcccaatctgcaaaatattcctgtaaaatatgatgagggaaagctaataagaaaggcatttgttccagatgaaggttatgtgttgatagatgctgattattctcagattgagcttagaatacttgcacatatctctgaggatgaacgactgataaatgcttttaaaaataaccttgatattcattcacagacggcggcagagatctttggtgtggatataagtcaggttacaccaattatgcgaagccaggcaaaagcagttaactttggaattgtatatggtatatctgattatggactttcacgggatataaagatttcaagaaaagaagcagccgagtttattaatcgttattttgaaaagtatcccagagtaaaagaatatttggacaatgtcgtcaagtttgcccgtgaaaacggatttgttttgacaatatttaacaggaaaaggtatatcaaggatataaagtctactaataaaaacctgagaaactatgcaattagaatagcaatgaattcacctatccagggaagtgctgcagatattatgaaaatagcaatgataagagtttataaaaagctaaaagaaaacaatttaaaatcaagaattattctgcaggtccatgacgaacttttgattgaatcaccctatgaagagaaagagatagtaaaggaaatagtaaaatcggagatggaaaatgcggttttattgaaagttcctttggtagttgaagtgaaagaaggttcaaattggtatgaaacaaagtaaaggatcc

SEQ ID NO: 1795 - DNA, 2623 bp, Artificial Sequence
  Description of Artificial Sequence: Synthetic DNA sequence of Caldicellulosiruptor TOK13B DNA Polymerase E783L
atgaaatacctgctgccgaccgctgctgctggtctgctgctcctcgctgcccagccggcgatggccatggaatttgttatttttgatgggaatagtattctgtatagagctttttttgccttgccacagcttactacctcaacaggcatacctacaaatgctatatatggttttttgaatgtgctgttaaaatacttagattctgaaaaaccggattatgtagcagtagcttttgacaaaaaaggcagagctgtccgaaaaagtgaatatgaagaatacaaggctaacagaaaaccgatgccagattctcttcaggttcagataccttacgtaagagaaatacttgctgctctgaacattcctgtactgaaatgtgaagggtatgaagctgatgacgttataggcacacttgtaaatagatttaaagcccaggatttagagattgtgataataaccggagacagagatacacttcagttacttgataaaaatgtaattgtcaaaatagtcacaacaaggtttgacaggacaactgaagatttgtatgctgtagaaaatgtaaaagaaaaatatggtgtttttgcgcatcaggttgttgactataaagcattagtaggtgatgcgtcagacaatataccaggtgttaagggaattggagataaaactgccataaagctgttagaagagtaccagactctggagaatatatatcagaatctaaataacattaaaggagcgctaaaagagaagttggaatcaggaaaagacatggcatttttatcaaaaagactggctactatcatatgcgatttaccaattgaggtgaatcttgaagaattaaaaaccaaagaatgggacaaagaaagactttatcagattttacttcaacttgagtttaaaagctttattaaaagactgggcttttcagaagagattaactatgcaaggcagaactttcagctacctgaatttagtattaaagaacttcgtgatgtttcagcaatagggggcaaagaaatctatctattgtactcagatgaagaaggacttttttatatttatgaccatcaaacctcaaccatttttacaacttctgataaggaagctattaaagatcttttaacactccaaagcattcaaaaggttgtatatgatttaaaaaatatactccataaggtggactttgatgaagctaatcagataaaaaattgtaatgatgttatgttggcttcatatgttttggacagtacacgcagttcgtacgatttggaaacattgtttatttcttatctcaacactgatatagctgcaatcaaagagaatagatgggctggtgctacagttttattaagaaatctttgggatgaactttcaaaactcattgatttaaactcggcccaatacgtttatgagagcatagagatgcctcttgttcccattttatatgaaatggagaaaatcggttttaaggttgacaaaaacactttgcaggagtatacaaaagagattgagagcaagcttttaaagttggaatcacagatttatcaaatagccggtgaatggtttaacataaactcgccaaaacaactctcatatatattattcgaaaaactgaagcttccggttgttaaaaagaccaaaacaggatattcaacagatgccgaggtattagaagagctgtatgataaacatgacataataccgcttattctggattatagaatgtatacgaaaatactgacaacttactgtcagggactggttcaggcaataaatcctgcaactggaagaattcataccaactttattcagacaggtacggcaactggaagacttgcaagtgcagagcccaatctgcaaaatattcctgtaaaatatgatgagggaaagctaataagaaaggcatttgttccagatgaaggttatgtgttgatagatgctgattattctcagattgagcttagaatacttgcacatatctctgaggatgaacgactgataaatgcttttaaaaataaccttgatattcattcacagacggcggcagagatctttggtgtggatataagtcaggttacaccaattatgcgaagccaggcaaaagcagttaactttggaattgtatatggtatatctgattatggactttcacgggatataaagatttcaagaaaagaagcagccgagtttattaatcgttattttgaaaagtatcccagagtaaaagaatatttggacaatgtcgtcaagtttgcccgtgaaaacggatttgttttgacaatatttaacaggaaaaggtatatcaaggatataaagtctactaataaaaacctgagaaactatgcacttagaatagcaatgaattcacctatccagggaagtgctgcagatattatgaaaatagcaatgataagagtttataaaaagctaaaagaaaacaatttaaaatcaagaattattctgcaggtccatgacgaacttttgattgaatcaccctatgaagagaaagagatagtaaaggaaatagtaaaatcggagatggaaaatgcggttttattgaaagttcctttggtagttgaagtgaaagaaggttcaaattggtatgaaacaaagtaaaggatcc

SEQ ID NO: 1796 - DNA, 2623 bp, Artificial Sequence
  Description of Artificial Sequence: Synthetic DNA sequence of Caldicellulosiruptor TOK13B DNA Polymerase E783K
atgaaatacctgctgccgaccgctgctgctggtctgctgctcctcgctgcccagccggcgatggccatggaatttgttatttttgatgggaatagtattctgtatagagctttttttgccttgccacagcttactacctcaacaggcatacctacaaatgctatatatggttttttgaatgtgctgttaaaatacttagattctgaaaaaccggattatgtagcagtagcttttgacaaaaaaggcagagctgtccgaaaaagtgaatatgaagaatacaaggctaacagaaaaccgatgccagattctcttcaggttcagataccttacgtaagagaaatacttgctgctctgaacattcctgtactgaaatgtgaagggtatgaagctgatgacgttataggcacacttgtaaatagatttaaagcccaggatttagagattgtgataataaccggagacagagatacacttcagttacttgataaaaatgtaattgtcaaaatagtcacaacaaggtttgacaggacaactgaagatttgtatgctgtagaaaatgtaaaagaaaaatatggtgtttttgcgcatcaggttgttgactataaagcattagtaggtgatgcgtcagacaatataccaggtgttaagggaattggagataaaactgccataaagctgttagaagagtaccagactctggagaatatatatcagaatctaaataacattaaaggagcgctaaaagagaagttggaatcaggaaaagacatggcatttttatcaaaaagactggctactatcatatgcgatttaccaattgaggtgaatcttgaagaattaaaaaccaaagaatgggacaaagaaagactttatcagattttacttcaacttgagtttaaaagctttattaaaagactgggcttttcagaagagattaactatgcaaggcagaactttcagctacctgaatttagtattaaagaacttcgtgatgtttcagcaatagggggcaaagaaatctatctattgtactcagatgaagaaggacttttttatatttatgaccatcaaacctcaaccatttttacaacttctgataaggaagctattaaagatcttttaacactccaaagcattcaaaaggttgtatatgatttaaaaaatatactccataaggtggactttgatgaagctaatcagataaaaaattgtaatgatgttatgttggcttcatatgttttggacagtacacgcagttcgtacgatttggaaacattgtttatttcttatctcaacactgatatagctgcaatcaaagagaatagatgggctggtgctacagttttattaagaaatctttgggatgaactttcaaaactcattgatttaaactcggcccaatacgtttatgagagcatagagatgcctcttgttcccattttatatgaaatggagaaaatcggttttaaggttgacaaaaacactttgcaggagtatacaaaagagattgagagcaagcttttaaagttggaatcacagatttatcaaatagccggtgaatggtttaacataaactcgccaaaacaactctcatatatattattcgaaaaactgaagcttccggttgttaaaaagaccaaaacaggatattcaacagatgccgaggtattagaagagctgtatgataaacatgacataataccgcttattctggattatagaatgtatacgaaaatactgacaacttactgtcagggactggttcaggcaataaatcctgcaactggaagaattcataccaactttattcagacaggtacggcaactggaagacttgcaagtgcagagcccaatctgcaaaatattcctgtaaaatatgatgagggaaagctaataagaaaggcatttgttccagatgaaggttatgtgttgatagatgctgattattctcagattgagcttagaatacttgcacatatctctgaggatgaacgactgataaatgcttttaaaaataaccttgatattcattcacagacggcggcagagatctttggtgtggatataagtcaggttacaccaattatgcgaagccaggcaaaagcagttaactttggaattgtatatggtatatctgattatggactttcacgggatataaagatttcaagaaaagaagcagccgagtttattaatcgttattttgaaaagtatcccagagtaaaagaatatttggacaatgtcgtcaagtttgcccgtgaaaacggatttgttttgacaatatttaacaggaaaaggtatatcaaggatataaagtctactaataaaaacctgagaaactatgcaaaaagaatagcaatgaattcacctatccagggaagtgctgcagatattatgaaaatagcaatgataagagtttataaaaagctaaaagaaaacaatttaaaatcaagaattattctgcaggtccatgacgaacttttgattgaatcaccctatgaagagaaagagatagtaaaggaaatagtaaaatcggagatggaaaatgcggttttattgaaagttcctttggtagttgaagtgaaagaaggttcaaattggtatgaaacaaagtaaaggatcc

SEQ ID NO: 1797 - DNA, 2623 bp, Artificial Sequence
  Description of Artificial Sequence: Synthetic DNA sequence of Caldicellulosiruptor TOK13B DNA Polymerase E783M
atgaaatacctgctgccgaccgctgctgctggtctgctgctcctcgctgcccagccggcgatggccatggaatttgttatttttgatgggaatagtattctgtatagagctttttttgccttgccacagcttactacctcaacaggcatacctacaaatgctatatatggttttttgaatgtgctgttaaaatacttagattctgaaaaaccggattatgtagcagtagcttttgacaaaaaaggcagagctgtccgaaaaagtgaatatgaagaatacaaggctaacagaaaaccgatgccagattctcttcaggttcagataccttacgtaagagaaatacttgctgctctgaacattcctgtactgaaatgtgaagggtatgaagctgatgacgttataggcacacttgtaaatagatttaaagcccaggatttagagattgtgataataaccggagacagagatacacttcagttacttgataaaaatgtaattgtcaaaatagtcacaacaaggtttgacaggacaactgaagatttgtatgctgtagaaaatgtaaaagaaaaatatggtgtttttgcgcatcaggttgttgactataaagcattagtaggtgatgcgtcagacaatataccaggtgttaagggaattggagataaaactgccataaagctgttagaagagtaccagactctggagaatatatatcagaatctaaataacattaaaggagcgctaaaagagaagttggaatcaggaaaagacatggcatttttatcaaaaagactggctactatcatatgcgatttaccaattgaggtgaatcttgaagaattaaaaaccaaagaatgggacaaagaaagactttatcagattttacttcaacttgagtttaaaagctttattaaaagactgggcttttcagaagagattaactatgcaaggcagaactttcagctacctgaatttagtattaaagaacttcgtgatgtttcagcaatagggggcaaagaaatctatctattgtactcagatgaagaaggacttttttatatttatgaccatcaaacctcaaccatttttacaacttctgataaggaagctattaaagatcttttaacactccaaagcattcaaaaggttgtatatgatttaaaaaatatactccataaggtggactttgatgaagctaatcagataaaaaattgtaatgatgttatgttggcttcatatgttttggacagtacacgcagttcgtacgatttggaaacattgtttatttcttatctcaacactgatatagctgcaatcaaagagaatagatgggctggtgctacagttttattaagaaatctttgggatgaactttcaaaactcattgatttaaactcggcccaatacgtttatgagagcatagagatgcctcttgttcccattttatatgaaatggagaaaatcggttttaaggttgacaaaaacactttgcaggagtatacaaaagagattgagagcaagcttttaaagttggaatcacagatttatcaaatagccggtgaatggtttaacataaactcgccaaaacaactctcatatatattattcgaaaaactgaagcttccggttgttaaaaagaccaaaacaggatattcaacagatgccgaggtattagaagagctgtatgataaacatgacataataccgcttattctggattatagaatgtatacgaaaatactgacaacttactgtcagggactggttcaggcaataaatcctgcaactggaagaattcataccaactttattcagacaggtacggcaactggaagacttgcaagtgcagagcccaatctgcaaaatattcctgtaaaatatgatgagggaaagctaataagaaaggcatttgttccagatgaaggttatgtgttgatagatgctgattattctcagattgagcttagaatacttgcacatatctctgaggatgaacgactgataaatgcttttaaaaataaccttgatattcattcacagacggcggcagagatctttggtgtggatataagtcaggttacaccaattatgcgaagccaggcaaaagcagttaactttggaattgtatatggtatatctgattatggactttcacgggatataaagatttcaagaaaagaagcagccgagtttattaatcgttattttgaaaagtatcccagagtaaaagaatatttggacaatgtcgtcaagtttgcccgtgaaaacggatttgttttgacaatatttaacaggaaaaggtatatcaaggatataaagtctactaataaaaacctgagaaactatgcaatgagaatagcaatgaattcacctatccagggaagtgctgcagatattatgaaaatagcaatgataagagtttataaaaagctaaaagaaaacaatttaaaatcaagaattattctgcaggtccatgacgaacttttgattgaatcaccctatgaagagaaagagatagtaaaggaaatagtaaaatcggagatggaaaatgcggttttattgaaagttcctttggtagttgaagtgaaagaaggttcaaattggtatgaaacaaagtaaaggatcc

SEQ ID NO: 1798 - DNA, 2623 bp, Artificial Sequence
  Description of Artificial Sequence: Synthetic DNA sequence of Caldicellulosiruptor TOK13B DNA Polymerase E783F
atgaaatacctgctgccgaccgctgctgctggtctgctgctcctcgctgcccagccggcgatggccatggaatttgttatttttgatgggaatagtattctgtatagagctttttttgccttgccacagcttactacctcaacaggcatacctacaaatgctatatatggttttttgaatgtgctgttaaaatacttagattctgaaaaaccggattatgtagcagtagcttttgacaaaaaaggcagagctgtccgaaaaagtgaatatgaagaatacaaggctaacagaaaaccgatgccagattctcttcaggttcagataccttacgtaagagaaatacttgctgctctgaacattcctgtactgaaatgtgaagggtatgaagctgatgacgttataggcacacttgtaaatagatttaaagcccaggatttagagattgtgataataaccggagacagagatacacttcagttacttgataaaaatgtaattgtcaaaatagtcacaacaaggtttgacaggacaactgaagatttgtatgctgtagaaaatgtaaaagaaaaatatggtgtttttgcgcatcaggttgttgactataaagcattagtaggtgatgcgtcagacaatataccaggtgttaagggaattggagataaaactgccataaagctgttagaagagtaccagactctggagaatatatatcagaatctaaataacattaaaggagcgctaaaagagaagttggaatcaggaaaagacatggcatttttatcaaaaagactggctactatcatatgcgatttaccaattgaggtgaatcttgaagaattaaaaaccaaagaatgggacaaagaaagactttatcagattttacttcaacttgagtttaaaagctttattaaaagactgggcttttcagaagagattaactatgcaaggcagaactttcagctacctgaatttagtattaaagaacttcgtgatgtttcagcaatagggggcaaagaaatctatctattgtactcagatgaagaaggacttttttatatttatgaccatcaaacctcaaccatttttacaacttctgataaggaagctattaaagatcttttaacactccaaagcattcaaaaggttgtatatgatttaaaaaatatactccataaggtggactttgatgaagctaatcagataaaaaattgtaatgatgttatgttggcttcatatgttttggacagtacacgcagttcgtacgatttggaaacattgtttatttcttatctcaacactgatatagctgcaatcaaagagaatagatgggctggtgctacagttttattaagaaatctttgggatgaactttcaaaactcattgatttaaactcggcccaatacgtttatgagagcatagagatgcctcttgttcccattttatatgaaatggagaaaatcggttttaaggttgacaaaaacactttgcaggagtatacaaaagagattgagagcaagcttttaaagttggaatcacagatttatcaaatagccggtgaatggtttaacataaactcgccaaaacaactctcatatatattattcgaaaaactgaagcttccggttgttaaaaagaccaaaacaggatattcaacagatgccgaggtattagaagagctgtatgataaacatgacataataccgcttattctggattatagaatgtatacgaaaatactgacaacttactgtcagggactggttcaggcaataaatcctgcaactggaagaattcataccaactttattcagacaggtacggcaactggaagacttgcaagtgcagagcccaatctgcaaaatattcctgtaaaatatgatgagggaaagctaataagaaaggcatttgttccagatgaaggttatgtgttgatagatgctgattattctcagattgagcttagaatacttgcacatatctctgaggatgaacgactgataaatgcttttaaaaataaccttgatattcattcacagacggcggcagagatctttggtgtggatataagtcaggttacaccaattatgcgaagccaggcaaaagcagttaactttggaattgtatatggtatatctgattatggactttcacgggatataaagatttcaagaaaagaagcagccgagtttattaatcgttattttgaaaagtatcccagagtaaaagaatatttggacaatgtcgtcaagtttgcccgtgaaaacggatttgttttgacaatatttaacaggaaaaggtatatcaaggatataaagtctactaataaaaacctgagaaactatgcatttagaatagcaatgaattcacctatccagggaagtgctgcagatattatgaaaatagcaatgataagagtttataaaaagctaaaagaaaacaatttaaaatcaagaattattctgcaggtccatgacgaacttttgattgaatcaccctatgaagagaaagagatagtaaaggaaatagtaaaatcggagatggaaaatgcggttttattgaaagttcctttggtagttgaagtgaaagaaggttcaaattggtatgaaacaaagtaaaggatcc

SEQ ID NO: 1799 - DNA, 2623 bp, Artificial Sequence
  Description of Artificial Sequence: Synthetic DNA sequence of Caldicellulosiruptor TOK13B DNA Polymerase E783P
atgaaatacctgctgccgaccgctgctgctggtctgctgctcctcgctgcccagccggcgatggccatggaatttgttatttttgatgggaatagtattctgtatagagctttttttgccttgccacagcttactacctcaacaggcatacctacaaatgctatatatggttttttgaatgtgctgttaaaatacttagattctgaaaaaccggattatgtagcagtagcttttgacaaaaaaggcagagctgtccgaaaaagtgaatatgaagaatacaaggctaacagaaaaccgatgccagattctcttcaggttcagataccttacgtaagagaaatacttgctgctctgaacattcctgtactgaaatgtgaagggtatgaagctgatgacgttataggcacacttgtaaatagatttaaagcccaggatttagagattgtgataataaccggagacagagatacacttcagttacttgataaaaatgtaattgtcaaaatagtcacaacaaggtttgacaggacaactgaagatttgtatgctgtagaaaatgtaaaagaaaaatatggtgtttttgcgcatcaggttgttgactataaagcattagtaggtgatgcgtcagacaatataccaggtgttaagggaattggagataaaactgccataaagctgttagaagagtaccagactctggagaatatatatcagaatctaaataacattaaaggagcgctaaaagagaagttggaatcaggaaaagacatggcatttttatcaaaaagactggctactatcatatgcgatttaccaattgaggtgaatcttgaagaattaaaaaccaaagaatgggacaaagaaagactttatcagattttacttcaacttgagtttaaaagctttattaaaagactgggcttttcagaagagattaactatgcaaggcagaactttcagctacctgaatttagtattaaagaacttcgtgatgtttcagcaatagggggcaaagaaatctatctattgtactcagatgaagaaggacttttttatatttatgaccatcaaacctcaaccatttttacaacttctgataaggaagctattaaagatcttttaacactccaaagcattcaaaaggttgtatatgatttaaaaaatatactccataaggtggactttgatgaagctaatcagataaaaaattgtaatgatgttatgttggcttcatatgttttggacagtacacgcagttcgtacgatttggaaacattgtttatttcttatctcaacactgatatagctgcaatcaaagagaatagatgggctggtgctacagttttattaagaaatctttgggatgaactttcaaaactcattgatttaaactcggcccaatacgtttatgagagcatagagatgcctcttgttcccattttatatgaaatggagaaaatcggttttaaggttgacaaaaacactttgcaggagtatacaaaagagattgagagcaagcttttaaagttggaatcacagatttatcaaatagccggtgaatggtttaacataaactcgccaaaacaactctcatatatattattcgaaaaactgaagcttccggttgttaaaaagaccaaaacaggatattcaacagatgccgaggtattagaagagctgtatgataaacatgacataataccgcttattctggattatagaatgtatacgaaaatactgacaacttactgtcagggactggttcaggcaataaatcctgcaactggaagaattcataccaactttattcagacaggtacggcaactggaagacttgcaagtgcagagcccaatctgcaaaatattcctgtaaaatatgatgagggaaagctaataagaaaggcatttgttccagatgaaggttatgtgttgatagatgctgattattctcagattgagcttagaatacttgcacatatctctgaggatgaacgactgataaatgcttttaaaaataaccttgatattcattcacagacggcggcagagatctttggtgtggatataagtcaggttacaccaattatgcgaagccaggcaaaagcagttaactttggaattgtatatggtatatctgattatggactttcacgggatataaagatttcaagaaaagaagcagccgagtttattaatcgttattttgaaaagtatcccagagtaaaagaatatttggacaatgtcgtcaagtttgcccgtgaaaacggatttgttttgacaatatttaacaggaaaaggtatatcaaggatataaagtctactaataaaaacctgagaaactatgcacctagaatagcaatgaattcacctatccagggaagtgctgcagatattatgaaaatagcaatgataagagtttataaaaagctaaaagaaaacaatttaaaatcaagaattattctgcaggtccatgacgaacttttgattgaatcaccctatgaagagaaagagatagtaaaggaaatagtaaaatcggagatggaaaatgcggttttattgaaagttcctttggtagttgaagtgaaagaaggttcaaattggtatgaaacaaagtaaaggatcc

SEQ ID NO: 1800 - DNA, 2623 bp, Artificial Sequence
  Description of Artificial Sequence: Synthetic DNA sequence of Caldicellulosiruptor TOK13B DNA Polymerase E783S
atgaaatacctgctgccgaccgctgctgctggtctgctgctcctcgctgcccagccggcgatggccatggaatttgttatttttgatgggaatagtattctgtatagagctttttttgccttgccacagcttactacctcaacaggcatacctacaaatgctatatatggttttttgaatgtgctgttaaaatacttagattctgaaaaaccggattatgtagcagtagcttttgacaaaaaaggcagagctgtccgaaaaagtgaatatgaagaatacaaggctaacagaaaaccgatgccagattctcttcaggttcagataccttacgtaagagaaatacttgctgctctgaacattcctgtactgaaatgtgaagggtatgaagctgatgacgttataggcacacttgtaaatagatttaaagcccaggatttagagattgtgataataaccggagacagagatacacttcagttacttgataaaaatgtaattgtcaaaatagtcacaacaaggtttgacaggacaactgaagatttgtatgctgtagaaaatgtaaaagaaaaatatggtgtttttgcgcatcaggttgttgactataaagcattagtaggtgatgcgtcagacaatataccaggtgttaagggaattggagataaaactgccataaagctgttagaagagtaccagactctggagaatatatatcagaatctaaataacattaaaggagcgctaaaagagaagttggaatcaggaaaagacatggcatttttatcaaaaagactggctactatcatatgcgatttaccaattgaggtgaatcttgaagaattaaaaaccaaagaatgggacaaagaaagactttatcagattttacttcaacttgagtttaaaagctttattaaaagactgggcttttcagaagagattaactatgcaaggcagaactttcagctacctgaatttagtattaaagaacttcgtgatgtttcagcaatagggggcaaagaaatctatctattgtactcagatgaagaaggacttttttatatttatgaccatcaaacctcaaccatttttacaacttctgataaggaagctattaaagatcttttaacactccaaagcattcaaaaggttgtatatgatttaaaaaatatactccataaggtggactttgatgaagctaatcagataaaaaattgtaatgatgttatgttggcttcatatgttttggacagtacacgcagttcgtacgatttggaaacattgtttatttcttatctcaacactgatatagctgcaatcaaagagaatagatgggctggtgctacagttttattaagaaatctttgggatgaactttcaaaactcattgatttaaactcggcccaatacgtttatgagagcatagagatgcctcttgttcccattttatatgaaatggagaaaatcggttttaaggttgacaaaaacactttgcaggagtatacaaaagagattgagagcaagcttttaaagttggaatcacagatttatcaaatagccggtgaatggtttaacataaactcgccaaaacaactctcatatatattattcgaaaaactgaagcttccggttgttaaaaagaccaaaacaggatattcaacagatgccgaggtattagaagagctgtatgataaacatgacataataccgcttattctggattatagaatgtatacgaaaatactgacaacttactgtcagggactggttcaggcaataaatcctgcaactggaagaattcataccaactttattcagacaggtacggcaactggaagacttgcaagtgcagagcccaatctgcaaaatattcctgtaaaatatgatgagggaaagctaataagaaaggcatttgttccagatgaaggttatgtgttgatagatgctgattattctcagattgagcttagaatacttgcacatatctctgaggatgaacgactgataaatgcttttaaaaataaccttgatattcattcacagacggcggcagagatctttggtgtggatataagtcaggttacaccaattatgcgaagccaggcaaaagcagttaactttggaattgtatatggtatatctgattatggactttcacgggatataaagatttcaagaaaagaagcagccgagtttattaatcgttattttgaaaagtatcccagagtaaaagaatatttggacaatgtcgtcaagtttgcccgtgaaaacggatttgttttgacaatatttaacaggaaaaggtatatcaaggatataaagtctactaataaaaacctgagaaactatgcatctagaatagcaatgaattcacctatccagggaagtgctgcagatattatgaaaatagcaatgataagagtttataaaaagctaaaagaaaacaatttaaaatcaagaattattctgcaggtccatgacgaacttttgattgaatcaccctatgaagagaaagagatagtaaaggaaatagtaaaatcggagatggaaaatgcggttttattgaaagttcctttggtagttgaagtgaaagaaggttcaaattggtatgaaacaaagtaaaggatcc

SEQ ID NO: 1801 - DNA, 2623 bp, Artificial Sequence
  Description of Artificial Sequence: Synthetic DNA sequence of Caldicellulosiruptor TOK13B DNA Polymerase E783T
atgaaatacctgctgccgaccgctgctgctggtctgctgctcctcgctgcccagccggcgatggccatggaatttgttatttttgatgggaatagtattctgtatagagctttttttgccttgccacagcttactacctcaacaggcatacctacaaatgctatatatggttttttgaatgtgctgttaaaatacttagattctgaaaaaccggattatgtagcagtagcttttgacaaaaaaggcagagctgtccgaaaaagtgaatatgaagaatacaaggctaacagaaaaccgatgccagattctcttcaggttcagataccttacgtaagagaaatacttgctgctctgaacattcctgtactgaaatgtgaagggtatgaagctgatgacgttataggcacacttgtaaatagatttaaagcccaggatttagagattgtgataataaccggagacagagatacacttcagttacttgataaaaatgtaattgtcaaaatagtcacaacaaggtttgacaggacaactgaagatttgtatgctgtagaaaatgtaaaagaaaaatatggtgtttttgcgcatcaggttgttgactataaagcattagtaggtgatgcgtcagacaatataccaggtgttaagggaattggagataaaactgccataaagctgttagaagagtaccagactctggagaatatatatcagaatctaaataacattaaaggagcgctaaaagagaagttggaatcaggaaaagacatggcatttttatcaaaaagactggctactatcatatgcgatttaccaattgaggtgaatcttgaagaattaaaaaccaaagaatgggacaaagaaagactttatcagattttacttcaacttgagtttaaaagctttattaaaagactgggcttttcagaagagattaactatgcaaggcagaactttcagctacctgaatttagtattaaagaacttcgtgatgtttcagcaatagggggcaaagaaatctatctattgtactcagatgaagaaggacttttttatatttatgaccatcaaacctcaaccatttttacaacttctgataaggaagctattaaagatcttttaacactccaaagcattcaaaaggttgtatatgatttaaaaaatatactccataaggtggactttgatgaagctaatcagataaaaaattgtaatgatgttatgttggcttcatatgttttggacagtacacgcagttcgtacgatttggaaacattgtttatttcttatctcaacactgatatagctgcaatcaaagagaatagatgggctggtgctacagttttattaagaaatctttgggatgaactttcaaaactcattgatttaaactcggcccaatacgtttatgagagcatagagatgcctcttgttcccattttatatgaaatggagaaaatcggttttaaggttgacaaaaacactttgcaggagtatacaaaagagattgagagcaagcttttaaagttggaatcacagatttatcaaatagccggtgaatggtttaacataaactcgccaaaacaactctcatatatattattcgaaaaactgaagcttccggttgttaaaaagaccaaaacaggatattcaacagatgccgaggtattagaagagctgtatgataaacatgacataataccgcttattctggattatagaatgtatacgaaaatactgacaacttactgtcagggactggttcaggcaataaatcctgcaactggaagaattcataccaactttattcagacaggtacggcaactggaagacttgcaagtgcagagcccaatctgcaaaatattcctgtaaaatatgatgagggaaagctaataagaaaggcatttgttccagatgaaggttatgtgttgatagatgctgattattctcagattgagcttagaatacttgcacatatctctgaggatgaacgactgataaatgcttttaaaaataaccttgatattcattcacagacggcggcagagatctttggtgtggatataagtcaggttacaccaattatgcgaagccaggcaaaagcagttaactttggaattgtatatggtatatctgattatggactttcacgggatataaagatttcaagaaaagaagcagccgagtttattaatcgttattttgaaaagtatcccagagtaaaagaatatttggacaatgtcgtcaagtttgcccgtgaaaacggatttgttttgacaatatttaacaggaaaaggtatatcaaggatataaagtctactaataaaaacctgagaaactatgcaactagaatagcaatgaattcacctatccagggaagtgctgcagatattatgaaaatagcaatgataagagtttataaaaagctaaaagaaaacaatttaaaatcaagaattattctgcaggtccatgacgaacttttgattgaatcaccctatgaagagaaagagatagtaaaggaaatagtaaaatcggagatggaaaatgcggttttattgaaagttcctttggtagttgaagtgaaagaaggttcaaattggtatgaaacaaagtaaaggatcc

SEQ ID NO: 1802 - DNA, 2623 bp, Artificial Sequence
  Description of Artificial Sequence: Synthetic DNA sequence of Caldicellulosiruptor TOK13B DNA Polymerase E783W
atgaaatacctgctgccgaccgctgctgctggtctgctgctcctcgctgcccagccggcgatggccatggaatttgttatttttgatgggaatagtattctgtatagagctttttttgccttgccacagcttactacctcaacaggcatacctacaaatgctatatatggttttttgaatgtgctgttaaaatacttagattctgaaaaaccggattatgtagcagtagcttttgacaaaaaaggcagagctgtccgaaaaagtgaatatgaagaatacaaggctaacagaaaaccgatgccagattctcttcaggttcagataccttacgtaagagaaatacttgctgctctgaacattcctgtactgaaatgtgaagggtatgaagctgatgacgttataggcacacttgtaaatagatttaaagcccaggatttagagattgtgataataaccggagacagagatacacttcagttacttgataaaaatgtaattgtcaaaatagtcacaacaaggtttgacaggacaactgaagatttgtatgctgtagaaaatgtaaaagaaaaatatggtgtttttgcgcatcaggttgttgactataaagcattagtaggtgatgcgtcagacaatataccaggtgttaagggaattggagataaaactgccataaagctgttagaagagtaccagactctggagaatatatatcagaatctaaataacattaaaggagcgctaaaagagaagttggaatcaggaaaagacatggcatttttatcaaaaagactggctactatcatatgcgatttaccaattgaggtgaatcttgaagaattaaaaaccaaagaatgggacaaagaaagactttatcagattttacttcaacttgagtttaaaagctttattaaaagactgggcttttcagaagagattaactatgcaaggcagaactttcagctacctgaatttagtattaaagaacttcgtgatgtttcagcaatagggggcaaagaaatctatctattgtactcagatgaagaaggacttttttatatttatgaccatcaaacctcaaccatttttacaacttctgataaggaagctattaaagatcttttaacactccaaagcattcaaaaggttgtatatgatttaaaaaatatactccataaggtggactttgatgaagctaatcagataaaaaattgtaatgatgttatgttggcttcatatgttttggacagtacacgcagttcgtacgatttggaaacattgtttatttcttatctcaacactgatatagctgcaatcaaagagaatagatgggctggtgctacagttttattaagaaatctttgggatgaactttcaaaactcattgatttaaactcggcccaatacgtttatgagagcatagagatgcctcttgttcccattttatatgaaatggagaaaatcggttttaaggttgacaaaaacactttgcaggagtatacaaaagagattgagagcaagcttttaaagttggaatcacagatttatcaaatagccggtgaatggtttaacataaactcgccaaaacaactctcatatatattattcgaaaaactgaagcttccggttgttaaaaagaccaaaacaggatattcaacagatgccgaggtattagaagagctgtatgataaacatgacataataccgcttattctggattatagaatgtatacgaaaatactgacaacttactgtcagggactggttcaggcaataaatcctgcaactggaagaattcataccaactttattcagacaggtacggcaactggaagacttgcaagtgcagagcccaatctgcaaaatattcctgtaaaatatgatgagggaaagctaataagaaaggcatttgttccagatgaaggttatgtgttgatagatgctgattattctcagattgagcttagaatacttgcacatatctctgaggatgaacgactgataaatgcttttaaaaataaccttgatattcattcacagacggcggcagagatctttggtgtggatataagtcaggttacaccaattatgcgaagccaggcaaaagcagttaactttggaattgtatatggtatatctgattatggactttcacgggatataaagatttcaagaaaagaagcagccgagtttattaatcgttattttgaaaagtatcccagagtaaaagaatatttggacaatgtcgtcaagtttgcccgtgaaaacggatttgttttgacaatatttaacaggaaaaggtatatcaaggatataaagtctactaataaaaacctgagaaactatgcatggagaatagcaatgaattcacctatccagggaagtgctgcagatattatgaaaatagcaatgataagagtttataaaaagctaaaagaaaacaatttaaaatcaagaattattctgcaggtccatgacgaacttttgattgaatcaccctatgaagagaaagagatagtaaaggaaatagtaaaatcggagatggaaaatgcggttttattgaaagttcctttggtagttgaagtgaaagaaggttcaaattggtatgaaacaaagtaaaggatcc

SEQ ID NO: 1803 - DNA, 2623 bp, Artificial Sequence
  Description of Artificial Sequence: Synthetic DNA sequence of Caldicellulosiruptor TOK13B DNA Polymerase E783Y
atgaaatacctgctgccgaccgctgctgctggtctgctgctcctcgctgcccagccggcgatggccatggaatttgttatttttgatgggaatagtattctgtatagagctttttttgccttgccacagcttactacctcaacaggcatacctacaaatgctatatatggttttttgaatgtgctgttaaaatacttagattctgaaaaaccggattatgtagcagtagcttttgacaaaaaaggcagagctgtccgaaaaagtgaatatgaagaatacaaggctaacagaaaaccgatgccagattctcttcaggttcagataccttacgtaagagaaatacttgctgctctgaacattcctgtactgaaatgtgaagggtatgaagctgatgacgttataggcacacttgtaaatagatttaaagcccaggatttagagattgtgataataaccggagacagagatacacttcagttacttgataaaaatgtaattgtcaaaatagtcacaacaaggtttgacaggacaactgaagatttgtatgctgtagaaaatgtaaaagaaaaatatggtgtttttgcgcatcaggttgttgactataaagcattagtaggtgatgcgtcagacaatataccaggtgttaagggaattggagataaaactgccataaagctgttagaagagtaccagactctggagaatatatatcagaatctaaataacattaaaggagcgctaaaagagaagttggaatcaggaaaagacatggcatttttatcaaaaagactggctactatcatatgcgatttaccaattgaggtgaatcttgaagaattaaaaaccaaagaatgggacaaagaaagactttatcagattttacttcaacttgagtttaaaagctttattaaaagactgggcttttcagaagagattaactatgcaaggcagaactttcagctacctgaatttagtattaaagaacttcgtgatgtttcagcaatagggggcaaagaaatctatctattgtactcagatgaagaaggacttttttatatttatgaccatcaaacctcaaccatttttacaacttctgataaggaagctattaaagatcttttaacactccaaagcattcaaaaggttgtatatgatttaaaaaatatactccataaggtggactttgatgaagctaatcagataaaaaattgtaatgatgttatgttggcttcatatgttttggacagtacacgcagttcgtacgatttggaaacattgtttatttcttatctcaacactgatatagctgcaatcaaagagaatagatgggctggtgctacagttttattaagaaatctttgggatgaactttcaaaactcattgatttaaactcggcccaatacgtttatgagagcatagagatgcctcttgttcccattttatatgaaatggagaaaatcggttttaaggttgacaaaaacactttgcaggagtatacaaaagagattgagagcaagcttttaaagttggaatcacagatttatcaaatagccggtgaatggtttaacataaactcgccaaaacaactctcatatatattattcgaaaaactgaagcttccggttgttaaaaagaccaaaacaggatattcaacagatgccgaggtattagaagagctgtatgataaacatgacataataccgcttattctggattatagaatgtatacgaaaatactgacaacttactgtcagggactggttcaggcaataaatcctgcaactggaagaattcataccaactttattcagacaggtacggcaactggaagacttgcaagtgcagagcccaatctgcaaaatattcctgtaaaatatgatgagggaaagctaataagaaaggcatttgttccagatgaaggttatgtgttgatagatgctgattattctcagattgagcttagaatacttgcacatatctctgaggatgaacgactgataaatgcttttaaaaataaccttgatattcattcacagacggcggcagagatctttggtgtggatataagtcaggttacaccaattatgcgaagccaggcaaaagcagttaactttggaattgtatatggtatatctgattatggactttcacgggatataaagatttcaagaaaagaagcagccgagtttattaatcgttattttgaaaagtatcccagagtaaaagaatatttggacaatgtcgtcaagtttgcccgtgaaaacggatttgttttgacaatatttaacaggaaaaggtatatcaaggatataaagtctactaataaaaacctgagaaactatgcatatagaatagcaatgaattcacctatccagggaagtgctgcagatattatgaaaatagcaatgataagagtttataaaaagctaaaagaaaacaatttaaaatcaagaattattctgcaggtccatgacgaacttttgattgaatcaccctatgaagagaaagagatagtaaaggaaatagtaaaatcggagatggaaaatgcggttttattgaaagttcctttggtagttgaagtgaaagaaggttcaaattggtatgaaacaaagtaaaggatcc

SEQ ID NO: 1804 - DNA, 2623 bp, Artificial Sequence
  Description of Artificial Sequence: Synthetic DNA sequence of Caldicellulosiruptor TOK13B DNA Polymerase E783V
atgaaatacctgctgccgaccgctgctgctggtctgctgctcctcgctgcccagccggcgatggccatggaatttgttatttttgatgggaatagtattctgtatagagctttttttgccttgccacagcttactacctcaacaggcatacctacaaatgctatatatggttttttgaatgtgctgttaaaatacttagattctgaaaaaccggattatgtagcagtagcttttgacaaaaaaggcagagctgtccgaaaaagtgaatatgaagaatacaaggctaacagaaaaccgatgccagattctcttcaggttcagataccttacgtaagagaaatacttgctgctctgaacattcctgtactgaaatgtgaagggtatgaagctgatgacgttataggcacacttgtaaatagatttaaagcccaggatttagagattgtgataataaccggagacagagatacacttcagttacttgataaaaatgtaattgtcaaaatagtcacaacaaggtttgacaggacaactgaagatttgtatgctgtagaaaatgtaaaagaaaaatatggtgtttttgcgcatcaggttgttgactataaagcattagtaggtgatgcgtcagacaatataccaggtgttaagggaattggagataaaactgccataaagctgttagaagagtaccagactctggagaatatatatcagaatctaaataacattaaaggagcgctaaaagagaagttggaatcaggaaaagacatggcatttttatcaaaaagactggctactatcatatgcgatttaccaattgaggtgaatcttgaagaattaaaaaccaaagaatgggacaaagaaagactttatcagattttacttcaacttgagtttaaaagctttattaaaagactgggcttttcagaagagattaactatgcaaggcagaactttcagctacctgaatttagtattaaagaacttcgtgatgtttcagcaatagggggcaaagaaatctatctattgtactcagatgaagaaggacttttttatatttatgaccatcaaacctcaaccatttttacaacttctgataaggaagctattaaagatcttttaacactccaaagcattcaaaaggttgtatatgatttaaaaaatatactccataaggtggactttgatgaagctaatcagataaaaaattgtaatgatgttatgttggcttcatatgttttggacagtacacgcagttcgtacgatttggaaacattgtttatttcttatctcaacactgatatagctgcaatcaaagagaatagatgggctggtgctacagttttattaagaaatctttgggatgaactttcaaaactcattgatttaaactcggcccaatacgtttatgagagcatagagatgcctcttgttcccattttatatgaaatggagaaaatcggttttaaggttgacaaaaacactttgcaggagtatacaaaagagattgagagcaagcttttaaagttggaatcacagatttatcaaatagccggtgaatggtttaacataaactcgccaaaacaactctcatatatattattcgaaaaactgaagcttccggttgttaaaaagaccaaaacaggatattcaacagatgccgaggtattagaagagctgtatgataaacatgacataataccgcttattctggattatagaatgtatacgaaaatactgacaacttactgtcagggactggttcaggcaataaatcctgcaactggaagaattcataccaactttattcagacaggtacggcaactggaagacttgcaagtgcagagcccaatctgcaaaatattcctgtaaaatatgatgagggaaagctaataagaaaggcatttgttccagatgaaggttatgtgttgatagatgctgattattctcagattgagcttagaatacttgcacatatctctgaggatgaacgactgataaatgcttttaaaaataaccttgatattcattcacagacggcggcagagatctttggtgtggatataagtcaggttacaccaattatgcgaagccaggcaaaagcagttaactttggaattgtatatggtatatctgattatggactttcacgggatataaagatttcaagaaaagaagcagccgagtttattaatcgttattttgaaaagtatcccagagtaaaagaatatttggacaatgtcgtcaagtttgcccgtgaaaacggatttgttttgacaatatttaacaggaaaaggtatatcaaggatataaagtctactaataaaaacctgagaaactatgcagttagaatagcaatgaattcacctatccagggaagtgctgcagatattatgaaaatagcaatgataagagtttataaaaagctaaaagaaaacaatttaaaatcaagaattattctgcaggtccatgacgaacttttgattgaatcaccctatgaagagaaagagatagtaaaggaaatagtaaaatcggagatggaaaatgcggttttattgaaagttcctttggtagttgaagtgaaagaaggttcaaattggtatgaaacaaagtaaaggatcc

SEQ ID NO: 1805 - DNA, 2623 bp, Artificial Sequence
  Description of Artificial Sequence: Synthetic DNA sequence of Caldicellulosiruptor TOK13B DNA Polymerase R784A
atgaaatacctgctgccgaccgctgctgctggtctgctgctcctcgctgcccagccggcgatggccatggaatttgttatttttgatgggaatagtattctgtatagagctttttttgccttgccacagcttactacctcaacaggcatacctacaaatgctatatatggttttttgaatgtgctgttaaaatacttagattctgaaaaaccggattatgtagcagtagcttttgacaaaaaaggcagagctgtccgaaaaagtgaatatgaagaatacaaggctaacagaaaaccgatgccagattctcttcaggttcagataccttacgtaagagaaatacttgctgctctgaacattcctgtactgaaatgtgaagggtatgaagctgatgacgttataggcacacttgtaaatagatttaaagcccaggatttagagattgtgataataaccggagacagagatacacttcagttacttgataaaaatgtaattgtcaaaatagtcacaacaaggtttgacaggacaactgaagatttgtatgctgtagaaaatgtaaaagaaaaatatggtgtttttgcgcatcaggttgttgactataaagcattagtaggtgatgcgtcagacaatataccaggtgttaagggaattggagataaaactgccataaagctgttagaagagtaccagactctggagaatatatatcagaatctaaataacattaaaggagcgctaaaagagaagttggaatcaggaaaagacatggcatttttatcaaaaagactggctactatcatatgcgatttaccaattgaggtgaatcttgaagaattaaaaaccaaagaatgggacaaagaaagactttatcagattttacttcaacttgagtttaaaagctttattaaaagactgggcttttcagaagagattaactatgcaaggcagaactttcagctacctgaatttagtattaaagaacttcgtgatgtttcagcaatagggggcaaagaaatctatctattgtactcagatgaagaaggacttttttatatttatgaccatcaaacctcaaccatttttacaacttctgataaggaagctattaaagatcttttaacactccaaagcattcaaaaggttgtatatgatttaaaaaatatactccataaggtggactttgatgaagctaatcagataaaaaattgtaatgatgttatgttggcttcatatgttttggacagtacacgcagttcgtacgatttggaaacattgtttatttcttatctcaacactgatatagctgcaatcaaagagaatagatgggctggtgctacagttttattaagaaatctttgggatgaactttcaaaactcattgatttaaactcggcccaatacgtttatgagagcatagagatgcctcttgttcccattttatatgaaatggagaaaatcggttttaaggttgacaaaaacactttgcaggagtatacaaaagagattgagagcaagcttttaaagttggaatcacagatttatcaaatagccggtgaatggtttaacataaactcgccaaaacaactctcatatatattattcgaaaaactgaagcttccggttgttaaaaagaccaaaacaggatattcaacagatgccgaggtattagaagagctgtatgataaacatgacataataccgcttattctggattatagaatgtatacgaaaatactgacaacttactgtcagggactggttcaggcaataaatcctgcaactggaagaattcataccaactttattcagacaggtacggcaactggaagacttgcaagtgcagagcccaatctgcaaaatattcctgtaaaatatgatgagggaaagctaataagaaaggcatttgttccagatgaaggttatgtgttgatagatgctgattattctcagattgagcttagaatacttgcacatatctctgaggatgaacgactgataaatgcttttaaaaataaccttgatattcattcacagacggcggcagagatctttggtgtggatataagtcaggttacaccaattatgcgaagccaggcaaaagcagttaactttggaattgtatatggtatatctgattatggactttcacgggatataaagatttcaagaaaagaagcagccgagtttattaatcgttattttgaaaagtatcccagagtaaaagaatatttggacaatgtcgtcaagtttgcccgtgaaaacggatttgttttgacaatatttaacaggaaaaggtatatcaaggatataaagtctactaataaaaacctgagaaactatgcagaggctatagcaatgaattcacctatccagggaagtgctgcagatattatgaaaatagcaatgataagagtttataaaaagctaaaagaaaacaatttaaaatcaagaattattctgcaggtccatgacgaacttttgattgaatcaccctatgaagagaaagagatagtaaaggaaatagtaaaatcggagatggaaaatgcggttttattgaaagttcctttggtagttgaagtgaaagaaggttcaaattggtatgaaacaaagtaaaggatcc

SEQ ID NO: 1806 - DNA, 2623 bp, Artificial Sequence
  Description of Artificial Sequence: Synthetic DNA sequence of Caldicellulosiruptor TOK13B DNA Polymerase R784N
atgaaatacctgctgccgaccgctgctgctggtctgctgctcctcgctgcccagccggcgatggccatggaatttgttatttttgatgggaatagtattctgtatagagctttttttgccttgccacagcttactacctcaacaggcatacctacaaatgctatatatggttttttgaatgtgctgttaaaatacttagattctgaaaaaccggattatgtagcagtagcttttgacaaaaaaggcagagctgtccgaaaaagtgaatatgaagaatacaaggctaacagaaaaccgatgccagattctcttcaggttcagataccttacgtaagagaaatacttgctgctctgaacattcctgtactgaaatgtgaagggtatgaagctgatgacgttataggcacacttgtaaatagatttaaagcccaggatttagagattgtgataataaccggagacagagatacacttcagttacttgataaaaatgtaattgtcaaaatagtcacaacaaggtttgacaggacaactgaagatttgtatgctgtagaaaatgtaaaagaaaaatatggtgtttttgcgcatcaggttgttgactataaagcattagtaggtgatgcgtcagacaatataccaggtgttaagggaattggagataaaactgccataaagctgttagaagagtaccagactctggagaatatatatcagaatctaaataacattaaaggagcgctaaaagagaagttggaatcaggaaaagacatggcatttttatcaaaaagactggctactatcatatgcgatttaccaattgaggtgaatcttgaagaattaaaaaccaaagaatgggacaaagaaagactttatcagattttacttcaacttgagtttaaaagctttattaaaagactgggcttttcagaagagattaactatgcaaggcagaactttcagctacctgaatttagtattaaagaacttcgtgatgtttcagcaatagggggcaaagaaatctatctattgtactcagatgaagaaggacttttttatatttatgaccatcaaacctcaaccatttttacaacttctgataaggaagctattaaagatcttttaacactccaaagcattcaaaaggttgtatatgatttaaaaaatatactccataaggtggactttgatgaagctaatcagataaaaaattgtaatgatgttatgttggcttcatatgttttggacagtacacgcagttcgtacgatttggaaacattgtttatttcttatctcaacactgatatagctgcaatcaaagagaatagatgggctggtgctacagttttattaagaaatctttgggatgaactttcaaaactcattgatttaaactcggcccaatacgtttatgagagcatagagatgcctcttgttcccattttatatgaaatggagaaaatcggttttaaggttgacaaaaacactttgcaggagtatacaaaagagattgagagcaagcttttaaagttggaatcacagatttatcaaatagccggtgaatggtttaacataaactcgccaaaacaactctcatatatattattcgaaaaactgaagcttccggttgttaaaaagaccaaaacaggatattcaacagatgccgaggtattagaagagctgtatgataaacatgacataataccgcttattctggattatagaatgtatacgaaaatactgacaacttactgtcagggactggttcaggcaataaatcctgcaactggaagaattcataccaactttattcagacaggtacggcaactggaagacttgcaagtgcagagcccaatctgcaaaatattcctgtaaaatatgatgagggaaagctaataagaaaggcatttgttccagatgaaggttatgtgttgatagatgctgattattctcagattgagcttagaatacttgcacatatctctgaggatgaacgactgataaatgcttttaaaaataaccttgatattcattcacagacggcggcagagatctttggtgtggatataagtcaggttacaccaattatgcgaagccaggcaaaagcagttaactttggaattgtatatggtatatctgattatggactttcacgggatataaagatttcaagaaaagaagcagccgagtttattaatcgttattttgaaaagtatcccagagtaaaagaatatttggacaatgtcgtcaagtttgcccgtgaaaacggatttgttttgacaatatttaacaggaaaaggtatatcaaggatataaagtctactaataaaaacctgagaaactatgcagagaatatagcaatgaattcacctatccagggaagtgctgcagatattatgaaaatagcaatgataagagtttataaaaagctaaaagaaaacaatttaaaatcaagaattattctgcaggtccatgacgaacttttgattgaatcaccctatgaagagaaagagatagtaaaggaaatagtaaaatcggagatggaaaatgcggttttattgaaagttcctttggtagttgaagtgaaagaaggttcaaattggtatgaaacaaagtaaaggatcc

SEQ ID NO: 1807 - DNA, 2623 bp, Artificial Sequence
  Description of Artificial Sequence: Synthetic DNA sequence of Caldicellulosiruptor TOK13B DNA Polymerase R784D
atgaaatacctgctgccgaccgctgctgctggtctgctgctcctcgctgcccagccggcgatggccatggaatttgttatttttgatgggaatagtattctgtatagagctttttttgccttgccacagcttactacctcaacaggcatacctacaaatgctatatatggttttttgaatgtgctgttaaaatacttagattctgaaaaaccggattatgtagcagtagcttttgacaaaaaaggcagagctgtccgaaaaagtgaatatgaagaatacaaggctaacagaaaaccgatgccagattctcttcaggttcagataccttacgtaagagaaatacttgctgctctgaacattcctgtactgaaatgtgaagggtatgaagctgatgacgttataggcacacttgtaaatagatttaaagcccaggatttagagattgtgataataaccggagacagagatacacttcagttacttgataaaaatgtaattgtcaaaatagtcacaacaaggtttgacaggacaactgaagatttgtatgctgtagaaaatgtaaaagaaaaatatggtgtttttgcgcatcaggttgttgactataaagcattagtaggtgatgcgtcagacaatataccaggtgttaagggaattggagataaaactgccataaagctgttagaagagtaccagactctggagaatatatatcagaatctaaataacattaaaggagcgctaaaagagaagttggaatcaggaaaagacatggcatttttatcaaaaagactggctactatcatatgcgatttaccaattgaggtgaatcttgaagaattaaaaaccaaagaatgggacaaagaaagactttatcagattttacttcaacttgagtttaaaagctttattaaaagactgggcttttcagaagagattaactatgcaaggcagaactttcagctacctgaatttagtattaaagaacttcgtgatgtttcagcaatagggggcaaagaaatctatctattgtactcagatgaagaaggacttttttatatttatgaccatcaaacctcaaccatttttacaacttctgataaggaagctattaaagatcttttaacactccaaagcattcaaaaggttgtatatgatttaaaaaatatactccataaggtggactttgatgaagctaatcagataaaaaattgtaatgatgttatgttggcttcatatgttttggacagtacacgcagttcgtacgatttggaaacattgtttatttcttatctcaacactgatatagctgcaatcaaagagaatagatgggctggtgctacagttttattaagaaatctttgggatgaactttcaaaactcattgatttaaactcggcccaatacgtttatgagagcatagagatgcctcttgttcccattttatatgaaatggagaaaatcggttttaaggttgacaaaaacactttgcaggagtatacaaaagagattgagagcaagcttttaaagttggaatcacagatttatcaaatagccggtgaatggtttaacataaactcgccaaaacaactctcatatatattattcgaaaaactgaagcttccggttgttaaaaagaccaaaacaggatattcaacagatgccgaggtattagaagagctgtatgataaacatgacataataccgcttattctggattatagaatgtatacgaaaatactgacaacttactgtcagggactggttcaggcaataaatcctgcaactggaagaattcataccaactttattcagacaggtacggcaactggaagacttgcaagtgcagagcccaatctgcaaaatattcctgtaaaatatgatgagggaaagctaataagaaaggcatttgttccagatgaaggttatgtgttgatagatgctgattattctcagattgagcttagaatacttgcacatatctctgaggatgaacgactgataaatgcttttaaaaataaccttgatattcattcacagacggcggcagagatctttggtgtggatataagtcaggttacaccaattatgcgaagccaggcaaaagcagttaactttggaattgtatatggtatatctgattatggactttcacgggatataaagatttcaagaaaagaagcagccgagtttattaatcgttattttgaaaagtatcccagagtaaaagaatatttggacaatgtcgtcaagtttgcccgtgaaaacggatttgttttgacaatatttaacaggaaaaggtatatcaaggatataaagtctactaataaaaacctgagaaactatgcagaggatatagcaatgaattcacctatccagggaagtgctgcagatattatgaaaatagcaatgataagagtttataaaaagctaaaagaaaacaatttaaaatcaagaattattctgcaggtccatgacgaacttttgattgaatcaccctatgaagagaaagagatagtaaaggaaatagtaaaatcggagatggaaaatgcggttttattgaaagttcctttggtagttgaagtgaaagaaggttcaaattggtatgaaacaaagtaaaggatcc

SEQ ID NO: 1808 - DNA, 2623 bp, Artificial Sequence
  Description of Artificial Sequence: Synthetic DNA sequence of Caldicellulosiruptor TOK13B DNA Polymerase R784C
atgaaatacctgctgccgaccgctgctgctggtctgctgctcctcgctgcccagccggcgatggccatggaatttgttatttttgatgggaatagtattctgtatagagctttttttgccttgccacagcttactacctcaacaggcatacctacaaatgctatatatggttttttgaatgtgctgttaaaatacttagattctgaaaaaccggattatgtagcagtagcttttgacaaaaaaggcagagctgtccgaaaaagtgaatatgaagaatacaaggctaacagaaaaccgatgccagattctcttcaggttcagataccttacgtaagagaaatacttgctgctctgaacattcctgtactgaaatgtgaagggtatgaagctgatgacgttataggcacacttgtaaatagatttaaagcccaggatttagagattgtgataataaccggagacagagatacacttcagttacttgataaaaatgtaattgtcaaaatagtcacaacaaggtttgacaggacaactgaagatttgtatgctgtagaaaatgtaaaagaaaaatatggtgtttttgcgcatcaggttgttgactataaagcattagtaggtgatgcgtcagacaatataccaggtgttaagggaattggagataaaactgccataaagctgttagaagagtaccagactctggagaatatatatcagaatctaaataacattaaaggagcgctaaaagagaagttggaatcaggaaaagacatggcatttttatcaaaaagactggctactatcatatgcgatttaccaattgaggtgaatcttgaagaattaaaaaccaaagaatgggacaaagaaagactttatcagattttacttcaacttgagtttaaaagctttattaaaagactgggcttttcagaagagattaactatgcaaggcagaactttcagctacctgaatttagtattaaagaacttcgtgatgtttcagcaatagggggcaaagaaatctatctattgtactcagatgaagaaggacttttttatatttatgaccatcaaacctcaaccatttttacaacttctgataaggaagctattaaagatcttttaacactccaaagcattcaaaaggttgtatatgatttaaaaaatatactccataaggtggactttgatgaagctaatcagataaaaaattgtaatgatgttatgttggcttcatatgttttggacagtacacgcagttcgtacgatttggaaacattgtttatttcttatctcaacactgatatagctgcaatcaaagagaatagatgggctggtgctacagttttattaagaaatctttgggatgaactttcaaaactcattgatttaaactcggcccaatacgtttatgagagcatagagatgcctcttgttcccattttatatgaaatggagaaaatcggttttaaggttgacaaaaacactttgcaggagtatacaaaagagattgagagcaagcttttaaagttggaatcacagatttatcaaatagccggtgaatggtttaacataaactcgccaaaacaactctcatatatattattcgaaaaactgaagcttccggttgttaaaaagaccaaaacaggatattcaacagatgccgaggtattagaagagctgtatgataaacatgacataataccgcttattctggattatagaatgtatacgaaaatactgacaacttactgtcagggactggttcaggcaataaatcctgcaactggaagaattcataccaactttattcagacaggtacggcaactggaagacttgcaagtgcagagcccaatctgcaaaatattcctgtaaaatatgatgagggaaagctaataagaaaggcatttgttccagatgaaggttatgtgttgatagatgctgattattctcagattgagcttagaatacttgcacatatctctgaggatgaacgactgataaatgcttttaaaaataaccttgatattcattcacagacggcggcagagatctttggtgtggatataagtcaggttacaccaattatgcgaagccaggcaaaagcagttaactttggaattgtatatggtatatctgattatggactttcacgggatataaagatttcaagaaaagaagcagccgagtttattaatcgttattttgaaaagtatcccagagtaaaagaatatttggacaatgtcgtcaagtttgcccgtgaaaacggatttgttttgacaatatttaacaggaaaaggtatatcaaggatataaagtctactaataaaaacctgagaaactatgcagagtgtatagcaatgaattcacctatccagggaagtgctgcagatattatgaaaatagcaatgataagagtttataaaaagctaaaagaaaacaatttaaaatcaagaattattctgcaggtccatgacgaacttttgattgaatcaccctatgaagagaaagagatagtaaaggaaatagtaaaatcggagatggaaaatgcggttttattgaaagttcctttggtagttgaagtgaaagaaggttcaaattggtatgaaacaaagtaaaggatcc

SEQ ID NO: 1809 - DNA, 2623 bp, Artificial Sequence
  Description of Artificial Sequence: Synthetic DNA sequence of Caldicellulosiruptor TOK13B DNA Polymerase R784E
atgaaatacctgctgccgaccgctgctgctggtctgctgctcctcgctgcccagccggcgatggccatggaatttgttatttttgatgggaatagtattctgtatagagctttttttgccttgccacagcttactacctcaacaggcatacctacaaatgctatatatggttttttgaatgtgctgttaaaatacttagattctgaaaaaccggattatgtagcagtagcttttgacaaaaaaggcagagctgtccgaaaaagtgaatatgaagaatacaaggctaacagaaaaccgatgccagattctcttcaggttcagataccttacgtaagagaaatacttgctgctctgaacattcctgtactgaaatgtgaagggtatgaagctgatgacgttataggcacacttgtaaatagatttaaagcccaggatttagagattgtgataataaccggagacagagatacacttcagttacttgataaaaatgtaattgtcaaaatagtcacaacaaggtttgacaggacaactgaagatttgtatgctgtagaaaatgtaaaagaaaaatatggtgtttttgcgcatcaggttgttgactataaagcattagtaggtgatgcgtcagacaatataccaggtgttaagggaattggagataaaactgccataaagctgttagaagagtaccagactctggagaatatatatcagaatctaaataacattaaaggagcgctaaaagagaagttggaatcaggaaaagacatggcatttttatcaaaaagactggctactatcatatgcgatttaccaattgaggtgaatcttgaagaattaaaaaccaaagaatgggacaaagaaagactttatcagattttacttcaacttgagtttaaaagctttattaaaagactgggcttttcagaagagattaactatgcaaggcagaactttcagctacctgaatttagtattaaagaacttcgtgatgtttcagcaatagggggcaaagaaatctatctattgtactcagatgaagaaggacttttttatatttatgaccatcaaacctcaaccatttttacaacttctgataaggaagctattaaagatcttttaacactccaaagcattcaaaaggttgtatatgatttaaaaaatatactccataaggtggactttgatgaagctaatcagataaaaaattgtaatgatgttatgttggcttcatatgttttggacagtacacgcagttcgtacgatttggaaacattgtttatttcttatctcaacactgatatagctgcaatcaaagagaatagatgggctggtgctacagttttattaagaaatctttgggatgaactttcaaaactcattgatttaaactcggcccaatacgtttatgagagcatagagatgcctcttgttcccattttatatgaaatggagaaaatcggttttaaggttgacaaaaacactttgcaggagtatacaaaagagattgagagcaagcttttaaagttggaatcacagatttatcaaatagccggtgaatggtttaacataaactcgccaaaacaactctcatatatattattcgaaaaactgaagcttccggttgttaaaaagaccaaaacaggatattcaacagatgccgaggtattagaagagctgtatgataaacatgacataataccgcttattctggattatagaatgtatacgaaaatactgacaacttactgtcagggactggttcaggcaataaatcctgcaactggaagaattcataccaactttattcagacaggtacggcaactggaagacttgcaagtgcagagcccaatctgcaaaatattcctgtaaaatatgatgagggaaagctaataagaaaggcatttgttccagatgaaggttatgtgttgatagatgctgattattctcagattgagcttagaatacttgcacatatctctgaggatgaacgactgataaatgcttttaaaaataaccttgatattcattcacagacggcggcagagatctttggtgtggatataagtcaggttacaccaattatgcgaagccaggcaaaagcagttaactttggaattgtatatggtatatctgattatggactttcacgggatataaagatttcaagaaaagaagcagccgagtttattaatcgttattttgaaaagtatcccagagtaaaagaatatttggacaatgtcgtcaagtttgcccgtgaaaacggatttgttttgacaatatttaacaggaaaaggtatatcaaggatataaagtctactaataaaaacctgagaaactatgcagaggaaatagcaatgaattcacctatccagggaagtgctgcagatattatgaaaatagcaatgataagagtttataaaaagctaaaagaaaacaatttaaaatcaagaattattctgcaggtccatgacgaacttttgattgaatcaccctatgaagagaaagagatagtaaaggaaatagtaaaatcggagatggaaaatgcggttttattgaaagttcctttggtagttgaagtgaaagaaggttcaaattggtatgaaacaaagtaaaggatcc

SEQ ID NO: 1810 - DNA, 2623 bp, Artificial Sequence
  Description of Artificial Sequence: Synthetic DNA sequence of Caldicellulosiruptor TOK13B DNA Polymerase R784Q
atgaaatacctgctgccgaccgctgctgctggtctgctgctcctcgctgcccagccggcgatggccatggaatttgttatttttgatgggaatagtattctgtatagagctttttttgccttgccacagcttactacctcaacaggcatacctacaaatgctatatatggttttttgaatgtgctgttaaaatacttagattctgaaaaaccggattatgtagcagtagcttttgacaaaaaaggcagagctgtccgaaaaagtgaatatgaagaatacaaggctaacagaaaaccgatgccagattctcttcaggttcagataccttacgtaagagaaatacttgctgctctgaacattcctgtactgaaatgtgaagggtatgaagctgatgacgttataggcacacttgtaaatagatttaaagcccaggatttagagattgtgataataaccggagacagagatacacttcagttacttgataaaaatgtaattgtcaaaatagtcacaacaaggtttgacaggacaactgaagatttgtatgctgtagaaaatgtaaaagaaaaatatggtgtttttgcgcatcaggttgttgactataaagcattagtaggtgatgcgtcagacaatataccaggtgttaagggaattggagataaaactgccataaagctgttagaagagtaccagactctggagaatatatatcagaatctaaataacattaaaggagcgctaaaagagaagttggaatcaggaaaagacatggcatttttatcaaaaagactggctactatcatatgcgatttaccaattgaggtgaatcttgaagaattaaaaaccaaagaatgggacaaagaaagactttatcagattttacttcaacttgagtttaaaagctttattaaaagactgggcttttcagaagagattaactatgcaaggcagaactttcagctacctgaatttagtattaaagaacttcgtgatgtttcagcaatagggggcaaagaaatctatctattgtactcagatgaagaaggacttttttatatttatgaccatcaaacctcaaccatttttacaacttctgataaggaagctattaaagatcttttaacactccaaagcattcaaaaggttgtatatgatttaaaaaatatactccataaggtggactttgatgaagctaatcagataaaaaattgtaatgatgttatgttggcttcatatgttttggacagtacacgcagttcgtacgatttggaaacattgtttatttcttatctcaacactgatatagctgcaatcaaagagaatagatgggctggtgctacagttttattaagaaatctttgggatgaactttcaaaactcattgatttaaactcggcccaatacgtttatgagagcatagagatgcctcttgttcccattttatatgaaatggagaaaatcggttttaaggttgacaaaaacactttgcaggagtatacaaaagagattgagagcaagcttttaaagttggaatcacagatttatcaaatagccggtgaatggtttaacataaactcgccaaaacaactctcatatatattattcgaaaaactgaagcttccggttgttaaaaagaccaaaacaggatattcaacagatgccgaggtattagaagagctgtatgataaacatgacataataccgcttattctggattatagaatgtatacgaaaatactgacaacttactgtcagggactggttcaggcaataaatcctgcaactggaagaattcataccaactttattcagacaggtacggcaactggaagacttgcaagtgcagagcccaatctgcaaaatattcctgtaaaatatgatgagggaaagctaataagaaaggcatttgttccagatgaaggttatgtgttgatagatgctgattattctcagattgagcttagaatacttgcacatatctctgaggatgaacgactgataaatgcttttaaaaataaccttgatattcattcacagacggcggcagagatctttggtgtggatataagtcaggttacaccaattatgcgaagccaggcaaaagcagttaactttggaattgtatatggtatatctgattatggactttcacgggatataaagatttcaagaaaagaagcagccgagtttattaatcgttattttgaaaagtatcccagagtaaaagaatatttggacaatgtcgtcaagtttgcccgtgaaaacggatttgttttgacaatatttaacaggaaaaggtatatcaaggatataaagtctactaataaaaacctgagaaactatgcagagcaaatagcaatgaattcacctatccagggaagtgctgcagatattatgaaaatagcaatgataagagtttataaaaagctaaaagaaaacaatttaaaatcaagaattattctgcaggtccatgacgaacttttgattgaatcaccctatgaagagaaagagatagtaaaggaaatagtaaaatcggagatggaaaatgcggttttattgaaagttcctttggtagttgaagtgaaagaaggttcaaattggtatgaaacaaagtaaaggatcc

SEQ ID NO: 1811 - DNA, 2623 bp, Artificial Sequence
  Description of Artificial Sequence: Synthetic DNA sequence of Caldicellulosiruptor TOK13B DNA Polymerase R784G
atgaaatacctgctgccgaccgctgctgctggtctgctgctcctcgctgcccagccggcgatggccatggaatttgttatttttgatgggaatagtattctgtatagagctttttttgccttgccacagcttactacctcaacaggcatacctacaaatgctatatatggttttttgaatgtgctgttaaaatacttagattctgaaaaaccggattatgtagcagtagcttttgacaaaaaaggcagagctgtccgaaaaagtgaatatgaagaatacaaggctaacagaaaaccgatgccagattctcttcaggttcagataccttacgtaagagaaatacttgctgctctgaacattcctgtactgaaatgtgaagggtatgaagctgatgacgttataggcacacttgtaaatagatttaaagcccaggatttagagattgtgataataaccggagacagagatacacttcagttacttgataaaaatgtaattgtcaaaatagtcacaacaaggtttgacaggacaactgaagatttgtatgctgtagaaaatgtaaaagaaaaatatggtgtttttgcgcatcaggttgttgactataaagcattagtaggtgatgcgtcagacaatataccaggtgttaagggaattggagataaaactgccataaagctgttagaagagtaccagactctggagaatatatatcagaatctaaataacattaaaggagcgctaaaagagaagttggaatcaggaaaagacatggcatttttatcaaaaagactggctactatcatatgcgatttaccaattgaggtgaatcttgaagaattaaaaaccaaagaatgggacaaagaaagactttatcagattttacttcaacttgagtttaaaagctttattaaaagactgggcttttcagaagagattaactatgcaaggcagaactttcagctacctgaatttagtattaaagaacttcgtgatgtttcagcaatagggggcaaagaaatctatctattgtactcagatgaagaaggacttttttatatttatgaccatcaaacctcaaccatttttacaacttctgataaggaagctattaaagatcttttaacactccaaagcattcaaaaggttgtatatgatttaaaaaatatactccataaggtggactttgatgaagctaatcagataaaaaattgtaatgatgttatgttggcttcatatgttttggacagtacacgcagttcgtacgatttggaaacattgtttatttcttatctcaacactgatatagctgcaatcaaagagaatagatgggctggtgctacagttttattaagaaatctttgggatgaactttcaaaactcattgatttaaactcggcccaatacgtttatgagagcatagagatgcctcttgttcccattttatatgaaatggagaaaatcggttttaaggttgacaaaaacactttgcaggagtatacaaaagagattgagagcaagcttttaaagttggaatcacagatttatcaaatagccggtgaatggtttaacataaactcgccaaaacaactctcatatatattattcgaaaaactgaagcttccggttgttaaaaagaccaaaacaggatattcaacagatgccgaggtattagaagagctgtatgataaacatgacataataccgcttattctggattatagaatgtatacgaaaatactgacaacttactgtcagggactggttcaggcaataaatcctgcaactggaagaattcataccaactttattcagacaggtacggcaactggaagacttgcaagtgcagagcccaatctgcaaaatattcctgtaaaatatgatgagggaaagctaataagaaaggcatttgttccagatgaaggttatgtgttgatagatgctgattattctcagattgagcttagaatacttgcacatatctctgaggatgaacgactgataaatgcttttaaaaataaccttgatattcattcacagacggcggcagagatctttggtgtggatataagtcaggttacaccaattatgcgaagccaggcaaaagcagttaactttggaattgtatatggtatatctgattatggactttcacgggatataaagatttcaagaaaagaagcagccgagtttattaatcgttattttgaaaagtatcccagagtaaaagaatatttggacaatgtcgtcaagtttgcccgtgaaaacggatttgttttgacaatatttaacaggaaaaggtatatcaaggatataaagtctactaataaaaacctgagaaactatgcagagggtatagcaatgaattcacctatccagggaagtgctgcagatattatgaaaatagcaatgataagagtttataaaaagctaaaagaaaacaatttaaaatcaagaattattctgcaggtccatgacgaacttttgattgaatcaccctatgaagagaaagagatagtaaaggaaatagtaaaatcggagatggaaaatgcggttttattgaaagttcctttggtagttgaagtgaaagaaggttcaaattggtatgaaacaaagtaaaggatcc

SEQ ID NO: 1812 - DNA, 2623 bp, Artificial Sequence
  Description of Artificial Sequence: Synthetic DNA sequence of Caldicellulosiruptor TOK13B DNA Polymerase R784H
atgaaatacctgctgccgaccgctgctgctggtctgctgctcctcgctgcccagccggcgatggccatggaatttgttatttttgatgggaatagtattctgtatagagctttttttgccttgccacagcttactacctcaacaggcatacctacaaatgctatatatggttttttgaatgtgctgttaaaatacttagattctgaaaaaccggattatgtagcagtagcttttgacaaaaaaggcagagctgtccgaaaaagtgaatatgaagaatacaaggctaacagaaaaccgatgccagattctcttcaggttcagataccttacgtaagagaaatacttgctgctctgaacattcctgtactgaaatgtgaagggtatgaagctgatgacgttataggcacacttgtaaatagatttaaagcccaggatttagagattgtgataataaccggagacagagatacacttcagttacttgataaaaatgtaattgtcaaaatagtcacaacaaggtttgacaggacaactgaagatttgtatgctgtagaaaatgtaaaagaaaaatatggtgtttttgcgcatcaggttgttgactataaagcattagtaggtgatgcgtcagacaatataccaggtgttaagggaattggagataaaactgccataaagctgttagaagagtaccagactctggagaatatatatcagaatctaaataacattaaaggagcgctaaaagagaagttggaatcaggaaaagacatggcatttttatcaaaaagactggctactatcatatgcgatttaccaattgaggtgaatcttgaagaattaaaaaccaaagaatgggacaaagaaagactttatcagattttacttcaacttgagtttaaaagctttattaaaagactgggcttttcagaagagattaactatgcaaggcagaactttcagctacctgaatttagtattaaagaacttcgtgatgtttcagcaatagggggcaaagaaatctatctattgtactcagatgaagaaggacttttttatatttatgaccatcaaacctcaaccatttttacaacttctgataaggaagctattaaagatcttttaacactccaaagcattcaaaaggttgtatatgatttaaaaaatatactccataaggtggactttgatgaagctaatcagataaaaaattgtaatgatgttatgttggcttcatatgttttggacagtacacgcagttcgtacgatttggaaacattgtttatttcttatctcaacactgatatagctgcaatcaaagagaatagatgggctggtgctacagttttattaagaaatctttgggatgaactttcaaaactcattgatttaaactcggcccaatacgtttatgagagcatagagatgcctcttgttcccattttatatgaaatggagaaaatcggttttaaggttgacaaaaacactttgcaggagtatacaaaagagattgagagcaagcttttaaagttggaatcacagatttatcaaatagccggtgaatggtttaacataaactcgccaaaacaactctcatatatattattcgaaaaactgaagcttccggttgttaaaaagaccaaaacaggatattcaacagatgccgaggtattagaagagctgtatgataaacatgacataataccgcttattctggattatagaatgtatacgaaaatactgacaacttactgtcagggactggttcaggcaataaatcctgcaactggaagaattcataccaactttattcagacaggtacggcaactggaagacttgcaagtgcagagcccaatctgcaaaatattcctgtaaaatatgatgagggaaagctaataagaaaggcatttgttccagatgaaggttatgtgttgatagatgctgattattctcagattgagcttagaatacttgcacatatctctgaggatgaacgactgataaatgcttttaaaaataaccttgatattcattcacagacggcggcagagatctttggtgtggatataagtcaggttacaccaattatgcgaagccaggcaaaagcagttaactttggaattgtatatggtatatctgattatggactttcacgggatataaagatttcaagaaaagaagcagccgagtttattaatcgttattttgaaaagtatcccagagtaaaagaatatttggacaatgtcgtcaagtttgcccgtgaaaacggatttgttttgacaatatttaacaggaaaaggtatatcaaggatataaagtctactaataaaaacctgagaaactatgcagagcatatagcaatgaattcacctatccagggaagtgctgcagatattatgaaaatagcaatgataagagtttataaaaagctaaaagaaaacaatttaaaatcaagaattattctgcaggtccatgacgaacttttgattgaatcaccctatgaagagaaagagatagtaaaggaaatagtaaaatcggagatggaaaatgcggttttattgaaagttcctttggtagttgaagtgaaagaaggttcaaattggtatgaaacaaagtaaaggatcc

SEQ ID NO: 1813 - DNA, 2623 bp, Artificial Sequence
  Description of Artificial Sequence: Synthetic DNA sequence of Caldicellulosiruptor TOK13B DNA Polymerase R784I
atgaaatacctgctgccgaccgctgctgctggtctgctgctcctcgctgcccagccggcgatggccatggaatttgttatttttgatgggaatagtattctgtatagagctttttttgccttgccacagcttactacctcaacaggcatacctacaaatgctatatatggttttttgaatgtgctgttaaaatacttagattctgaaaaaccggattatgtagcagtagcttttgacaaaaaaggcagagctgtccgaaaaagtgaatatgaagaatacaaggctaacagaaaaccgatgccagattctcttcaggttcagataccttacgtaagagaaatacttgctgctctgaacattcctgtactgaaatgtgaagggtatgaagctgatgacgttataggcacacttgtaaatagatttaaagcccaggatttagagattgtgataataaccggagacagagatacacttcagttacttgataaaaatgtaattgtcaaaatagtcacaacaaggtttgacaggacaactgaagatttgtatgctgtagaaaatgtaaaagaaaaatatggtgtttttgcgcatcaggttgttgactataaagcattagtaggtgatgcgtcagacaatataccaggtgttaagggaattggagataaaactgccataaagctgttagaagagtaccagactctggagaatatatatcagaatctaaataacattaaaggagcgctaaaagagaagttggaatcaggaaaagacatggcatttttatcaaaaagactggctactatcatatgcgatttaccaattgaggtgaatcttgaagaattaaaaaccaaagaatgggacaaagaaagactttatcagattttacttcaacttgagtttaaaagctttattaaaagactgggcttttcagaagagattaactatgcaaggcagaactttcagctacctgaatttagtattaaagaacttcgtgatgtttcagcaatagggggcaaagaaatctatctattgtactcagatgaagaaggacttttttatatttatgaccatcaaacctcaaccatttttacaacttctgataaggaagctattaaagatcttttaacactccaaagcattcaaaaggttgtatatgatttaaaaaatatactccataaggtggactttgatgaagctaatcagataaaaaattgtaatgatgttatgttggcttcatatgttttggacagtacacgcagttcgtacgatttggaaacattgtttatttcttatctcaacactgatatagctgcaatcaaagagaatagatgggctggtgctacagttttattaagaaatctttgggatgaactttcaaaactcattgatttaaactcggcccaatacgtttatgagagcatagagatgcctcttgttcccattttatatgaaatggagaaaatcggttttaaggttgacaaaaacactttgcaggagtatacaaaagagattgagagcaagcttttaaagttggaatcacagatttatcaaatagccggtgaatggtttaacataaactcgccaaaacaactctcatatatattattcgaaaaactgaagcttccggttgttaaaaagaccaaaacaggatattcaacagatgccgaggtattagaagagctgtatgataaacatgacataataccgcttattctggattatagaatgtatacgaaaatactgacaacttactgtcagggactggttcaggcaataaatcctgcaactggaagaattcataccaactttattcagacaggtacggcaactggaagacttgcaagtgcagagcccaatctgcaaaatattcctgtaaaatatgatgagggaaagctaataagaaaggcatttgttccagatgaaggttatgtgttgatagatgctgattattctcagattgagcttagaatacttgcacatatctctgaggatgaacgactgataaatgcttttaaaaataaccttgatattcattcacagacggcggcagagatctttggtgtggatataagtcaggttacaccaattatgcgaagccaggcaaaagcagttaactttggaattgtatatggtatatctgattatggactttcacgggatataaagatttcaagaaaagaagcagccgagtttattaatcgttattttgaaaagtatcccagagtaaaagaatatttggacaatgtcgtcaagtttgcccgtgaaaacggatttgttttgacaatatttaacaggaaaaggtatatcaaggatataaagtctactaataaaaacctgagaaactatgcagagattatagcaatgaattcacctatccagggaagtgctgcagatattatgaaaatagcaatgataagagtttataaaaagctaaaagaaaacaatttaaaatcaagaattattctgcaggtccatgacgaacttttgattgaatcaccctatgaagagaaagagatagtaaaggaaatagtaaaatcggagatggaaaatgcggttttattgaaagttcctttggtagttgaagtgaaagaaggttcaaattggtatgaaacaaagtaaaggatcc

SEQ ID NO: 1814 - DNA, 2623 bp, Artificial Sequence
  Description of Artificial Sequence: Synthetic DNA sequence of Caldicellulosiruptor TOK13B DNA Polymerase R784L
atgaaatacctgctgccgaccgctgctgctggtctgctgctcctcgctgcccagccggcgatggccatggaatttgttatttttgatgggaatagtattctgtatagagctttttttgccttgccacagcttactacctcaacaggcatacctacaaatgctatatatggttttttgaatgtgctgttaaaatacttagattctgaaaaaccggattatgtagcagtagcttttgacaaaaaaggcagagctgtccgaaaaagtgaatatgaagaatacaaggctaacagaaaaccgatgccagattctcttcaggttcagataccttacgtaagagaaatacttgctgctctgaacattcctgtactgaaatgtgaagggtatgaagctgatgacgttataggcacacttgtaaatagatttaaagcccaggatttagagattgtgataataaccggagacagagatacacttcagttacttgataaaaatgtaattgtcaaaatagtcacaacaaggtttgacaggacaactgaagatttgtatgctgtagaaaatgtaaaagaaaaatatggtgtttttgcgcatcaggttgttgactataaagcattagtaggtgatgcgtcagacaatataccaggtgttaagggaattggagataaaactgccataaagctgttagaagagtaccagactctggagaatatatatcagaatctaaataacattaaaggagcgctaaaagagaagttggaatcaggaaaagacatggcatttttatcaaaaagactggctactatcatatgcgatttaccaattgaggtgaatcttgaagaattaaaaaccaaagaatgggacaaagaaagactttatcagattttacttcaacttgagtttaaaagctttattaaaagactgggcttttcagaagagattaactatgcaaggcagaactttcagctacctgaatttagtattaaagaacttcgtgatgtttcagcaatagggggcaaagaaatctatctattgtactcagatgaagaaggacttttttatatttatgaccatcaaacctcaaccatttttacaacttctgataaggaagctattaaagatcttttaacactccaaagcattcaaaaggttgtatatgatttaaaaaatatactccataaggtggactttgatgaagctaatcagataaaaaattgtaatgatgttatgttggcttcatatgttttggacagtacacgcagttcgtacgatttggaaacattgtttatttcttatctcaacactgatatagctgcaatcaaagagaatagatgggctggtgctacagttttattaagaaatctttgggatgaactttcaaaactcattgatttaaactcggcccaatacgtttatgagagcatagagatgcctcttgttcccattttatatgaaatggagaaaatcggttttaaggttgacaaaaacactttgcaggagtatacaaaagagattgagagcaagcttttaaagttggaatcacagatttatcaaatagccggtgaatggtttaacataaactcgccaaaacaactctcatatatattattcgaaaaactgaagcttccggttgttaaaaagaccaaaacaggatattcaacagatgccgaggtattagaagagctgtatgataaacatgacataataccgcttattctggattatagaatgtatacgaaaatactgacaacttactgtcagggactggttcaggcaataaatcctgcaactggaagaattcataccaactttattcagacaggtacggcaactggaagacttgcaagtgcagagcccaatctgcaaaatattcctgtaaaatatgatgagggaaagctaataagaaaggcatttgttccagatgaaggttatgtgttgatagatgctgattattctcagattgagcttagaatacttgcacatatctctgaggatgaacgactgataaatgcttttaaaaataaccttgatattcattcacagacggcggcagagatctttggtgtggatataagtcaggttacaccaattatgcgaagccaggcaaaagcagttaactttggaattgtatatggtatatctgattatggactttcacgggatataaagatttcaagaaaagaagcagccgagtttattaatcgttattttgaaaagtatcccagagtaaaagaatatttggacaatgtcgtcaagtttgcccgtgaaaacggatttgttttgacaatatttaacaggaaaaggtatatcaaggatataaagtctactaataaaaacctgagaaactatgcagagcttatagcaatgaattcacctatccagggaagtgctgcagatattatgaaaatagcaatgataagagtttataaaaagctaaaagaaaacaatttaaaatcaagaattattctgcaggtccatgacgaacttttgattgaatcaccctatgaagagaaagagatagtaaaggaaatagtaaaatcggagatggaaaatgcggttttattgaaagttcctttggtagttgaagtgaaagaaggttcaaattggtatgaaacaaagtaaaggatcc

SEQ ID NO: 1815 - DNA, 2623 bp, Artificial Sequence
  Description of Artificial Sequence: Synthetic DNA sequence of Caldicellulosiruptor TOK13B DNA Polymerase R784K
atgaaatacctgctgccgaccgctgctgctggtctgctgctcctcgctgcccagccggcgatggccatggaatttgttatttttgatgggaatagtattctgtatagagctttttttgccttgccacagcttactacctcaacaggcatacctacaaatgctatatatggttttttgaatgtgctgttaaaatacttagattctgaaaaaccggattatgtagcagtagcttttgacaaaaaaggcagagctgtccgaaaaagtgaatatgaagaatacaaggctaacagaaaaccgatgccagattctcttcaggttcagataccttacgtaagagaaatacttgctgctctgaacattcctgtactgaaatgtgaagggtatgaagctgatgacgttataggcacacttgtaaatagatttaaagcccaggatttagagattgtgataataaccggagacagagatacacttcagttacttgataaaaatgtaattgtcaaaatagtcacaacaaggtttgacaggacaactgaagatttgtatgctgtagaaaatgtaaaagaaaaatatggtgtttttgcgcatcaggttgttgactataaagcattagtaggtgatgcgtcagacaatataccaggtgttaagggaattggagataaaactgccataaagctgttagaagagtaccagactctggagaatatatatcagaatctaaataacattaaaggagcgctaaaagagaagttggaatcaggaaaagacatggcatttttatcaaaaagactggctactatcatatgcgatttaccaattgaggtgaatcttgaagaattaaaaaccaaagaatgggacaaagaaagactttatcagattttacttcaacttgagtttaaaagctttattaaaagactgggcttttcagaagagattaactatgcaaggcagaactttcagctacctgaatttagtattaaagaacttcgtgatgtttcagcaatagggggcaaagaaatctatctattgtactcagatgaagaaggacttttttatatttatgaccatcaaacctcaaccatttttacaacttctgataaggaagctattaaagatcttttaacactccaaagcattcaaaaggttgtatatgatttaaaaaatatactccataaggtggactttgatgaagctaatcagataaaaaattgtaatgatgttatgttggcttcatatgttttggacagtacacgcagttcgtacgatttggaaacattgtttatttcttatctcaacactgatatagctgcaatcaaagagaatagatgggctggtgctacagttttattaagaaatctttgggatgaactttcaaaactcattgatttaaactcggcccaatacgtttatgagagcatagagatgcctcttgttcccattttatatgaaatggagaaaatcggttttaaggttgacaaaaacactttgcaggagtatacaaaagagattgagagcaagcttttaaagttggaatcacagatttatcaaatagccggtgaatggtttaacataaactcgccaaaacaactctcatatatattattcgaaaaactgaagcttccggttgttaaaaagaccaaaacaggatattcaacagatgccgaggtattagaagagctgtatgataaacatgacataataccgcttattctggattatagaatgtatacgaaaatactgacaacttactgtcagggactggttcaggcaataaatcctgcaactggaagaattcataccaactttattcagacaggtacggcaactggaagacttgcaagtgcagagcccaatctgcaaaatattcctgtaaaatatgatgagggaaagctaataagaaaggcatttgttccagatgaaggttatgtgttgatagatgctgattattctcagattgagcttagaatacttgcacatatctctgaggatgaacgactgataaatgcttttaaaaataaccttgatattcattcacagacggcggcagagatctttggtgtggatataagtcaggttacaccaattatgcgaagccaggcaaaagcagttaactttggaattgtatatggtatatctgattatggactttcacgggatataaagatttcaagaaaagaagcagccgagtttattaatcgttattttgaaaagtatcccagagtaaaagaatatttggacaatgtcgtcaagtttgcccgtgaaaacggatttgttttgacaatatttaacaggaaaaggtatatcaaggatataaagtctactaataaaaacctgagaaactatgcagagaaaatagcaatgaattcacctatccagggaagtgctgcagatattatgaaaatagcaatgataagagtttataaaaagctaaaagaaaacaatttaaaatcaagaattattctgcaggtccatgacgaacttttgattgaatcaccctatgaagagaaagagatagtaaaggaaatagtaaaatcggagatggaaaatgcggttttattgaaagttcctttggtagttgaagtgaaagaaggttcaaattggtatgaaacaaagtaaaggatcc

SEQ ID NO: 1816 - DNA, 2623 bp, Artificial Sequence
  Description of Artificial Sequence: Synthetic DNA sequence of Caldicellulosiruptor TOK13B DNA Polymerase R784M
atgaaatacctgctgccgaccgctgctgctggtctgctgctcctcgctgcccagccggcgatggccatggaatttgttatttttgatgggaatagtattctgtatagagctttttttgccttgccacagcttactacctcaacaggcatacctacaaatgctatatatggttttttgaatgtgctgttaaaatacttagattctgaaaaaccggattatgtagcagtagcttttgacaaaaaaggcagagctgtccgaaaaagtgaatatgaagaatacaaggctaacagaaaaccgatgccagattctcttcaggttcagataccttacgtaagagaaatacttgctgctctgaacattcctgtactgaaatgtgaagggtatgaagctgatgacgttataggcacacttgtaaatagatttaaagcccaggatttagagattgtgataataaccggagacagagatacacttcagttacttgataaaaatgtaattgtcaaaatagtcacaacaaggtttgacaggacaactgaagatttgtatgctgtagaaaatgtaaaagaaaaatatggtgtttttgcgcatcaggttgttgactataaagcattagtaggtgatgcgtcagacaatataccaggtgttaagggaattggagataaaactgccataaagctgttagaagagtaccagactctggagaatatatatcagaatctaaataacattaaaggagcgctaaaagagaagttggaatcaggaaaagacatggcatttttatcaaaaagactggctactatcatatgcgatttaccaattgaggtgaatcttgaagaattaaaaaccaaagaatgggacaaagaaagactttatcagattttacttcaacttgagtttaaaagctttattaaaagactgggcttttcagaagagattaactatgcaaggcagaactttcagctacctgaatttagtattaaagaacttcgtgatgtttcagcaatagggggcaaagaaatctatctattgtactcagatgaagaaggacttttttatatttatgaccatcaaacctcaaccatttttacaacttctgataaggaagctattaaagatcttttaacactccaaagcattcaaaaggttgtatatgatttaaaaaatatactccataaggtggactttgatgaagctaatcagataaaaaattgtaatgatgttatgttggcttcatatgttttggacagtacacgcagttcgtacgatttggaaacattgtttatttcttatctcaacactgatatagctgcaatcaaagagaatagatgggctggtgctacagttttattaagaaatctttgggatgaactttcaaaactcattgatttaaactcggcccaatacgtttatgagagcatagagatgcctcttgttcccattttatatgaaatggagaaaatcggttttaaggttgacaaaaacactttgcaggagtatacaaaagagattgagagcaagcttttaaagttggaatcacagatttatcaaatagccggtgaatggtttaacataaactcgccaaaacaactctcatatatattattcgaaaaactgaagcttccggttgttaaaaagaccaaaacaggatattcaacagatgccgaggtattagaagagctgtatgataaacatgacataataccgcttattctggattatagaatgtatacgaaaatactgacaacttactgtcagggactggttcaggcaataaatcctgcaactggaagaattcataccaactttattcagacaggtacggcaactggaagacttgcaagtgcagagcccaatctgcaaaatattcctgtaaaatatgatgagggaaagctaataagaaaggcatttgttccagatgaaggttatgtgttgatagatgctgattattctcagattgagcttagaatacttgcacatatctctgaggatgaacgactgataaatgcttttaaaaataaccttgatattcattcacagacggcggcagagatctttggtgtggatataagtcaggttacaccaattatgcgaagccaggcaaaagcagttaactttggaattgtatatggtatatctgattatggactttcacgggatataaagatttcaagaaaagaagcagccgagtttattaatcgttattttgaaaagtatcccagagtaaaagaatatttggacaatgtcgtcaagtttgcccgtgaaaacggatttgttttgacaatatttaacaggaaaaggtatatcaaggatataaagtctactaataaaaacctgagaaactatgcagagatgatagcaatgaattcacctatccagggaagtgctgcagatattatgaaaatagcaatgataagagtttataaaaagctaaaagaaaacaatttaaaatcaagaattattctgcaggtccatgacgaacttttgattgaatcaccctatgaagagaaagagatagtaaaggaaatagtaaaatcggagatggaaaatgcggttttattgaaagttcctttggtagttgaagtgaaagaaggttcaaattggtatgaaacaaagtaaaggatcc

SEQ ID NO: 1817 - DNA, 2623 bp, Artificial Sequence
  Description of Artificial Sequence: Synthetic DNA sequence of Caldicellulosiruptor TOK13B DNA Polymerase R784F
atgaaatacctgctgccgaccgctgctgctggtctgctgctcctcgctgcccagccggcgatggccatggaatttgttatttttgatgggaatagtattctgtatagagctttttttgccttgccacagcttactacctcaacaggcatacctacaaatgctatatatggttttttgaatgtgctgttaaaatacttagattctgaaaaaccggattatgtagcagtagcttttgacaaaaaaggcagagctgtccgaaaaagtgaatatgaagaatacaaggctaacagaaaaccgatgccagattctcttcaggttcagataccttacgtaagagaaatacttgctgctctgaacattcctgtactgaaatgtgaagggtatgaagctgatgacgttataggcacacttgtaaatagatttaaagcccaggatttagagattgtgataataaccggagacagagatacacttcagttacttgataaaaatgtaattgtcaaaatagtcacaacaaggtttgacaggacaactgaagatttgtatgctgtagaaaatgtaaaagaaaaatatggtgtttttgcgcatcaggttgttgactataaagcattagtaggtgatgcgtcagacaatataccaggtgttaagggaattggagataaaactgccataaagctgttagaagagtaccagactctggagaatatatatcagaatctaaataacattaaaggagcgctaaaagagaagttggaatcaggaaaagacatggcatttttatcaaaaagactggctactatcatatgcgatttaccaattgaggtgaatcttgaagaattaaaaaccaaagaatgggacaaagaaagactttatcagattttacttcaacttgagtttaaaagctttattaaaagactgggcttttcagaagagattaactatgcaaggcagaactttcagctacctgaatttagtattaaagaacttcgtgatgtttcagcaatagggggcaaagaaatctatctattgtactcagatgaagaaggacttttttatatttatgaccatcaaacctcaaccatttttacaacttctgataaggaagctattaaagatcttttaacactccaaagcattcaaaaggttgtatatgatttaaaaaatatactccataaggtggactttgatgaagctaatcagataaaaaattgtaatgatgttatgttggcttcatatgttttggacagtacacgcagttcgtacgatttggaaacattgtttatttcttatctcaacactgatatagctgcaatcaaagagaatagatgggctggtgctacagttttattaagaaatctttgggatgaactttcaaaactcattgatttaaactcggcccaatacgtttatgagagcatagagatgcctcttgttcccattttatatgaaatggagaaaatcggttttaaggttgacaaaaacactttgcaggagtatacaaaagagattgagagcaagcttttaaagttggaatcacagatttatcaaatagccggtgaatggtttaacataaactcgccaaaacaactctcatatatattattcgaaaaactgaagcttccggttgttaaaaagaccaaaacaggatattcaacagatgccgaggtattagaagagctgtatgataaacatgacataataccgcttattctggattatagaatgtatacgaaaatactgacaacttactgtcagggactggttcaggcaataaatcctgcaactggaagaattcataccaactttattcagacaggtacggcaactggaagacttgcaagtgcagagcccaatctgcaaaatattcctgtaaaatatgatgagggaaagctaataagaaaggcatttgttccagatgaaggttatgtgttgatagatgctgattattctcagattgagcttagaatacttgcacatatctctgaggatgaacgactgataaatgcttttaaaaataaccttgatattcattcacagacggcggcagagatctttggtgtggatataagtcaggttacaccaattatgcgaagccaggcaaaagcagttaactttggaattgtatatggtatatctgattatggactttcacgggatataaagatttcaagaaaagaagcagccgagtttattaatcgttattttgaaaagtatcccagagtaaaagaatatttggacaatgtcgtcaagtttgcccgtgaaaacggatttgttttgacaatatttaacaggaaaaggtatatcaaggatataaagtctactaataaaaacctgagaaactatgcagagtttatagcaatgaattcacctatccagggaagtgctgcagatattatgaaaatagcaatgataagagtttataaaaagctaaaagaaaacaatttaaaatcaagaattattctgcaggtccatgacgaacttttgattgaatcaccctatgaagagaaagagatagtaaaggaaatagtaaaatcggagatggaaaatgcggttttattgaaagttcctttggtagttgaagtgaaagaaggttcaaattggtatgaaacaaagtaaaggatcc

SEQ ID NO: 1818 - DNA, 2623 bp, Artificial Sequence
  Description of Artificial Sequence: Synthetic DNA sequence of Caldicellulosiruptor TOK13B DNA Polymerase R784P
atgaaatacctgctgccgaccgctgctgctggtctgctgctcctcgctgcccagccggcgatggccatggaatttgttatttttgatgggaatagtattctgtatagagctttttttgccttgccacagcttactacctcaacaggcatacctacaaatgctatatatggttttttgaatgtgctgttaaaatacttagattctgaaaaaccggattatgtagcagtagcttttgacaaaaaaggcagagctgtccgaaaaagtgaatatgaagaatacaaggctaacagaaaaccgatgccagattctcttcaggttcagataccttacgtaagagaaatacttgctgctctgaacattcctgtactgaaatgtgaagggtatgaagctgatgacgttataggcacacttgtaaatagatttaaagcccaggatttagagattgtgataataaccggagacagagatacacttcagttacttgataaaaatgtaattgtcaaaatagtcacaacaaggtttgacaggacaactgaagatttgtatgctgtagaaaatgtaaaagaaaaatatggtgtttttgcgcatcaggttgttgactataaagcattagtaggtgatgcgtcagacaatataccaggtgttaagggaattggagataaaactgccataaagctgttagaagagtaccagactctggagaatatatatcagaatctaaataacattaaaggagcgctaaaagagaagttggaatcaggaaaagacatggcatttttatcaaaaagactggctactatcatatgcgatttaccaattgaggtgaatcttgaagaattaaaaaccaaagaatgggacaaagaaagactttatcagattttacttcaacttgagtttaaaagctttattaaaagactgggcttttcagaagagattaactatgcaaggcagaactttcagctacctgaatttagtattaaagaacttcgtgatgtttcagcaatagggggcaaagaaatctatctattgtactcagatgaagaaggacttttttatatttatgaccatcaaacctcaaccatttttacaacttctgataaggaagctattaaagatcttttaacactccaaagcattcaaaaggttgtatatgatttaaaaaatatactccataaggtggactttgatgaagctaatcagataaaaaattgtaatgatgttatgttggcttcatatgttttggacagtacacgcagttcgtacgatttggaaacattgtttatttcttatctcaacactgatatagctgcaatcaaagagaatagatgggctggtgctacagttttattaagaaatctttgggatgaactttcaaaactcattgatttaaactcggcccaatacgtttatgagagcatagagatgcctcttgttcccattttatatgaaatggagaaaatcggttttaaggttgacaaaaacactttgcaggagtatacaaaagagattgagagcaagcttttaaagttggaatcacagatttatcaaatagccggtgaatggtttaacataaactcgccaaaacaactctcatatatattattcgaaaaactgaagcttccggttgttaaaaagaccaaaacaggatattcaacagatgccgaggtattagaagagctgtatgataaacatgacataataccgcttattctggattatagaatgtatacgaaaatactgacaacttactgtcagggactggttcaggcaataaatcctgcaactggaagaattcataccaactttattcagacaggtacggcaactggaagacttgcaagtgcagagcccaatctgcaaaatattcctgtaaaatatgatgagggaaagctaataagaaaggcatttgttccagatgaaggttatgtgttgatagatgctgattattctcagattgagcttagaatacttgcacatatctctgaggatgaacgactgataaatgcttttaaaaataaccttgatattcattcacagacggcggcagagatctttggtgtggatataagtcaggttacaccaattatgcgaagccaggcaaaagcagttaactttggaattgtatatggtatatctgattatggactttcacgggatataaagatttcaagaaaagaagcagccgagtttattaatcgttattttgaaaagtatcccagagtaaaagaatatttggacaatgtcgtcaagtttgcccgtgaaaacggatttgttttgacaatatttaacaggaaaaggtatatcaaggatataaagtctactaataaaaacctgagaaactatgcagagcctatagcaatgaattcacctatccagggaagtgctgcagatattatgaaaatagcaatgataagagtttataaaaagctaaaagaaaacaatttaaaatcaagaattattctgcaggtccatgacgaacttttgattgaatcaccctatgaagagaaagagatagtaaaggaaatagtaaaatcggagatggaaaatgcggttttattgaaagttcctttggtagttgaagtgaaagaaggttcaaattggtatgaaacaaagtaaaggatcc

SEQ ID NO: 1819 - DNA, 2623 bp, Artificial Sequence
  Description of Artificial Sequence: Synthetic DNA sequence of Caldicellulosiruptor TOK13B DNA Polymerase R784S
atgaaatacctgctgccgaccgctgctgctggtctgctgctcctcgctgcccagccggcgatggccatggaatttgttatttttgatgggaatagtattctgtatagagctttttttgccttgccacagcttactacctcaacaggcatacctacaaatgctatatatggttttttgaatgtgctgttaaaatacttagattctgaaaaaccggattatgtagcagtagcttttgacaaaaaaggcagagctgtccgaaaaagtgaatatgaagaatacaaggctaacagaaaaccgatgccagattctcttcaggttcagataccttacgtaagagaaatacttgctgctctgaacattcctgtactgaaatgtgaagggtatgaagctgatgacgttataggcacacttgtaaatagatttaaagcccaggatttagagattgtgataataaccggagacagagatacacttcagttacttgataaaaatgtaattgtcaaaatagtcacaacaaggtttgacaggacaactgaagatttgtatgctgtagaaaatgtaaaagaaaaatatggtgtttttgcgcatcaggttgttgactataaagcattagtaggtgatgcgtcagacaatataccaggtgttaagggaattggagataaaactgccataaagctgttagaagagtaccagactctggagaatatatatcagaatctaaataacattaaaggagcgctaaaagagaagttggaatcaggaaaagacatggcatttttatcaaaaagactggctactatcatatgcgatttaccaattgaggtgaatcttgaagaattaaaaaccaaagaatgggacaaagaaagactttatcagattttacttcaacttgagtttaaaagctttattaaaagactgggcttttcagaagagattaactatgcaaggcagaactttcagctacctgaatttagtattaaagaacttcgtgatgtttcagcaatagggggcaaagaaatctatctattgtactcagatgaagaaggacttttttatatttatgaccatcaaacctcaaccatttttacaacttctgataaggaagctattaaagatcttttaacactccaaagcattcaaaaggttgtatatgatttaaaaaatatactccataaggtggactttgatgaagctaatcagataaaaaattgtaatgatgttatgttggcttcatatgttttggacagtacacgcagttcgtacgatttggaaacattgtttatttcttatctcaacactgatatagctgcaatcaaagagaatagatgggctggtgctacagttttattaagaaatctttgggatgaactttcaaaactcattgatttaaactcggcccaatacgtttatgagagcatagagatgcctcttgttcccattttatatgaaatggagaaaatcggttttaaggttgacaaaaacactttgcaggagtatacaaaagagattgagagcaagcttttaaagttggaatcacagatttatcaaatagccggtgaatggtttaacataaactcgccaaaacaactctcatatatattattcgaaaaactgaagcttccggttgttaaaaagaccaaaacaggatattcaacagatgccgaggtattagaagagctgtatgataaacatgacataataccgcttattctggattatagaatgtatacgaaaatactgacaacttactgtcagggactggttcaggcaataaatcctgcaactggaagaattcataccaactttattcagacaggtacggcaactggaagacttgcaagtgcagagcccaatctgcaaaatattcctgtaaaatatgatgagggaaagctaataagaaaggcatttgttccagatgaaggttatgtgttgatagatgctgattattctcagattgagcttagaatacttgcacatatctctgaggatgaacgactgataaatgcttttaaaaataaccttgatattcattcacagacggcggcagagatctttggtgtggatataagtcaggttacaccaattatgcgaagccaggcaaaagcagttaactttggaattgtatatggtatatctgattatggactttcacgggatataaagatttcaagaaaagaagcagccgagtttattaatcgttattttgaaaagtatcccagagtaaaagaatatttggacaatgtcgtcaagtttgcccgtgaaaacggatttgttttgacaatatttaacaggaaaaggtatatcaaggatataaagtctactaataaaaacctgagaaactatgcagagtctatagcaatgaattcacctatccagggaagtgctgcagatattatgaaaatagcaatgataagagtttataaaaagctaaaagaaaacaatttaaaatcaagaattattctgcaggtccatgacgaacttttgattgaatcaccctatgaagagaaagagatagtaaaggaaatagtaaaatcggagatggaaaatgcggttttattgaaagttcctttggtagttgaagtgaaagaaggttcaaattggtatgaaacaaagtaaaggatcc

SEQ ID NO: 1820 - DNA, 2623 bp, Artificial Sequence
  Description of Artificial Sequence: Synthetic DNA sequence of Caldicellulosiruptor TOK13B DNA Polymerase R784T
atgaaatacctgctgccgaccgctgctgctggtctgctgctcctcgctgcccagccggcgatggccatggaatttgttatttttgatgggaatagtattctgtatagagctttttttgccttgccacagcttactacctcaacaggcatacctacaaatgctatatatggttttttgaatgtgctgttaaaatacttagattctgaaaaaccggattatgtagcagtagcttttgacaaaaaaggcagagctgtccgaaaaagtgaatatgaagaatacaaggctaacagaaaaccgatgccagattctcttcaggttcagataccttacgtaagagaaatacttgctgctctgaacattcctgtactgaaatgtgaagggtatgaagctgatgacgttataggcacacttgtaaatagatttaaagcccaggatttagagattgtgataataaccggagacagagatacacttcagttacttgataaaaatgtaattgtcaaaatagtcacaacaaggtttgacaggacaactgaagatttgtatgctgtagaaaatgtaaaagaaaaatatggtgtttttgcgcatcaggttgttgactataaagcattagtaggtgatgcgtcagacaatataccaggtgttaagggaattggagataaaactgccataaagctgttagaagagtaccagactctggagaatatatatcagaatctaaataacattaaaggagcgctaaaagagaagttggaatcaggaaaagacatggcatttttatcaaaaagactggctactatcatatgcgatttaccaattgaggtgaatcttgaagaattaaaaaccaaagaatgggacaaagaaagactttatcagattttacttcaacttgagtttaaaagctttattaaaagactgggcttttcagaagagattaactatgcaaggcagaactttcagctacctgaatttagtattaaagaacttcgtgatgtttcagcaatagggggcaaagaaatctatctattgtactcagatgaagaaggacttttttatatttatgaccatcaaacctcaaccatttttacaacttctgataaggaagctattaaagatcttttaacactccaaagcattcaaaaggttgtatatgatttaaaaaatatactccataaggtggactttgatgaagctaatcagataaaaaattgtaatgatgttatgttggcttcatatgttttggacagtacacgcagttcgtacgatttggaaacattgtttatttcttatctcaacactgatatagctgcaatcaaagagaatagatgggctggtgctacagttttattaagaaatctttgggatgaactttcaaaactcattgatttaaactcggcccaatacgtttatgagagcatagagatgcctcttgttcccattttatatgaaatggagaaaatcggttttaaggttgacaaaaacactttgcaggagtatacaaaagagattgagagcaagcttttaaagttggaatcacagatttatcaaatagccggtgaatggtttaacataaactcgccaaaacaactctcatatatattattcgaaaaactgaagcttccggttgttaaaaagaccaaaacaggatattcaacagatgccgaggtattagaagagctgtatgataaacatgacataataccgcttattctggattatagaatgtatacgaaaatactgacaacttactgtcagggactggttcaggcaataaatcctgcaactggaagaattcataccaactttattcagacaggtacggcaactggaagacttgcaagtgcagagcccaatctgcaaaatattcctgtaaaatatgatgagggaaagctaataagaaaggcatttgttccagatgaaggttatgtgttgatagatgctgattattctcagattgagcttagaatacttgcacatatctctgaggatgaacgactgataaatgcttttaaaaataaccttgatattcattcacagacggcggcagagatctttggtgtggatataagtcaggttacaccaattatgcgaagccaggcaaaagcagttaactttggaattgtatatggtatatctgattatggactttcacgggatataaagatttcaagaaaagaagcagccgagtttattaatcgttattttgaaaagtatcccagagtaaaagaatatttggacaatgtcgtcaagtttgcccgtgaaaacggatttgttttgacaatatttaacaggaaaaggtatatcaaggatataaagtctactaataaaaacctgagaaactatgcagagactatagcaatgaattcacctatccagggaagtgctgcagatattatgaaaatagcaatgataagagtttataaaaagctaaaagaaaacaatttaaaatcaagaattattctgcaggtccatgacgaacttttgattgaatcaccctatgaagagaaagagatagtaaaggaaatagtaaaatcggagatggaaaatgcggttttattgaaagttcctttggtagttgaagtgaaagaaggttcaaattggtatgaaacaaagtaaaggatcc

SEQ ID NO: 1821 - DNA, 2623 bp, Artificial Sequence
  Description of Artificial Sequence: Synthetic DNA sequence of Caldicellulosiruptor TOK13B DNA Polymerase R784W
atgaaatacctgctgccgaccgctgctgctggtctgctgctcctcgctgcccagccggcgatggccatggaatttgttatttttgatgggaatagtattctgtatagagctttttttgccttgccacagcttactacctcaacaggcatacctacaaatgctatatatggttttttgaatgtgctgttaaaatacttagattctgaaaaaccggattatgtagcagtagcttttgacaaaaaaggcagagctgtccgaaaaagtgaatatgaagaatacaaggctaacagaaaaccgatgccagattctcttcaggttcagataccttacgtaagagaaatacttgctgctctgaacattcctgtactgaaatgtgaagggtatgaagctgatgacgttataggcacacttgtaaatagatttaaagcccaggatttagagattgtgataataaccggagacagagatacacttcagttacttgataaaaatgtaattgtcaaaatagtcacaacaaggtttgacaggacaactgaagatttgtatgctgtagaaaatgtaaaagaaaaatatggtgtttttgcgcatcaggttgttgactataaagcattagtaggtgatgcgtcagacaatataccaggtgttaagggaattggagataaaactgccataaagctgttagaagagtaccagactctggagaatatatatcagaatctaaataacattaaaggagcgctaaaagagaagttggaatcaggaaaagacatggcatttttatcaaaaagactggctactatcatatgcgatttaccaattgaggtgaatcttgaagaattaaaaaccaaagaatgggacaaagaaagactttatcagattttacttcaacttgagtttaaaagctttattaaaagactgggcttttcagaagagattaactatgcaaggcagaactttcagctacctgaatttagtattaaagaacttcgtgatgtttcagcaatagggggcaaagaaatctatctattgtactcagatgaagaaggacttttttatatttatgaccatcaaacctcaaccatttttacaacttctgataaggaagctattaaagatcttttaacactccaaagcattcaaaaggttgtatatgatttaaaaaatatactccataaggtggactttgatgaagctaatcagataaaaaattgtaatgatgttatgttggcttcatatgttttggacagtacacgcagttcgtacgatttggaaacattgtttatttcttatctcaacactgatatagctgcaatcaaagagaatagatgggctggtgctacagttttattaagaaatctttgggatgaactttcaaaactcattgatttaaactcggcccaatacgtttatgagagcatagagatgcctcttgttcccattttatatgaaatggagaaaatcggttttaaggttgacaaaaacactttgcaggagtatacaaaagagattgagagcaagcttttaaagttggaatcacagatttatcaaatagccggtgaatggtttaacataaactcgccaaaacaactctcatatatattattcgaaaaactgaagcttccggttgttaaaaagaccaaaacaggatattcaacagatgccgaggtattagaagagctgtatgataaacatgacataataccgcttattctggattatagaatgtatacgaaaatactgacaacttactgtcagggactggttcaggcaataaatcctgcaactggaagaattcataccaactttattcagacaggtacggcaactggaagacttgcaagtgcagagcccaatctgcaaaatattcctgtaaaatatgatgagggaaagctaataagaaaggcatttgttccagatgaaggttatgtgttgatagatgctgattattctcagattgagcttagaatacttgcacatatctctgaggatgaacgactgataaatgcttttaaaaataaccttgatattcattcacagacggcggcagagatctttggtgtggatataagtcaggttacaccaattatgcgaagccaggcaaaagcagttaactttggaattgtatatggtatatctgattatggactttcacgggatataaagatttcaagaaaagaagcagccgagtttattaatcgttattttgaaaagtatcccagagtaaaagaatatttggacaatgtcgtcaagtttgcccgtgaaaacggatttgttttgacaatatttaacaggaaaaggtatatcaaggatataaagtctactaataaaaacctgagaaactatgcagagtggatagcaatgaattcacctatccagggaagtgctgcagatattatgaaaatagcaatgataagagtttataaaaagctaaaagaaaacaatttaaaatcaagaattattctgcaggtccatgacgaacttttgattgaatcaccctatgaagagaaagagatagtaaaggaaatagtaaaatcggagatggaaaatgcggttttattgaaagttcctttggtagttgaagtgaaagaaggttcaaattggtatgaaacaaagtaaaggatcc

SEQ ID NO: 1822 - DNA, 2623 bp, Artificial Sequence
  Description of Artificial Sequence: Synthetic DNA sequence of Caldicellulosiruptor TOK13B DNA Polymerase R784Y
atgaaatacctgctgccgaccgctgctgctggtctgctgctcctcgctgcccagccggcgatggccatggaatttgttatttttgatgggaatagtattctgtatagagctttttttgccttgccacagcttactacctcaacaggcatacctacaaatgctatatatggttttttgaatgtgctgttaaaatacttagattctgaaaaaccggattatgtagcagtagcttttgacaaaaaaggcagagctgtccgaaaaagtgaatatgaagaatacaaggctaacagaaaaccgatgccagattctcttcaggttcagataccttacgtaagagaaatacttgctgctctgaacattcctgtactgaaatgtgaagggtatgaagctgatgacgttataggcacacttgtaaatagatttaaagcccaggatttagagattgtgataataaccggagacagagatacacttcagttacttgataaaaatgtaattgtcaaaatagtcacaacaaggtttgacaggacaactgaagatttgtatgctgtagaaaatgtaaaagaaaaatatggtgtttttgcgcatcaggttgttgactataaagcattagtaggtgatgcgtcagacaatataccaggtgttaagggaattggagataaaactgccataaagctgttagaagagtaccagactctggagaatatatatcagaatctaaataacattaaaggagcgctaaaagagaagttggaatcaggaaaagacatggcatttttatcaaaaagactggctactatcatatgcgatttaccaattgaggtgaatcttgaagaattaaaaaccaaagaatgggacaaagaaagactttatcagattttacttcaacttgagtttaaaagctttattaaaagactgggcttttcagaagagattaactatgcaaggcagaactttcagctacctgaatttagtattaaagaacttcgtgatgtttcagcaatagggggcaaagaaatctatctattgtactcagatgaagaaggacttttttatatttatgaccatcaaacctcaaccatttttacaacttctgataaggaagctattaaagatcttttaacactccaaagcattcaaaaggttgtatatgatttaaaaaatatactccataaggtggactttgatgaagctaatcagataaaaaattgtaatgatgttatgttggcttcatatgttttggacagtacacgcagttcgtacgatttggaaacattgtttatttcttatctcaacactgatatagctgcaatcaaagagaatagatgggctggtgctacagttttattaagaaatctttgggatgaactttcaaaactcattgatttaaactcggcccaatacgtttatgagagcatagagatgcctcttgttcccattttatatgaaatggagaaaatcggttttaaggttgacaaaaacactttgcaggagtatacaaaagagattgagagcaagcttttaaagttggaatcacagatttatcaaatagccggtgaatggtttaacataaactcgccaaaacaactctcatatatattattcgaaaaactgaagcttccggttgttaaaaagaccaaaacaggatattcaacagatgccgaggtattagaagagctgtatgataaacatgacataataccgcttattctggattatagaatgtatacgaaaatactgacaacttactgtcagggactggttcaggcaataaatcctgcaactggaagaattcataccaactttattcagacaggtacggcaactggaagacttgcaagtgcagagcccaatctgcaaaatattcctgtaaaatatgatgagggaaagctaataagaaaggcatttgttccagatgaaggttatgtgttgatagatgctgattattctcagattgagcttagaatacttgcacatatctctgaggatgaacgactgataaatgcttttaaaaataaccttgatattcattcacagacggcggcagagatctttggtgtggatataagtcaggttacaccaattatgcgaagccaggcaaaagcagttaactttggaattgtatatggtatatctgattatggactttcacgggatataaagatttcaagaaaagaagcagccgagtttattaatcgttattttgaaaagtatcccagagtaaaagaatatttggacaatgtcgtcaagtttgcccgtgaaaacggatttgttttgacaatatttaacaggaaaaggtatatcaaggatataaagtctactaataaaaacctgagaaactatgcagagtatatagcaatgaattcacctatccagggaagtgctgcagatattatgaaaatagcaatgataagagtttataaaaagctaaaagaaaacaatttaaaatcaagaattattctgcaggtccatgacgaacttttgattgaatcaccctatgaagagaaagagatagtaaaggaaatagtaaaatcggagatggaaaatgcggttttattgaaagttcctttggtagttgaagtgaaagaaggttcaaattggtatgaaacaaagtaaaggatcc

SEQ ID NO: 1823 - DNA, 2623 bp, Artificial Sequence
  Description of Artificial Sequence: Synthetic DNA sequence of Caldicellulosiruptor TOK13B DNA Polymerase R784V
atgaaatacctgctgccgaccgctgctgctggtctgctgctcctcgctgcccagccggcgatggccatggaatttgttatttttgatgggaatagtattctgtatagagctttttttgccttgccacagcttactacctcaacaggcatacctacaaatgctatatatggttttttgaatgtgctgttaaaatacttagattctgaaaaaccggattatgtagcagtagcttttgacaaaaaaggcagagctgtccgaaaaagtgaatatgaagaatacaaggctaacagaaaaccgatgccagattctcttcaggttcagataccttacgtaagagaaatacttgctgctctgaacattcctgtactgaaatgtgaagggtatgaagctgatgacgttataggcacacttgtaaatagatttaaagcccaggatttagagattgtgataataaccggagacagagatacacttcagttacttgataaaaatgtaattgtcaaaatagtcacaacaaggtttgacaggacaactgaagatttgtatgctgtagaaaatgtaaaagaaaaatatggtgtttttgcgcatcaggttgttgactataaagcattagtaggtgatgcgtcagacaatataccaggtgttaagggaattggagataaaactgccataaagctgttagaagagtaccagactctggagaatatatatcagaatctaaataacattaaaggagcgctaaaagagaagttggaatcaggaaaagacatggcatttttatcaaaaagactggctactatcatatgcgatttaccaattgaggtgaatcttgaagaattaaaaaccaaagaatgggacaaagaaagactttatcagattttacttcaacttgagtttaaaagctttattaaaagactgggcttttcagaagagattaactatgcaaggcagaactttcagctacctgaatttagtattaaagaacttcgtgatgtttcagcaatagggggcaaagaaatctatctattgtactcagatgaagaaggacttttttatatttatgaccatcaaacctcaaccatttttacaacttctgataaggaagctattaaagatcttttaacactccaaagcattcaaaaggttgtatatgatttaaaaaatatactccataaggtggactttgatgaagctaatcagataaaaaattgtaatgatgttatgttggcttcatatgttttggacagtacacgcagttcgtacgatttggaaacattgtttatttcttatctcaacactgatatagctgcaatcaaagagaatagatgggctggtgctacagttttattaagaaatctttgggatgaactttcaaaactcattgatttaaactcggcccaatacgtttatgagagcatagagatgcctcttgttcccattttatatgaaatggagaaaatcggttttaaggttgacaaaaacactttgcaggagtatacaaaagagattgagagcaagcttttaaagttggaatcacagatttatcaaatagccggtgaatggtttaacataaactcgccaaaacaactctcatatatattattcgaaaaactgaagcttccggttgttaaaaagaccaaaacaggatattcaacagatgccgaggtattagaagagctgtatgataaacatgacataataccgcttattctggattatagaatgtatacgaaaatactgacaacttactgtcagggactggttcaggcaataaatcctgcaactggaagaattcataccaactttattcagacaggtacggcaactggaagacttgcaagtgcagagcccaatctgcaaaatattcctgtaaaatatgatgagggaaagctaataagaaaggcatttgttccagatgaaggttatgtgttgatagatgctgattattctcagattgagcttagaatacttgcacatatctctgaggatgaacgactgataaatgcttttaaaaataaccttgatattcattcacagacggcggcagagatctttggtgtggatataagtcaggttacaccaattatgcgaagccaggcaaaagcagttaactttggaattgtatatggtatatctgattatggactttcacgggatataaagatttcaagaaaagaagcagccgagtttattaatcgttattttgaaaagtatcccagagtaaaagaatatttggacaatgtcgtcaagtttgcccgtgaaaacggatttgttttgacaatatttaacaggaaaaggtatatcaaggatataaagtctactaataaaaacctgagaaactatgcagaggttatagcaatgaattcacctatccagggaagtgctgcagatattatgaaaatagcaatgataagagtttataaaaagctaaaagaaaacaatttaaaatcaagaattattctgcaggtccatgacgaacttttgattgaatcaccctatgaagagaaagagatagtaaaggaaatagtaaaatcggagatggaaaatgcggttttattgaaagttcctttggtagttgaagtgaaagaaggttcaaattggtatgaaacaaagtaaaggatcc

SEQ ID NO: 1824 - DNA, 2623 bp, Artificial Sequence
  Description of Artificial Sequence: Synthetic DNA sequence of Caldicellulosiruptor TOK13B DNA Polymerase M575A
atgaaatacctgctgccgaccgctgctgctggtctgctgctcctcgctgcccagccggcgatggccatggaatttgttatttttgatgggaatagtattctgtatagagctttttttgccttgccacagcttactacctcaacaggcatacctacaaatgctatatatggttttttgaatgtgctgttaaaatacttagattctgaaaaaccggattatgtagcagtagcttttgacaaaaaaggcagagctgtccgaaaaagtgaatatgaagaatacaaggctaacagaaaaccgatgccagattctcttcaggttcagataccttacgtaagagaaatacttgctgctctgaacattcctgtactgaaatgtgaagggtatgaagctgatgacgttataggcacacttgtaaatagatttaaagcccaggatttagagattgtgataataaccggagacagagatacacttcagttacttgataaaaatgtaattgtcaaaatagtcacaacaaggtttgacaggacaactgaagatttgtatgctgtagaaaatgtaaaagaaaaatatggtgtttttgcgcatcaggttgttgactataaagcattagtaggtgatgcgtcagacaatataccaggtgttaagggaattggagataaaactgccataaagctgttagaagagtaccagactctggagaatatatatcagaatctaaataacattaaaggagcgctaaaagagaagttggaatcaggaaaagacatggcatttttatcaaaaagactggctactatcatatgcgatttaccaattgaggtgaatcttgaagaattaaaaaccaaagaatgggacaaagaaagactttatcagattttacttcaacttgagtttaaaagctttattaaaagactgggcttttcagaagagattaactatgcaaggcagaactttcagctacctgaatttagtattaaagaacttcgtgatgtttcagcaatagggggcaaagaaatctatctattgtactcagatgaagaaggacttttttatatttatgaccatcaaacctcaaccatttttacaacttctgataaggaagctattaaagatcttttaacactccaaagcattcaaaaggttgtatatgatttaaaaaatatactccataaggtggactttgatgaagctaatcagataaaaaattgtaatgatgttatgttggcttcatatgttttggacagtacacgcagttcgtacgatttggaaacattgtttatttcttatctcaacactgatatagctgcaatcaaagagaatagatgggctggtgctacagttttattaagaaatctttgggatgaactttcaaaactcattgatttaaactcggcccaatacgtttatgagagcatagagatgcctcttgttcccattttatatgaaatggagaaaatcggttttaaggttgacaaaaacactttgcaggagtatacaaaagagattgagagcaagcttttaaagttggaatcacagatttatcaaatagccggtgaatggtttaacataaactcgccaaaacaactctcatatatattattcgaaaaactgaagcttccggttgttaaaaagaccaaaacaggatattcaacagatgccgaggtattagaagagctgtatgataaacatgacataataccgcttattctggattatagagcttatacgaaaatactgacaacttactgtcagggactggttcaggcaataaatcctgcaactggaagaattcataccaactttattcagacaggtacggcaactggaagacttgcaagtgcagagcccaatctgcaaaatattcctgtaaaatatgatgagggaaagctaataagaaaggcatttgttccagatgaaggttatgtgttgatagatgctgattattctcagattgagcttagaatacttgcacatatctctgaggatgaacgactgataaatgcttttaaaaataaccttgatattcattcacagacggcggcagagatctttggtgtggatataagtcaggttacaccaattatgcgaagccaggcaaaagcagttaactttggaattgtatatggtatatctgattatggactttcacgggatataaagatttcaagaaaagaagcagccgagtttattaatcgttattttgaaaagtatcccagagtaaaagaatatttggacaatgtcgtcaagtttgcccgtgaaaacggatttgttttgacaatatttaacaggaaaaggtatatcaaggatataaagtctactaataaaaacctgagaaactatgcagagagaatagcaatgaattcacctatccagggaagtgctgcagatattatgaaaatagcaatgataagagtttataaaaagctaaaagaaaacaatttaaaatcaagaattattctgcaggtccatgacgaacttttgattgaatcaccctatgaagagaaagagatagtaaaggaaatagtaaaatcggagatggaaaatgcggttttattgaaagttcctttggtagttgaagtgaaagaaggttcaaattggtatgaaacaaagtaaaggatcc

SEQ ID NO: 1825 - DNA, 2623 bp, Artificial Sequence
  Description of Artificial Sequence: Synthetic DNA sequence of Caldicellulosiruptor TOK13B DNA Polymerase M575C
atgaaatacctgctgccgaccgctgctgctggtctgctgctcctcgctgcccagccggcgatggccatggaatttgttatttttgatgggaatagtattctgtatagagctttttttgccttgccacagcttactacctcaacaggcatacctacaaatgctatatatggttttttgaatgtgctgttaaaatacttagattctgaaaaaccggattatgtagcagtagcttttgacaaaaaaggcagagctgtccgaaaaagtgaatatgaagaatacaaggctaacagaaaaccgatgccagattctcttcaggttcagataccttacgtaagagaaatacttgctgctctgaacattcctgtactgaaatgtgaagggtatgaagctgatgacgttataggcacacttgtaaatagatttaaagcccaggatttagagattgtgataataaccggagacagagatacacttcagttacttgataaaaatgtaattgtcaaaatagtcacaacaaggtttgacaggacaactgaagatttgtatgctgtagaaaatgtaaaagaaaaatatggtgtttttgcgcatcaggttgttgactataaagcattagtaggtgatgcgtcagacaatataccaggtgttaagggaattggagataaaactgccataaagctgttagaagagtaccagactctggagaatatatatcagaatctaaataacattaaaggagcgctaaaagagaagttggaatcaggaaaagacatggcatttttatcaaaaagactggctactatcatatgcgatttaccaattgaggtgaatcttgaagaattaaaaaccaaagaatgggacaaagaaagactttatcagattttacttcaacttgagtttaaaagctttattaaaagactgggcttttcagaagagattaactatgcaaggcagaactttcagctacctgaatttagtattaaagaacttcgtgatgtttcagcaatagggggcaaagaaatctatctattgtactcagatgaagaaggacttttttatatttatgaccatcaaacctcaaccatttttacaacttctgataaggaagctattaaagatcttttaacactccaaagcattcaaaaggttgtatatgatttaaaaaatatactccataaggtggactttgatgaagctaatcagataaaaaattgtaatgatgttatgttggcttcatatgttttggacagtacacgcagttcgtacgatttggaaacattgtttatttcttatctcaacactgatatagctgcaatcaaagagaatagatgggctggtgctacagttttattaagaaatctttgggatgaactttcaaaactcattgatttaaactcggcccaatacgtttatgagagcatagagatgcctcttgttcccattttatatgaaatggagaaaatcggttttaaggttgacaaaaacactttgcaggagtatacaaaagagattgagagcaagcttttaaagttggaatcacagatttatcaaatagccggtgaatggtttaacataaactcgccaaaacaactctcatatatattattcgaaaaactgaagcttccggttgttaaaaagaccaaaacaggatattcaacagatgccgaggtattagaagagctgtatgataaacatgacataataccgcttattctggattatagatgttatacgaaaatactgacaacttactgtcagggactggttcaggcaataaatcctgcaactggaagaattcataccaactttattcagacaggtacggcaactggaagacttgcaagtgcagagcccaatctgcaaaatattcctgtaaaatatgatgagggaaagctaataagaaaggcatttgttccagatgaaggttatgtgttgatagatgctgattattctcagattgagcttagaatacttgcacatatctctgaggatgaacgactgataaatgcttttaaaaataaccttgatattcattcacagacggcggcagagatctttggtgtggatataagtcaggttacaccaattatgcgaagccaggcaaaagcagttaactttggaattgtatatggtatatctgattatggactttcacgggatataaagatttcaagaaaagaagcagccgagtttattaatcgttattttgaaaagtatcccagagtaaaagaatatttggacaatgtcgtcaagtttgcccgtgaaaacggatttgttttgacaatatttaacaggaaaaggtatatcaaggatataaagtctactaataaaaacctgagaaactatgcagagagaatagcaatgaattcacctatccagggaagtgctgcagatattatgaaaatagcaatgataagagtttataaaaagctaaaagaaaacaatttaaaatcaagaattattctgcaggtccatgacgaacttttgattgaatcaccctatgaagagaaagagatagtaaaggaaatagtaaaatcggagatggaaaatgcggttttattgaaagttcctttggtagttgaagtgaaagaaggttcaaattggtatgaaacaaagtaaaggatcc

SEQ ID NO: 1826 - DNA, 2623 bp, Artificial Sequence
  Description of Artificial Sequence: Synthetic DNA sequence of Caldicellulosiruptor TOK13B DNA Polymerase M575D
atgaaatacctgctgccgaccgctgctgctggtctgctgctcctcgctgcccagccggcgatggccatggaatttgttatttttgatgggaatagtattctgtatagagctttttttgccttgccacagcttactacctcaacaggcatacctacaaatgctatatatggttttttgaatgtgctgttaaaatacttagattctgaaaaaccggattatgtagcagtagcttttgacaaaaaaggcagagctgtccgaaaaagtgaatatgaagaatacaaggctaacagaaaaccgatgccagattctcttcaggttcagataccttacgtaagagaaatacttgctgctctgaacattcctgtactgaaatgtgaagggtatgaagctgatgacgttataggcacacttgtaaatagatttaaagcccaggatttagagattgtgataataaccggagacagagatacacttcagttacttgataaaaatgtaattgtcaaaatagtcacaacaaggtttgacaggacaactgaagatttgtatgctgtagaaaatgtaaaagaaaaatatggtgtttttgcgcatcaggttgttgactataaagcattagtaggtgatgcgtcagacaatataccaggtgttaagggaattggagataaaactgccataaagctgttagaagagtaccagactctggagaatatatatcagaatctaaataacattaaaggagcgctaaaagagaagttggaatcaggaaaagacatggcatttttatcaaaaagactggctactatcatatgcgatttaccaattgaggtgaatcttgaagaattaaaaaccaaagaatgggacaaagaaagactttatcagattttacttcaacttgagtttaaaagctttattaaaagactgggcttttcagaagagattaactatgcaaggcagaactttcagctacctgaatttagtattaaagaacttcgtgatgtttcagcaatagggggcaaagaaatctatctattgtactcagatgaagaaggacttttttatatttatgaccatcaaacctcaaccatttttacaacttctgataaggaagctattaaagatcttttaacactccaaagcattcaaaaggttgtatatgatttaaaaaatatactccataaggtggactttgatgaagctaatcagataaaaaattgtaatgatgttatgttggcttcatatgttttggacagtacacgcagttcgtacgatttggaaacattgtttatttcttatctcaacactgatatagctgcaatcaaagagaatagatgggctggtgctacagttttattaagaaatctttgggatgaactttcaaaactcattgatttaaactcggcccaatacgtttatgagagcatagagatgcctcttgttcccattttatatgaaatggagaaaatcggttttaaggttgacaaaaacactttgcaggagtatacaaaagagattgagagcaagcttttaaagttggaatcacagatttatcaaatagccggtgaatggtttaacataaactcgccaaaacaactctcatatatattattcgaaaaactgaagcttccggttgttaaaaagaccaaaacaggatattcaacagatgccgaggtattagaagagctgtatgataaacatgacataataccgcttattctggattatagagattatacgaaaatactgacaacttactgtcagggactggttcaggcaataaatcctgcaactggaagaattcataccaactttattcagacaggtacggcaactggaagacttgcaagtgcagagcccaatctgcaaaatattcctgtaaaatatgatgagggaaagctaataagaaaggcatttgttccagatgaaggttatgtgttgatagatgctgattattctcagattgagcttagaatacttgcacatatctctgaggatgaacgactgataaatgcttttaaaaataaccttgatattcattcacagacggcggcagagatctttggtgtggatataagtcaggttacaccaattatgcgaagccaggcaaaagcagttaactttggaattgtatatggtatatctgattatggactttcacgggatataaagatttcaagaaaagaagcagccgagtttattaatcgttattttgaaaagtatcccagagtaaaagaatatttggacaatgtcgtcaagtttgcccgtgaaaacggatttgttttgacaatatttaacaggaaaaggtatatcaaggatataaagtctactaataaaaacctgagaaactatgcagagagaatagcaatgaattcacctatccagggaagtgctgcagatattatgaaaatagcaatgataagagtttataaaaagctaaaagaaaacaatttaaaatcaagaattattctgcaggtccatgacgaacttttgattgaatcaccctatgaagagaaagagatagtaaaggaaatagtaaaatcggagatggaaaatgcggttttattgaaagttcctttggtagttgaagtgaaagaaggttcaaattggtatgaaacaaagtaaaggatcc

SEQ ID NO: 1827 - DNA, 2623 bp, Artificial Sequence
  Description of Artificial Sequence: Synthetic DNA sequence of Caldicellulosiruptor TOK13B DNA Polymerase M575F
atgaaatacctgctgccgaccgctgctgctggtctgctgctcctcgctgcccagccggcgatggccatggaatttgttatttttgatgggaatagtattctgtatagagctttttttgccttgccacagcttactacctcaacaggcatacctacaaatgctatatatggttttttgaatgtgctgttaaaatacttagattctgaaaaaccggattatgtagcagtagcttttgacaaaaaaggcagagctgtccgaaaaagtgaatatgaagaatacaaggctaacagaaaaccgatgccagattctcttcaggttcagataccttacgtaagagaaatacttgctgctctgaacattcctgtactgaaatgtgaagggtatgaagctgatgacgttataggcacacttgtaaatagatttaaagcccaggatttagagattgtgataataaccggagacagagatacacttcagttacttgataaaaatgtaattgtcaaaatagtcacaacaaggtttgacaggacaactgaagatttgtatgctgtagaaaatgtaaaagaaaaatatggtgtttttgcgcatcaggttgttgactataaagcattagtaggtgatgcgtcagacaatataccaggtgttaagggaattggagataaaactgccataaagctgttagaagagtaccagactctggagaatatatatcagaatctaaataacattaaaggagcgctaaaagagaagttggaatcaggaaaagacatggcatttttatcaaaaagactggctactatcatatgcgatttaccaattgaggtgaatcttgaagaattaaaaaccaaagaatgggacaaagaaagactttatcagattttacttcaacttgagtttaaaagctttattaaaagactgggcttttcagaagagattaactatgcaaggcagaactttcagctacctgaatttagtattaaagaacttcgtgatgtttcagcaatagggggcaaagaaatctatctattgtactcagatgaagaaggacttttttatatttatgaccatcaaacctcaaccatttttacaacttctgataaggaagctattaaagatcttttaacactccaaagcattcaaaaggttgtatatgatttaaaaaatatactccataaggtggactttgatgaagctaatcagataaaaaattgtaatgatgttatgttggcttcatatgttttggacagtacacgcagttcgtacgatttggaaacattgtttatttcttatctcaacactgatatagctgcaatcaaagagaatagatgggctggtgctacagttttattaagaaatctttgggatgaactttcaaaactcattgatttaaactcggcccaatacgtttatgagagcatagagatgcctcttgttcccattttatatgaaatggagaaaatcggttttaaggttgacaaaaacactttgcaggagtatacaaaagagattgagagcaagcttttaaagttggaatcacagatttatcaaatagccggtgaatggtttaacataaactcgccaaaacaactctcatatatattattcgaaaaactgaagcttccggttgttaaaaagaccaaaacaggatattcaacagatgccgaggtattagaagagctgtatgataaacatgacataataccgcttattctggattatagattttatacgaaaatactgacaacttactgtcagggactggttcaggcaataaatcctgcaactggaagaattcataccaactttattcagacaggtacggcaactggaagacttgcaagtgcagagcccaatctgcaaaatattcctgtaaaatatgatgagggaaagctaataagaaaggcatttgttccagatgaaggttatgtgttgatagatgctgattattctcagattgagcttagaatacttgcacatatctctgaggatgaacgactgataaatgcttttaaaaataaccttgatattcattcacagacggcggcagagatctttggtgtggatataagtcaggttacaccaattatgcgaagccaggcaaaagcagttaactttggaattgtatatggtatatctgattatggactttcacgggatataaagatttcaagaaaagaagcagccgagtttattaatcgttattttgaaaagtatcccagagtaaaagaatatttggacaatgtcgtcaagtttgcccgtgaaaacggatttgttttgacaatatttaacaggaaaaggtatatcaaggatataaagtctactaataaaaacctgagaaactatgcagagagaatagcaatgaattcacctatccagggaagtgctgcagatattatgaaaatagcaatgataagagtttataaaaagctaaaagaaaacaatttaaaatcaagaattattctgcaggtccatgacgaacttttgattgaatcaccctatgaagagaaagagatagtaaaggaaatagtaaaatcggagatggaaaatgcggttttattgaaagttcctttggtagttgaagtgaaagaaggttcaaattggtatgaaacaaagtaaaggatcc

SEQ ID NO: 1828 - DNA, 2623 bp, Artificial Sequence
  Description of Artificial Sequence: Synthetic DNA sequence of Caldicellulosiruptor TOK13B DNA Polymerase M575G
atgaaatacctgctgccgaccgctgctgctggtctgctgctcctcgctgcccagccggcgatggccatggaatttgttatttttgatgggaatagtattctgtatagagctttttttgccttgccacagcttactacctcaacaggcatacctacaaatgctatatatggttttttgaatgtgctgttaaaatacttagattctgaaaaaccggattatgtagcagtagcttttgacaaaaaaggcagagctgtccgaaaaagtgaatatgaagaatacaaggctaacagaaaaccgatgccagattctcttcaggttcagataccttacgtaagagaaatacttgctgctctgaacattcctgtactgaaatgtgaagggtatgaagctgatgacgttataggcacacttgtaaatagatttaaagcccaggatttagagattgtgataataaccggagacagagatacacttcagttacttgataaaaatgtaattgtcaaaatagtcacaacaaggtttgacaggacaactgaagatttgtatgctgtagaaaatgtaaaagaaaaatatggtgtttttgcgcatcaggttgttgactataaagcattagtaggtgatgcgtcagacaatataccaggtgttaagggaattggagataaaactgccataaagctgttagaagagtaccagactctggagaatatatatcagaatctaaataacattaaaggagcgctaaaagagaagttggaatcaggaaaagacatggcatttttatcaaaaagactggctactatcatatgcgatttaccaattgaggtgaatcttgaagaattaaaaaccaaagaatgggacaaagaaagactttatcagattttacttcaacttgagtttaaaagctttattaaaagactgggcttttcagaagagattaactatgcaaggcagaactttcagctacctgaatttagtattaaagaacttcgtgatgtttcagcaatagggggcaaagaaatctatctattgtactcagatgaagaaggacttttttatatttatgaccatcaaacctcaaccatttttacaacttctgataaggaagctattaaagatcttttaacactccaaagcattcaaaaggttgtatatgatttaaaaaatatactccataaggtggactttgatgaagctaatcagataaaaaattgtaatgatgttatgttggcttcatatgttttggacagtacacgcagttcgtacgatttggaaacattgtttatttcttatctcaacactgatatagctgcaatcaaagagaatagatgggctggtgctacagttttattaagaaatctttgggatgaactttcaaaactcattgatttaaactcggcccaatacgtttatgagagcatagagatgcctcttgttcccattttatatgaaatggagaaaatcggttttaaggttgacaaaaacactttgcaggagtatacaaaagagattgagagcaagcttttaaagttggaatcacagatttatcaaatagccggtgaatggtttaacataaactcgccaaaacaactctcatatatattattcgaaaaactgaagcttccggttgttaaaaagaccaaaacaggatattcaacagatgccgaggtattagaagagctgtatgataaacatgacataataccgcttattctggattatagaggttatacgaaaatactgacaacttactgtcagggactggttcaggcaataaatcctgcaactggaagaattcataccaactttattcagacaggtacggcaactggaagacttgcaagtgcagagcccaatctgcaaaatattcctgtaaaatatgatgagggaaagctaataagaaaggcatttgttccagatgaaggttatgtgttgatagatgctgattattctcagattgagcttagaatacttgcacatatctctgaggatgaacgactgataaatgcttttaaaaataaccttgatattcattcacagacggcggcagagatctttggtgtggatataagtcaggttacaccaattatgcgaagccaggcaaaagcagttaactttggaattgtatatggtatatctgattatggactttcacgggatataaagatttcaagaaaagaagcagccgagtttattaatcgttattttgaaaagtatcccagagtaaaagaatatttggacaatgtcgtcaagtttgcccgtgaaaacggatttgttttgacaatatttaacaggaaaaggtatatcaaggatataaagtctactaataaaaacctgagaaactatgcagagagaatagcaatgaattcacctatccagggaagtgctgcagatattatgaaaatagcaatgataagagtttataaaaagctaaaagaaaacaatttaaaatcaagaattattctgcaggtccatgacgaacttttgattgaatcaccctatgaagagaaagagatagtaaaggaaatagtaaaatcggagatggaaaatgcggttttattgaaagttcctttggtagttgaagtgaaagaaggttcaaattggtatgaaacaaagtaaaggatcc

SEQ ID NO: 1829 - DNA, 2623 bp, Artificial Sequence
  Description of Artificial Sequence: Synthetic DNA sequence of Caldicellulosiruptor TOK13B DNA Polymerase M575H
atgaaatacctgctgccgaccgctgctgctggtctgctgctcctcgctgcccagccggcgatggccatggaatttgttatttttgatgggaatagtattctgtatagagctttttttgccttgccacagcttactacctcaacaggcatacctacaaatgctatatatggttttttgaatgtgctgttaaaatacttagattctgaaaaaccggattatgtagcagtagcttttgacaaaaaaggcagagctgtccgaaaaagtgaatatgaagaatacaaggctaacagaaaaccgatgccagattctcttcaggttcagataccttacgtaagagaaatacttgctgctctgaacattcctgtactgaaatgtgaagggtatgaagctgatgacgttataggcacacttgtaaatagatttaaagcccaggatttagagattgtgataataaccggagacagagatacacttcagttacttgataaaaatgtaattgtcaaaatagtcacaacaaggtttgacaggacaactgaagatttgtatgctgtagaaaatgtaaaagaaaaatatggtgtttttgcgcatcaggttgttgactataaagcattagtaggtgatgcgtcagacaatataccaggtgttaagggaattggagataaaactgccataaagctgttagaagagtaccagactctggagaatatatatcagaatctaaataacattaaaggagcgctaaaagagaagttggaatcaggaaaagacatggcatttttatcaaaaagactggctactatcatatgcgatttaccaattgaggtgaatcttgaagaattaaaaaccaaagaatgggacaaagaaagactttatcagattttacttcaacttgagtttaaaagctttattaaaagactgggcttttcagaagagattaactatgcaaggcagaactttcagctacctgaatttagtattaaagaacttcgtgatgtttcagcaatagggggcaaagaaatctatctattgtactcagatgaagaaggacttttttatatttatgaccatcaaacctcaaccatttttacaacttctgataaggaagctattaaagatcttttaacactccaaagcattcaaaaggttgtatatgatttaaaaaatatactccataaggtggactttgatgaagctaatcagataaaaaattgtaatgatgttatgttggcttcatatgttttggacagtacacgcagttcgtacgatttggaaacattgtttatttcttatctcaacactgatatagctgcaatcaaagagaatagatgggctggtgctacagttttattaagaaatctttgggatgaactttcaaaactcattgatttaaactcggcccaatacgtttatgagagcatagagatgcctcttgttcccattttatatgaaatggagaaaatcggttttaaggttgacaaaaacactttgcaggagtatacaaaagagattgagagcaagcttttaaagttggaatcacagatttatcaaatagccggtgaatggtttaacataaactcgccaaaacaactctcatatatattattcgaaaaactgaagcttccggttgttaaaaagaccaaaacaggatattcaacagatgccgaggtattagaagagctgtatgataaacatgacataataccgcttattctggattatagacattatacgaaaatactgacaacttactgtcagggactggttcaggcaataaatcctgcaactggaagaattcataccaactttattcagacaggtacggcaactggaagacttgcaagtgcagagcccaatctgcaaaatattcctgtaaaatatgatgagggaaagctaataagaaaggcatttgttccagatgaaggttatgtgttgatagatgctgattattctcagattgagcttagaatacttgcacatatctctgaggatgaacgactgataaatgcttttaaaaataaccttgatattcattcacagacggcggcagagatctttggtgtggatataagtcaggttacaccaattatgcgaagccaggcaaaagcagttaactttggaattgtatatggtatatctgattatggactttcacgggatataaagatttcaagaaaagaagcagccgagtttattaatcgttattttgaaaagtatcccagagtaaaagaatatttggacaatgtcgtcaagtttgcccgtgaaaacggatttgttttgacaatatttaacaggaaaaggtatatcaaggatataaagtctactaataaaaacctgagaaactatgcagagagaatagcaatgaattcacctatccagggaagtgctgcagatattatgaaaatagcaatgataagagtttataaaaagctaaaagaaaacaatttaaaatcaagaattattctgcaggtccatgacgaacttttgattgaatcaccctatgaagagaaagagatagtaaaggaaatagtaaaatcggagatggaaaatgcggttttattgaaagttcctttggtagttgaagtgaaagaaggttcaaattggtatgaaacaaagtaaaggatcc

SEQ ID NO: 1830 - DNA, 2623 bp, Artificial Sequence
  Description of Artificial Sequence: Synthetic DNA sequence of Caldicellulosiruptor TOK13B DNA Polymerase M575I
atgaaatacctgctgccgaccgctgctgctggtctgctgctcctcgctgcccagccggcgatggccatggaatttgttatttttgatgggaatagtattctgtatagagctttttttgccttgccacagcttactacctcaacaggcatacctacaaatgctatatatggttttttgaatgtgctgttaaaatacttagattctgaaaaaccggattatgtagcagtagcttttgacaaaaaaggcagagctgtccgaaaaagtgaatatgaagaatacaaggctaacagaaaaccgatgccagattctcttcaggttcagataccttacgtaagagaaatacttgctgctctgaacattcctgtactgaaatgtgaagggtatgaagctgatgacgttataggcacacttgtaaatagatttaaagcccaggatttagagattgtgataataaccggagacagagatacacttcagttacttgataaaaatgtaattgtcaaaatagtcacaacaaggtttgacaggacaactgaagatttgtatgctgtagaaaatgtaaaagaaaaatatggtgtttttgcgcatcaggttgttgactataaagcattagtaggtgatgcgtcagacaatataccaggtgttaagggaattggagataaaactgccataaagctgttagaagagtaccagactctggagaatatatatcagaatctaaataacattaaaggagcgctaaaagagaagttggaatcaggaaaagacatggcatttttatcaaaaagactggctactatcatatgcgatttaccaattgaggtgaatcttgaagaattaaaaaccaaagaatgggacaaagaaagactttatcagattttacttcaacttgagtttaaaagctttattaaaagactgggcttttcagaagagattaactatgcaaggcagaactttcagctacctgaatttagtattaaagaacttcgtgatgtttcagcaatagggggcaaagaaatctatctattgtactcagatgaagaaggacttttttatatttatgaccatcaaacctcaaccatttttacaacttctgataaggaagctattaaagatcttttaacactccaaagcattcaaaaggttgtatatgatttaaaaaatatactccataaggtggactttgatgaagctaatcagataaaaaattgtaatgatgttatgttggcttcatatgttttggacagtacacgcagttcgtacgatttggaaacattgtttatttcttatctcaacactgatatagctgcaatcaaagagaatagatgggctggtgctacagttttattaagaaatctttgggatgaactttcaaaactcattgatttaaactcggcccaatacgtttatgagagcatagagatgcctcttgttcccattttatatgaaatggagaaaatcggttttaaggttgacaaaaacactttgcaggagtatacaaaagagattgagagcaagcttttaaagttggaatcacagatttatcaaatagccggtgaatggtttaacataaactcgccaaaacaactctcatatatattattcgaaaaactgaagcttccggttgttaaaaagaccaaaacaggatattcaacagatgccgaggtattagaagagctgtatgataaacatgacataataccgcttattctggattatagaatttatacgaaaatactgacaacttactgtcagggactggttcaggcaataaatcctgcaactggaagaattcataccaactttattcagacaggtacggcaactggaagacttgcaagtgcagagcccaatctgcaaaatattcctgtaaaatatgatgagggaaagctaataagaaaggcatttgttccagatgaaggttatgtgttgatagatgctgattattctcagattgagcttagaatacttgcacatatctctgaggatgaacgactgataaatgcttttaaaaataaccttgatattcattcacagacggcggcagagatctttggtgtggatataagtcaggttacaccaattatgcgaagccaggcaaaagcagttaactttggaattgtatatggtatatctgattatggactttcacgggatataaagatttcaagaaaagaagcagccgagtttattaatcgttattttgaaaagtatcccagagtaaaagaatatttggacaatgtcgtcaagtttgcccgtgaaaacggatttgttttgacaatatttaacaggaaaaggtatatcaaggatataaagtctactaataaaaacctgagaaactatgcagagagaatagcaatgaattcacctatccagggaagtgctgcagatattatgaaaatagcaatgataagagtttataaaaagctaaaagaaaacaatttaaaatcaagaattattctgcaggtccatgacgaacttttgattgaatcaccctatgaagagaaagagatagtaaaggaaatagtaaaatcggagatggaaaatgcggttttattgaaagttcctttggtagttgaagtgaaagaaggttcaaattggtatgaaacaaagtaaaggatcc

SEQ ID NO: 1831 - DNA, 2623 bp, Artificial Sequence
  Description of Artificial Sequence: Synthetic DNA sequence of Caldicellulosiruptor TOK13B DNA Polymerase M575L
atgaaatacctgctgccgaccgctgctgctggtctgctgctcctcgctgcccagccggcgatggccatggaatttgttatttttgatgggaatagtattctgtatagagctttttttgccttgccacagcttactacctcaacaggcatacctacaaatgctatatatggttttttgaatgtgctgttaaaatacttagattctgaaaaaccggattatgtagcagtagcttttgacaaaaaaggcagagctgtccgaaaaagtgaatatgaagaatacaaggctaacagaaaaccgatgccagattctcttcaggttcagataccttacgtaagagaaatacttgctgctctgaacattcctgtactgaaatgtgaagggtatgaagctgatgacgttataggcacacttgtaaatagatttaaagcccaggatttagagattgtgataataaccggagacagagatacacttcagttacttgataaaaatgtaattgtcaaaatagtcacaacaaggtttgacaggacaactgaagatttgtatgctgtagaaaatgtaaaagaaaaatatggtgtttttgcgcatcaggttgttgactataaagcattagtaggtgatgcgtcagacaatataccaggtgttaagggaattggagataaaactgccataaagctgttagaagagtaccagactctggagaatatatatcagaatctaaataacattaaaggagcgctaaaagagaagttggaatcaggaaaagacatggcatttttatcaaaaagactggctactatcatatgcgatttaccaattgaggtgaatcttgaagaattaaaaaccaaagaatgggacaaagaaagactttatcagattttacttcaacttgagtttaaaagctttattaaaagactgggcttttcagaagagattaactatgcaaggcagaactttcagctacctgaatttagtattaaagaacttcgtgatgtttcagcaatagggggcaaagaaatctatctattgtactcagatgaagaaggacttttttatatttatgaccatcaaacctcaaccatttttacaacttctgataaggaagctattaaagatcttttaacactccaaagcattcaaaaggttgtatatgatttaaaaaatatactccataaggtggactttgatgaagctaatcagataaaaaattgtaatgatgttatgttggcttcatatgttttggacagtacacgcagttcgtacgatttggaaacattgtttatttcttatctcaacactgatatagctgcaatcaaagagaatagatgggctggtgctacagttttattaagaaatctttgggatgaactttcaaaactcattgatttaaactcggcccaatacgtttatgagagcatagagatgcctcttgttcccattttatatgaaatggagaaaatcggttttaaggttgacaaaaacactttgcaggagtatacaaaagagattgagagcaagcttttaaagttggaatcacagatttatcaaatagccggtgaatggtttaacataaactcgccaaaacaactctcatatatattattcgaaaaactgaagcttccggttgttaaaaagaccaaaacaggatattcaacagatgccgaggtattagaagagctgtatgataaacatgacataataccgcttattctggattatagactttatacgaaaatactgacaacttactgtcagggactggttcaggcaataaatcctgcaactggaagaattcataccaactttattcagacaggtacggcaactggaagacttgcaagtgcagagcccaatctgcaaaatattcctgtaaaatatgatgagggaaagctaataagaaaggcatttgttccagatgaaggttatgtgttgatagatgctgattattctcagattgagcttagaatacttgcacatatctctgaggatgaacgactgataaatgcttttaaaaataaccttgatattcattcacagacggcggcagagatctttggtgtggatataagtcaggttacaccaattatgcgaagccaggcaaaagcagttaactttggaattgtatatggtatatctgattatggactttcacgggatataaagatttcaagaaaagaagcagccgagtttattaatcgttattttgaaaagtatcccagagtaaaagaatatttggacaatgtcgtcaagtttgcccgtgaaaacggatttgttttgacaatatttaacaggaaaaggtatatcaaggatataaagtctactaataaaaacctgagaaactatgcagagagaatagcaatgaattcacctatccagggaagtgctgcagatattatgaaaatagcaatgataagagtttataaaaagctaaaagaaaacaatttaaaatcaagaattattctgcaggtccatgacgaacttttgattgaatcaccctatgaagagaaagagatagtaaaggaaatagtaaaatcggagatggaaaatgcggttttattgaaagttcctttggtagttgaagtgaaagaaggttcaaattggtatgaaacaaagtaaaggatcc

SEQ ID NO: 1832 - DNA, 2623 bp, Artificial Sequence
  Description of Artificial Sequence: Synthetic DNA sequence of Caldicellulosiruptor TOK13B DNA Polymerase M575N
atgaaatacctgctgccgaccgctgctgctggtctgctgctcctcgctgcccagccggcgatggccatggaatttgttatttttgatgggaatagtattctgtatagagctttttttgccttgccacagcttactacctcaacaggcatacctacaaatgctatatatggttttttgaatgtgctgttaaaatacttagattctgaaaaaccggattatgtagcagtagcttttgacaaaaaaggcagagctgtccgaaaaagtgaatatgaagaatacaaggctaacagaaaaccgatgccagattctcttcaggttcagataccttacgtaagagaaatacttgctgctctgaacattcctgtactgaaatgtgaagggtatgaagctgatgacgttataggcacacttgtaaatagatttaaagcccaggatttagagattgtgataataaccggagacagagatacacttcagttacttgataaaaatgtaattgtcaaaatagtcacaacaaggtttgacaggacaactgaagatttgtatgctgtagaaaatgtaaaagaaaaatatggtgtttttgcgcatcaggttgttgactataaagcattagtaggtgatgcgtcagacaatataccaggtgttaagggaattggagataaaactgccataaagctgttagaagagtaccagactctggagaatatatatcagaatctaaataacattaaaggagcgctaaaagagaagttggaatcaggaaaagacatggcatttttatcaaaaagactggctactatcatatgcgatttaccaattgaggtgaatcttgaagaattaaaaaccaaagaatgggacaaagaaagactttatcagattttacttcaacttgagtttaaaagctttattaaaagactgggcttttcagaagagattaactatgcaaggcagaactttcagctacctgaatttagtattaaagaacttcgtgatgtttcagcaatagggggcaaagaaatctatctattgtactcagatgaagaaggacttttttatatttatgaccatcaaacctcaaccatttttacaacttctgataaggaagctattaaagatcttttaacactccaaagcattcaaaaggttgtatatgatttaaaaaatatactccataaggtggactttgatgaagctaatcagataaaaaattgtaatgatgttatgttggcttcatatgttttggacagtacacgcagttcgtacgatttggaaacattgtttatttcttatctcaacactgatatagctgcaatcaaagagaatagatgggctggtgctacagttttattaagaaatctttgggatgaactttcaaaactcattgatttaaactcggcccaatacgtttatgagagcatagagatgcctcttgttcccattttatatgaaatggagaaaatcggttttaaggttgacaaaaacactttgcaggagtatacaaaagagattgagagcaagcttttaaagttggaatcacagatttatcaaatagccggtgaatggtttaacataaactcgccaaaacaactctcatatatattattcgaaaaactgaagcttccggttgttaaaaagaccaaaacaggatattcaacagatgccgaggtattagaagagctgtatgataaacatgacataataccgcttattctggattatagaaattatacgaaaatactgacaacttactgtcagggactggttcaggcaataaatcctgcaactggaagaattcataccaactttattcagacaggtacggcaactggaagacttgcaagtgcagagcccaatctgcaaaatattcctgtaaaatatgatgagggaaagctaataagaaaggcatttgttccagatgaaggttatgtgttgatagatgctgattattctcagattgagcttagaatacttgcacatatctctgaggatgaacgactgataaatgcttttaaaaataaccttgatattcattcacagacggcggcagagatctttggtgtggatataagtcaggttacaccaattatgcgaagccaggcaaaagcagttaactttggaattgtatatggtatatctgattatggactttcacgggatataaagatttcaagaaaagaagcagccgagtttattaatcgttattttgaaaagtatcccagagtaaaagaatatttggacaatgtcgtcaagtttgcccgtgaaaacggatttgttttgacaatatttaacaggaaaaggtatatcaaggatataaagtctactaataaaaacctgagaaactatgcagagagaatagcaatgaattcacctatccagggaagtgctgcagatattatgaaaatagcaatgataagagtttataaaaagctaaaagaaaacaatttaaaatcaagaattattctgcaggtccatgacgaacttttgattgaatcaccctatgaagagaaagagatagtaaaggaaatagtaaaatcggagatggaaaatgcggttttattgaaagttcctttggtagttgaagtgaaagaaggttcaaattggtatgaaacaaagtaaaggatcc

SEQ ID NO: 1833 - DNA, 2623 bp, Artificial Sequence
  Description of Artificial Sequence: Synthetic DNA sequence of Caldicellulosiruptor TOK13B DNA Polymerase M575P
atgaaatacctgctgccgaccgctgctgctggtctgctgctcctcgctgcccagccggcgatggccatggaatttgttatttttgatgggaatagtattctgtatagagctttttttgccttgccacagcttactacctcaacaggcatacctacaaatgctatatatggttttttgaatgtgctgttaaaatacttagattctgaaaaaccggattatgtagcagtagcttttgacaaaaaaggcagagctgtccgaaaaagtgaatatgaagaatacaaggctaacagaaaaccgatgccagattctcttcaggttcagataccttacgtaagagaaatacttgctgctctgaacattcctgtactgaaatgtgaagggtatgaagctgatgacgttataggcacacttgtaaatagatttaaagcccaggatttagagattgtgataataaccggagacagagatacacttcagttacttgataaaaatgtaattgtcaaaatagtcacaacaaggtttgacaggacaactgaagatttgtatgctgtagaaaatgtaaaagaaaaatatggtgtttttgcgcatcaggttgttgactataaagcattagtaggtgatgcgtcagacaatataccaggtgttaagggaattggagataaaactgccataaagctgttagaagagtaccagactctggagaatatatatcagaatctaaataacattaaaggagcgctaaaagagaagttggaatcaggaaaagacatggcatttttatcaaaaagactggctactatcatatgcgatttaccaattgaggtgaatcttgaagaattaaaaaccaaagaatgggacaaagaaagactttatcagattttacttcaacttgagtttaaaagctttattaaaagactgggcttttcagaagagattaactatgcaaggcagaactttcagctacctgaatttagtattaaagaacttcgtgatgtttcagcaatagggggcaaagaaatctatctattgtactcagatgaagaaggacttttttatatttatgaccatcaaacctcaaccatttttacaacttctgataaggaagctattaaagatcttttaacactccaaagcattcaaaaggttgtatatgatttaaaaaatatactccataaggtggactttgatgaagctaatcagataaaaaattgtaatgatgttatgttggcttcatatgttttggacagtacacgcagttcgtacgatttggaaacattgtttatttcttatctcaacactgatatagctgcaatcaaagagaatagatgggctggtgctacagttttattaagaaatctttgggatgaactttcaaaactcattgatttaaactcggcccaatacgtttatgagagcatagagatgcctcttgttcccattttatatgaaatggagaaaatcggttttaaggttgacaaaaacactttgcaggagtatacaaaagagattgagagcaagcttttaaagttggaatcacagatttatcaaatagccggtgaatggtttaacataaactcgccaaaacaactctcatatatattattcgaaaaactgaagcttccggttgttaaaaagaccaaaacaggatattcaacagatgccgaggtattagaagagctgtatgataaacatgacataataccgcttattctggattatagaccttatacgaaaatactgacaacttactgtcagggactggttcaggcaataaatcctgcaactggaagaattcataccaactttattcagacaggtacggcaactggaagacttgcaagtgcagagcccaatctgcaaaatattcctgtaaaatatgatgagggaaagctaataagaaaggcatttgttccagatgaaggttatgtgttgatagatgctgattattctcagattgagcttagaatacttgcacatatctctgaggatgaacgactgataaatgcttttaaaaataaccttgatattcattcacagacggcggcagagatctttggtgtggatataagtcaggttacaccaattatgcgaagccaggcaaaagcagttaactttggaattgtatatggtatatctgattatggactttcacgggatataaagatttcaagaaaagaagcagccgagtttattaatcgttattttgaaaagtatcccagagtaaaagaatatttggacaatgtcgtcaagtttgcccgtgaaaacggatttgttttgacaatatttaacaggaaaaggtatatcaaggatataaagtctactaataaaaacctgagaaactatgcagagagaatagcaatgaattcacctatccagggaagtgctgcagatattatgaaaatagcaatgataagagtttataaaaagctaaaagaaaacaatttaaaatcaagaattattctgcaggtccatgacgaacttttgattgaatcaccctatgaagagaaagagatagtaaaggaaatagtaaaatcggagatggaaaatgcggttttattgaaagttcctttggtagttgaagtgaaagaaggttcaaattggtatgaaacaaagtaaaggatcc

SEQ ID NO: 1834 - DNA, 2623 bp, Artificial Sequence
  Description of Artificial Sequence: Synthetic DNA sequence of Caldicellulosiruptor TOK13B DNA Polymerase M575Q
atgaaatacctgctgccgaccgctgctgctggtctgctgctcctcgctgcccagccggcgatggccatggaatttgttatttttgatgggaatagtattctgtatagagctttttttgccttgccacagcttactacctcaacaggcatacctacaaatgctatatatggttttttgaatgtgctgttaaaatacttagattctgaaaaaccggattatgtagcagtagcttttgacaaaaaaggcagagctgtccgaaaaagtgaatatgaagaatacaaggctaacagaaaaccgatgccagattctcttcaggttcagataccttacgtaagagaaatacttgctgctctgaacattcctgtactgaaatgtgaagggtatgaagctgatgacgttataggcacacttgtaaatagatttaaagcccaggatttagagattgtgataataaccggagacagagatacacttcagttacttgataaaaatgtaattgtcaaaatagtcacaacaaggtttgacaggacaactgaagatttgtatgctgtagaaaatgtaaaagaaaaatatggtgtttttgcgcatcaggttgttgactataaagcattagtaggtgatgcgtcagacaatataccaggtgttaagggaattggagataaaactgccataaagctgttagaagagtaccagactctggagaatatatatcagaatctaaataacattaaaggagcgctaaaagagaagttggaatcaggaaaagacatggcatttttatcaaaaagactggctactatcatatgcgatttaccaattgaggtgaatcttgaagaattaaaaaccaaagaatgggacaaagaaagactttatcagattttacttcaacttgagtttaaaagctttattaaaagactgggcttttcagaagagattaactatgcaaggcagaactttcagctacctgaatttagtattaaagaacttcgtgatgtttcagcaatagggggcaaagaaatctatctattgtactcagatgaagaaggacttttttatatttatgaccatcaaacctcaaccatttttacaacttctgataaggaagctattaaagatcttttaacactccaaagcattcaaaaggttgtatatgatttaaaaaatatactccataaggtggactttgatgaagctaatcagataaaaaattgtaatgatgttatgttggcttcatatgttttggacagtacacgcagttcgtacgatttggaaacattgtttatttcttatctcaacactgatatagctgcaatcaaagagaatagatgggctggtgctacagttttattaagaaatctttgggatgaactttcaaaactcattgatttaaactcggcccaatacgtttatgagagcatagagatgcctcttgttcccattttatatgaaatggagaaaatcggttttaaggttgacaaaaacactttgcaggagtatacaaaagagattgagagcaagcttttaaagttggaatcacagatttatcaaatagccggtgaatggtttaacataaactcgccaaaacaactctcatatatattattcgaaaaactgaagcttccggttgttaaaaagaccaaaacaggatattcaacagatgccgaggtattagaagagctgtatgataaacatgacataataccgcttattctggattatagacaatatacgaaaatactgacaacttactgtcagggactggttcaggcaataaatcctgcaactggaagaattcataccaactttattcagacaggtacggcaactggaagacttgcaagtgcagagcccaatctgcaaaatattcctgtaaaatatgatgagggaaagctaataagaaaggcatttgttccagatgaaggttatgtgttgatagatgctgattattctcagattgagcttagaatacttgcacatatctctgaggatgaacgactgataaatgcttttaaaaataaccttgatattcattcacagacggcggcagagatctttggtgtggatataagtcaggttacaccaattatgcgaagccaggcaaaagcagttaactttggaattgtatatggtatatctgattatggactttcacgggatataaagatttcaagaaaagaagcagccgagtttattaatcgttattttgaaaagtatcccagagtaaaagaatatttggacaatgtcgtcaagtttgcccgtgaaaacggatttgttttgacaatatttaacaggaaaaggtatatcaaggatataaagtctactaataaaaacctgagaaactatgcagagagaatagcaatgaattcacctatccagggaagtgctgcagatattatgaaaatagcaatgataagagtttataaaaagctaaaagaaaacaatttaaaatcaagaattattctgcaggtccatgacgaacttttgattgaatcaccctatgaagagaaagagatagtaaaggaaatagtaaaatcggagatggaaaatgcggttttattgaaagttcctttggtagttgaagtgaaagaaggttcaaattggtatgaaacaaagtaaaggatcc

SEQ ID NO: 1835 - DNA, 2623 bp, Artificial Sequence
  Description of Artificial Sequence: Synthetic DNA sequence of Caldicellulosiruptor TOK13B DNA Polymerase M575R
atgaaatacctgctgccgaccgctgctgctggtctgctgctcctcgctgcccagccggcgatggccatggaatttgttatttttgatgggaatagtattctgtatagagctttttttgccttgccacagcttactacctcaacaggcatacctacaaatgctatatatggttttttgaatgtgctgttaaaatacttagattctgaaaaaccggattatgtagcagtagcttttgacaaaaaaggcagagctgtccgaaaaagtgaatatgaagaatacaaggctaacagaaaaccgatgccagattctcttcaggttcagataccttacgtaagagaaatacttgctgctctgaacattcctgtactgaaatgtgaagggtatgaagctgatgacgttataggcacacttgtaaatagatttaaagcccaggatttagagattgtgataataaccggagacagagatacacttcagttacttgataaaaatgtaattgtcaaaatagtcacaacaaggtttgacaggacaactgaagatttgtatgctgtagaaaatgtaaaagaaaaatatggtgtttttgcgcatcaggttgttgactataaagcattagtaggtgatgcgtcagacaatataccaggtgttaagggaattggagataaaactgccataaagctgttagaagagtaccagactctggagaatatatatcagaatctaaataacattaaaggagcgctaaaagagaagttggaatcaggaaaagacatggcatttttatcaaaaagactggctactatcatatgcgatttaccaattgaggtgaatcttgaagaattaaaaaccaaagaatgggacaaagaaagactttatcagattttacttcaacttgagtttaaaagctttattaaaagactgggcttttcagaagagattaactatgcaaggcagaactttcagctacctgaatttagtattaaagaacttcgtgatgtttcagcaatagggggcaaagaaatctatctattgtactcagatgaagaaggacttttttatatttatgaccatcaaacctcaaccatttttacaacttctgataaggaagctattaaagatcttttaacactccaaagcattcaaaaggttgtatatgatttaaaaaatatactccataaggtggactttgatgaagctaatcagataaaaaattgtaatgatgttatgttggcttcatatgttttggacagtacacgcagttcgtacgatttggaaacattgtttatttcttatctcaacactgatatagctgcaatcaaagagaatagatgggctggtgctacagttttattaagaaatctttgggatgaactttcaaaactcattgatttaaactcggcccaatacgtttatgagagcatagagatgcctcttgttcccattttatatgaaatggagaaaatcggttttaaggttgacaaaaacactttgcaggagtatacaaaagagattgagagcaagcttttaaagttggaatcacagatttatcaaatagccggtgaatggtttaacataaactcgccaaaacaactctcatatatattattcgaaaaactgaagcttccggttgttaaaaagaccaaaacaggatattcaacagatgccgaggtattagaagagctgtatgataaacatgacataataccgcttattctggattatagacgttatacgaaaatactgacaacttactgtcagggactggttcaggcaataaatcctgcaactggaagaattcataccaactttattcagacaggtacggcaactggaagacttgcaagtgcagagcccaatctgcaaaatattcctgtaaaatatgatgagggaaagctaataagaaaggcatttgttccagatgaaggttatgtgttgatagatgctgattattctcagattgagcttagaatacttgcacatatctctgaggatgaacgactgataaatgcttttaaaaataaccttgatattcattcacagacggcggcagagatctttggtgtggatataagtcaggttacaccaattatgcgaagccaggcaaaagcagttaactttggaattgtatatggtatatctgattatggactttcacgggatataaagatttcaagaaaagaagcagccgagtttattaatcgttattttgaaaagtatcccagagtaaaagaatatttggacaatgtcgtcaagtttgcccgtgaaaacggatttgttttgacaatatttaacaggaaaaggtatatcaaggatataaagtctactaataaaaacctgagaaactatgcagagagaatagcaatgaattcacctatccagggaagtgctgcagatattatgaaaatagcaatgataagagtttataaaaagctaaaagaaaacaatttaaaatcaagaattattctgcaggtccatgacgaacttttgattgaatcaccctatgaagagaaagagatagtaaaggaaatagtaaaatcggagatggaaaatgcggttttattgaaagttcctttggtagttgaagtgaaagaaggttcaaattggtatgaaacaaagtaaaggatcc

SEQ ID NO: 1836 - DNA, 2623 bp, Artificial Sequence
  Description of Artificial Sequence: Synthetic DNA sequence of Caldicellulosiruptor TOK13B DNA Polymerase M575S
atgaaatacctgctgccgaccgctgctgctggtctgctgctcctcgctgcccagccggcgatggccatggaatttgttatttttgatgggaatagtattctgtatagagctttttttgccttgccacagcttactacctcaacaggcatacctacaaatgctatatatggttttttgaatgtgctgttaaaatacttagattctgaaaaaccggattatgtagcagtagcttttgacaaaaaaggcagagctgtccgaaaaagtgaatatgaagaatacaaggctaacagaaaaccgatgccagattctcttcaggttcagataccttacgtaagagaaatacttgctgctctgaacattcctgtactgaaatgtgaagggtatgaagctgatgacgttataggcacacttgtaaatagatttaaagcccaggatttagagattgtgataataaccggagacagagatacacttcagttacttgataaaaatgtaattgtcaaaatagtcacaacaaggtttgacaggacaactgaagatttgtatgctgtagaaaatgtaaaagaaaaatatggtgtttttgcgcatcaggttgttgactataaagcattagtaggtgatgcgtcagacaatataccaggtgttaagggaattggagataaaactgccataaagctgttagaagagtaccagactctggagaatatatatcagaatctaaataacattaaaggagcgctaaaagagaagttggaatcaggaaaagacatggcatttttatcaaaaagactggctactatcatatgcgatttaccaattgaggtgaatcttgaagaattaaaaaccaaagaatgggacaaagaaagactttatcagattttacttcaacttgagtttaaaagctttattaaaagactgggcttttcagaagagattaactatgcaaggcagaactttcagctacctgaatttagtattaaagaacttcgtgatgtttcagcaatagggggcaaagaaatctatctattgtactcagatgaagaaggacttttttatatttatgaccatcaaacctcaaccatttttacaacttctgataaggaagctattaaagatcttttaacactccaaagcattcaaaaggttgtatatgatttaaaaaatatactccataaggtggactttgatgaagctaatcagataaaaaattgtaatgatgttatgttggcttcatatgttttggacagtacacgcagttcgtacgatttggaaacattgtttatttcttatctcaacactgatatagctgcaatcaaagagaatagatgggctggtgctacagttttattaagaaatctttgggatgaactttcaaaactcattgatttaaactcggcccaatacgtttatgagagcatagagatgcctcttgttcccattttatatgaaatggagaaaatcggttttaaggttgacaaaaacactttgcaggagtatacaaaagagattgagagcaagcttttaaagttggaatcacagatttatcaaatagccggtgaatggtttaacataaactcgccaaaacaactctcatatatattattcgaaaaactgaagcttccggttgttaaaaagaccaaaacaggatattcaacagatgccgaggtattagaagagctgtatgataaacatgacataataccgcttattctggattatagatcttatacgaaaatactgacaacttactgtcagggactggttcaggcaataaatcctgcaactggaagaattcataccaactttattcagacaggtacggcaactggaagacttgcaagtgcagagcccaatctgcaaaatattcctgtaaaatatgatgagggaaagctaataagaaaggcatttgttccagatgaaggttatgtgttgatagatgctgattattctcagattgagcttagaatacttgcacatatctctgaggatgaacgactgataaatgcttttaaaaataaccttgatattcattcacagacggcggcagagatctttggtgtggatataagtcaggttacaccaattatgcgaagccaggcaaaagcagttaactttggaattgtatatggtatatctgattatggactttcacgggatataaagatttcaagaaaagaagcagccgagtttattaatcgttattttgaaaagtatcccagagtaaaagaatatttggacaatgtcgtcaagtttgcccgtgaaaacggatttgttttgacaatatttaacaggaaaaggtatatcaaggatataaagtctactaataaaaacctgagaaactatgcagagagaatagcaatgaattcacctatccagggaagtgctgcagatattatgaaaatagcaatgataagagtttataaaaagctaaaagaaaacaatttaaaatcaagaattattctgcaggtccatgacgaacttttgattgaatcaccctatgaagagaaagagatagtaaaggaaatagtaaaatcggagatggaaaatgcggttttattgaaagttcctttggtagttgaagtgaaagaaggttcaaattggtatgaaacaaagtaaaggatcc

SEQ ID NO: 1837 - DNA, 2623 bp, Artificial Sequence
  Description of Artificial Sequence: Synthetic DNA sequence of Caldicellulosiruptor TOK13B DNA Polymerase M575T
atgaaatacctgctgccgaccgctgctgctggtctgctgctcctcgctgcccagccggcgatggccatggaatttgttatttttgatgggaatagtattctgtatagagctttttttgccttgccacagcttactacctcaacaggcatacctacaaatgctatatatggttttttgaatgtgctgttaaaatacttagattctgaaaaaccggattatgtagcagtagcttttgacaaaaaaggcagagctgtccgaaaaagtgaatatgaagaatacaaggctaacagaaaaccgatgccagattctcttcaggttcagataccttacgtaagagaaatacttgctgctctgaacattcctgtactgaaatgtgaagggtatgaagctgatgacgttataggcacacttgtaaatagatttaaagcccaggatttagagattgtgataataaccggagacagagatacacttcagttacttgataaaaatgtaattgtcaaaatagtcacaacaaggtttgacaggacaactgaagatttgtatgctgtagaaaatgtaaaagaaaaatatggtgtttttgcgcatcaggttgttgactataaagcattagtaggtgatgcgtcagacaatataccaggtgttaagggaattggagataaaactgccataaagctgttagaagagtaccagactctggagaatatatatcagaatctaaataacattaaaggagcgctaaaagagaagttggaatcaggaaaagacatggcatttttatcaaaaagactggctactatcatatgcgatttaccaattgaggtgaatcttgaagaattaaaaaccaaagaatgggacaaagaaagactttatcagattttacttcaacttgagtttaaaagctttattaaaagactgggcttttcagaagagattaactatgcaaggcagaactttcagctacctgaatttagtattaaagaacttcgtgatgtttcagcaatagggggcaaagaaatctatctattgtactcagatgaagaaggacttttttatatttatgaccatcaaacctcaaccatttttacaacttctgataaggaagctattaaagatcttttaacactccaaagcattcaaaaggttgtatatgatttaaaaaatatactccataaggtggactttgatgaagctaatcagataaaaaattgtaatgatgttatgttggcttcatatgttttggacagtacacgcagttcgtacgatttggaaacattgtttatttcttatctcaacactgatatagctgcaatcaaagagaatagatgggctggtgctacagttttattaagaaatctttgggatgaactttcaaaactcattgatttaaactcggcccaatacgtttatgagagcatagagatgcctcttgttcccattttatatgaaatggagaaaatcggttttaaggttgacaaaaacactttgcaggagtatacaaaagagattgagagcaagcttttaaagttggaatcacagatttatcaaatagccggtgaatggtttaacataaactcgccaaaacaactctcatatatattattcgaaaaactgaagcttccggttgttaaaaagaccaaaacaggatattcaacagatgccgaggtattagaagagctgtatgataaacatgacataataccgcttattctggattatagaacttatacgaaaatactgacaacttactgtcagggactggttcaggcaataaatcctgcaactggaagaattcataccaactttattcagacaggtacggcaactggaagacttgcaagtgcagagcccaatctgcaaaatattcctgtaaaatatgatgagggaaagctaataagaaaggcatttgttccagatgaaggttatgtgttgatagatgctgattattctcagattgagcttagaatacttgcacatatctctgaggatgaacgactgataaatgcttttaaaaataaccttgatattcattcacagacggcggcagagatctttggtgtggatataagtcaggttacaccaattatgcgaagccaggcaaaagcagttaactttggaattgtatatggtatatctgattatggactttcacgggatataaagatttcaagaaaagaagcagccgagtttattaatcgttattttgaaaagtatcccagagtaaaagaatatttggacaatgtcgtcaagtttgcccgtgaaaacggatttgttttgacaatatttaacaggaaaaggtatatcaaggatataaagtctactaataaaaacctgagaaactatgcagagagaatagcaatgaattcacctatccagggaagtgctgcagatattatgaaaatagcaatgataagagtttataaaaagctaaaagaaaacaatttaaaatcaagaattattctgcaggtccatgacgaacttttgattgaatcaccctatgaagagaaagagatagtaaaggaaatagtaaaatcggagatggaaaatgcggttttattgaaagttcctttggtagttgaagtgaaagaaggttcaaattggtatgaaacaaagtaaaggatcc

SEQ ID NO: 1838 - DNA, 2623 bp, Artificial Sequence
  Description of Artificial Sequence: Synthetic DNA sequence of Caldicellulosiruptor TOK13B DNA Polymerase M575V
atgaaatacctgctgccgaccgctgctgctggtctgctgctcctcgctgcccagccggcgatggccatggaatttgttatttttgatgggaatagtattctgtatagagctttttttgccttgccacagcttactacctcaacaggcatacctacaaatgctatatatggttttttgaatgtgctgttaaaatacttagattctgaaaaaccggattatgtagcagtagcttttgacaaaaaaggcagagctgtccgaaaaagtgaatatgaagaatacaaggctaacagaaaaccgatgccagattctcttcaggttcagataccttacgtaagagaaatacttgctgctctgaacattcctgtactgaaatgtgaagggtatgaagctgatgacgttataggcacacttgtaaatagatttaaagcccaggatttagagattgtgataataaccggagacagagatacacttcagttacttgataaaaatgtaattgtcaaaatagtcacaacaaggtttgacaggacaactgaagatttgtatgctgtagaaaatgtaaaagaaaaatatggtgtttttgcgcatcaggttgttgactataaagcattagtaggtgatgcgtcagacaatataccaggtgttaagggaattggagataaaactgccataaagctgttagaagagtaccagactctggagaatatatatcagaatctaaataacattaaaggagcgctaaaagagaagttggaatcaggaaaagacatggcatttttatcaaaaagactggctactatcatatgcgatttaccaattgaggtgaatcttgaagaattaaaaaccaaagaatgggacaaagaaagactttatcagattttacttcaacttgagtttaaaagctttattaaaagactgggcttttcagaagagattaactatgcaaggcagaactttcagctacctgaatttagtattaaagaacttcgtgatgtttcagcaatagggggcaaagaaatctatctattgtactcagatgaagaaggacttttttatatttatgaccatcaaacctcaaccatttttacaacttctgataaggaagctattaaagatcttttaacactccaaagcattcaaaaggttgtatatgatttaaaaaatatactccataaggtggactttgatgaagctaatcagataaaaaattgtaatgatgttatgttggcttcatatgttttggacagtacacgcagttcgtacgatttggaaacattgtttatttcttatctcaacactgatatagctgcaatcaaagagaatagatgggctggtgctacagttttattaagaaatctttgggatgaactttcaaaactcattgatttaaactcggcccaatacgtttatgagagcatagagatgcctcttgttcccattttatatgaaatggagaaaatcggttttaaggttgacaaaaacactttgcaggagtatacaaaagagattgagagcaagcttttaaagttggaatcacagatttatcaaatagccggtgaatggtttaacataaactcgccaaaacaactctcatatatattattcgaaaaactgaagcttccggttgttaaaaagaccaaaacaggatattcaacagatgccgaggtattagaagagctgtatgataaacatgacataataccgcttattctggattatagagtttatacgaaaatactgacaacttactgtcagggactggttcaggcaataaatcctgcaactggaagaattcataccaactttattcagacaggtacggcaactggaagacttgcaagtgcagagcccaatctgcaaaatattcctgtaaaatatgatgagggaaagctaataagaaaggcatttgttccagatgaaggttatgtgttgatagatgctgattattctcagattgagcttagaatacttgcacatatctctgaggatgaacgactgataaatgcttttaaaaataaccttgatattcattcacagacggcggcagagatctttggtgtggatataagtcaggttacaccaattatgcgaagccaggcaaaagcagttaactttggaattgtatatggtatatctgattatggactttcacgggatataaagatttcaagaaaagaagcagccgagtttattaatcgttattttgaaaagtatcccagagtaaaagaatatttggacaatgtcgtcaagtttgcccgtgaaaacggatttgttttgacaatatttaacaggaaaaggtatatcaaggatataaagtctactaataaaaacctgagaaactatgcagagagaatagcaatgaattcacctatccagggaagtgctgcagatattatgaaaatagcaatgataagagtttataaaaagctaaaagaaaacaatttaaaatcaagaattattctgcaggtccatgacgaacttttgattgaatcaccctatgaagagaaagagatagtaaaggaaatagtaaaatcggagatggaaaatgcggttttattgaaagttcctttggtagttgaagtgaaagaaggttcaaattggtatgaaacaaagtaaaggatcc

SEQ ID NO: 1839 - DNA, 2623 bp, Artificial Sequence
  Description of Artificial Sequence: Synthetic DNA sequence of Caldicellulosiruptor TOK13B DNA Polymerase M575W
atgaaatacctgctgccgaccgctgctgctggtctgctgctcctcgctgcccagccggcgatggccatggaatttgttatttttgatgggaatagtattctgtatagagctttttttgccttgccacagcttactacctcaacaggcatacctacaaatgctatatatggttttttgaatgtgctgttaaaatacttagattctgaaaaaccggattatgtagcagtagcttttgacaaaaaaggcagagctgtccgaaaaagtgaatatgaagaatacaaggctaacagaaaaccgatgccagattctcttcaggttcagataccttacgtaagagaaatacttgctgctctgaacattcctgtactgaaatgtgaagggtatgaagctgatgacgttataggcacacttgtaaatagatttaaagcccaggatttagagattgtgataataaccggagacagagatacacttcagttacttgataaaaatgtaattgtcaaaatagtcacaacaaggtttgacaggacaactgaagatttgtatgctgtagaaaatgtaaaagaaaaatatggtgtttttgcgcatcaggttgttgactataaagcattagtaggtgatgcgtcagacaatataccaggtgttaagggaattggagataaaactgccataaagctgttagaagagtaccagactctggagaatatatatcagaatctaaataacattaaaggagcgctaaaagagaagttggaatcaggaaaagacatggcatttttatcaaaaagactggctactatcatatgcgatttaccaattgaggtgaatcttgaagaattaaaaaccaaagaatgggacaaagaaagactttatcagattttacttcaacttgagtttaaaagctttattaaaagactgggcttttcagaagagattaactatgcaaggcagaactttcagctacctgaatttagtattaaagaacttcgtgatgtttcagcaatagggggcaaagaaatctatctattgtactcagatgaagaaggacttttttatatttatgaccatcaaacctcaaccatttttacaacttctgataaggaagctattaaagatcttttaacactccaaagcattcaaaaggttgtatatgatttaaaaaatatactccataaggtggactttgatgaagctaatcagataaaaaattgtaatgatgttatgttggcttcatatgttttggacagtacacgcagttcgtacgatttggaaacattgtttatttcttatctcaacactgatatagctgcaatcaaagagaatagatgggctggtgctacagttttattaagaaatctttgggatgaactttcaaaactcattgatttaaactcggcccaatacgtttatgagagcatagagatgcctcttgttcccattttatatgaaatggagaaaatcggttttaaggttgacaaaaacactttgcaggagtatacaaaagagattgagagcaagcttttaaagttggaatcacagatttatcaaatagccggtgaatggtttaacataaactcgccaaaacaactctcatatatattattcgaaaaactgaagcttccggttgttaaaaagaccaaaacaggatattcaacagatgccgaggtattagaagagctgtatgataaacatgacataataccgcttattctggattatagatggtatacgaaaatactgacaacttactgtcagggactggttcaggcaataaatcctgcaactggaagaattcataccaactttattcagacaggtacggcaactggaagacttgcaagtgcagagcccaatctgcaaaatattcctgtaaaatatgatgagggaaagctaataagaaaggcatttgttccagatgaaggttatgtgttgatagatgctgattattctcagattgagcttagaatacttgcacatatctctgaggatgaacgactgataaatgcttttaaaaataaccttgatattcattcacagacggcggcagagatctttggtgtggatataagtcaggttacaccaattatgcgaagccaggcaaaagcagttaactttggaattgtatatggtatatctgattatggactttcacgggatataaagatttcaagaaaagaagcagccgagtttattaatcgttattttgaaaagtatcccagagtaaaagaatatttggacaatgtcgtcaagtttgcccgtgaaaacggatttgttttgacaatatttaacaggaaaaggtatatcaaggatataaagtctactaataaaaacctgagaaactatgcagagagaatagcaatgaattcacctatccagggaagtgctgcagatattatgaaaatagcaatgataagagtttataaaaagctaaaagaaaacaatttaaaatcaagaattattctgcaggtccatgacgaacttttgattgaatcaccctatgaagagaaagagatagtaaaggaaatagtaaaatcggagatggaaaatgcggttttattgaaagttcctttggtagttgaagtgaaagaaggttcaaattggtatgaaacaaagtaaaggatcc

SEQ ID NO: 1840 - DNA, 2623 bp, Artificial Sequence
  Description of Artificial Sequence: Synthetic DNA sequence of Caldicellulosiruptor TOK13B DNA Polymerase M575Y
atgaaatacctgctgccgaccgctgctgctggtctgctgctcctcgctgcccagccggcgatggccatggaatttgttatttttgatgggaatagtattctgtatagagctttttttgccttgccacagcttactacctcaacaggcatacctacaaatgctatatatggttttttgaatgtgctgttaaaatacttagattctgaaaaaccggattatgtagcagtagcttttgacaaaaaaggcagagctgtccgaaaaagtgaatatgaagaatacaaggctaacagaaaaccgatgccagattctcttcaggttcagataccttacgtaagagaaatacttgctgctctgaacattcctgtactgaaatgtgaagggtatgaagctgatgacgttataggcacacttgtaaatagatttaaagcccaggatttagagattgtgataataaccggagacagagatacacttcagttacttgataaaaatgtaattgtcaaaatagtcacaacaaggtttgacaggacaactgaagatttgtatgctgtagaaaatgtaaaagaaaaatatggtgtttttgcgcatcaggttgttgactataaagcattagtaggtgatgcgtcagacaatataccaggtgttaagggaattggagataaaactgccataaagctgttagaagagtaccagactctggagaatatatatcagaatctaaataacattaaaggagcgctaaaagagaagttggaatcaggaaaagacatggcatttttatcaaaaagactggctactatcatatgcgatttaccaattgaggtgaatcttgaagaattaaaaaccaaagaatgggacaaagaaagactttatcagattttacttcaacttgagtttaaaagctttattaaaagactgggcttttcagaagagattaactatgcaaggcagaactttcagctacctgaatttagtattaaagaacttcgtgatgtttcagcaatagggggcaaagaaatctatctattgtactcagatgaagaaggacttttttatatttatgaccatcaaacctcaaccatttttacaacttctgataaggaagctattaaagatcttttaacactccaaagcattcaaaaggttgtatatgatttaaaaaatatactccataaggtggactttgatgaagctaatcagataaaaaattgtaatgatgttatgttggcttcatatgttttggacagtacacgcagttcgtacgatttggaaacattgtttatttcttatctcaacactgatatagctgcaatcaaagagaatagatgggctggtgctacagttttattaagaaatctttgggatgaactttcaaaactcattgatttaaactcggcccaatacgtttatgagagcatagagatgcctcttgttcccattttatatgaaatggagaaaatcggttttaaggttgacaaaaacactttgcaggagtatacaaaagagattgagagcaagcttttaaagttggaatcacagatttatcaaatagccggtgaatggtttaacataaactcgccaaaacaactctcatatatattattcgaaaaactgaagcttccggttgttaaaaagaccaaaacaggatattcaacagatgccgaggtattagaagagctgtatgataaacatgacataataccgcttattctggattatagatattatacgaaaatactgacaacttactgtcagggactggttcaggcaataaatcctgcaactggaagaattcataccaactttattcagacaggtacggcaactggaagacttgcaagtgcagagcccaatctgcaaaatattcctgtaaaatatgatgagggaaagctaataagaaaggcatttgttccagatgaaggttatgtgttgatagatgctgattattctcagattgagcttagaatacttgcacatatctctgaggatgaacgactgataaatgcttttaaaaataaccttgatattcattcacagacggcggcagagatctttggtgtggatataagtcaggttacaccaattatgcgaagccaggcaaaagcagttaactttggaattgtatatggtatatctgattatggactttcacgggatataaagatttcaagaaaagaagcagccgagtttattaatcgttattttgaaaagtatcccagagtaaaagaatatttggacaatgtcgtcaagtttgcccgtgaaaacggatttgttttgacaatatttaacaggaaaaggtatatcaaggatataaagtctactaataaaaacctgagaaactatgcagagagaatagcaatgaattcacctatccagggaagtgctgcagatattatgaaaatagcaatgataagagtttataaaaagctaaaagaaaacaatttaaaatcaagaattattctgcaggtccatgacgaacttttgattgaatcaccctatgaagagaaagagatagtaaaggaaatagtaaaatcggagatggaaaatgcggttttattgaaagttcctttggtagttgaagtgaaagaaggttcaaattggtatgaaacaaagtaaaggatcc

SEQ ID NO: 1841 - DNA, 2623 bp, Artificial Sequence
  Description of Artificial Sequence: Synthetic DNA sequence of Caldicellulosiruptor TOK13B DNA Polymerase G606A
atgaaatacctgctgccgaccgctgctgctggtctgctgctcctcgctgcccagccggcgatggccatggaatttgttatttttgatgggaatagtattctgtatagagctttttttgccttgccacagcttactacctcaacaggcatacctacaaatgctatatatggttttttgaatgtgctgttaaaatacttagattctgaaaaaccggattatgtagcagtagcttttgacaaaaaaggcagagctgtccgaaaaagtgaatatgaagaatacaaggctaacagaaaaccgatgccagattctcttcaggttcagataccttacgtaagagaaatacttgctgctctgaacattcctgtactgaaatgtgaagggtatgaagctgatgacgttataggcacacttgtaaatagatttaaagcccaggatttagagattgtgataataaccggagacagagatacacttcagttacttgataaaaatgtaattgtcaaaatagtcacaacaaggtttgacaggacaactgaagatttgtatgctgtagaaaatgtaaaagaaaaatatggtgtttttgcgcatcaggttgttgactataaagcattagtaggtgatgcgtcagacaatataccaggtgttaagggaattggagataaaactgccataaagctgttagaagagtaccagactctggagaatatatatcagaatctaaataacattaaaggagcgctaaaagagaagttggaatcaggaaaagacatggcatttttatcaaaaagactggctactatcatatgcgatttaccaattgaggtgaatcttgaagaattaaaaaccaaagaatgggacaaagaaagactttatcagattttacttcaacttgagtttaaaagctttattaaaagactgggcttttcagaagagattaactatgcaaggcagaactttcagctacctgaatttagtattaaagaacttcgtgatgtttcagcaatagggggcaaagaaatctatctattgtactcagatgaagaaggacttttttatatttatgaccatcaaacctcaaccatttttacaacttctgataaggaagctattaaagatcttttaacactccaaagcattcaaaaggttgtatatgatttaaaaaatatactccataaggtggactttgatgaagctaatcagataaaaaattgtaatgatgttatgttggcttcatatgttttggacagtacacgcagttcgtacgatttggaaacattgtttatttcttatctcaacactgatatagctgcaatcaaagagaatagatgggctggtgctacagttttattaagaaatctttgggatgaactttcaaaactcattgatttaaactcggcccaatacgtttatgagagcatagagatgcctcttgttcccattttatatgaaatggagaaaatcggttttaaggttgacaaaaacactttgcaggagtatacaaaagagattgagagcaagcttttaaagttggaatcacagatttatcaaatagccggtgaatggtttaacataaactcgccaaaacaactctcatatatattattcgaaaaactgaagcttccggttgttaaaaagaccaaaacaggatattcaacagatgccgaggtattagaagagctgtatgataaacatgacataataccgcttattctggattatagaatgtatacgaaaatactgacaacttactgtcagggactggttcaggcaataaatcctgcaactggaagaattcataccaactttattcagacagctacggcaactggaagacttgcaagtgcagagcccaatctgcaaaatattcctgtaaaatatgatgagggaaagctaataagaaaggcatttgttccagatgaaggttatgtgttgatagatgctgattattctcagattgagcttagaatacttgcacatatctctgaggatgaacgactgataaatgcttttaaaaataaccttgatattcattcacagacggcggcagagatctttggtgtggatataagtcaggttacaccaattatgcgaagccaggcaaaagcagttaactttggaattgtatatggtatatctgattatggactttcacgggatataaagatttcaagaaaagaagcagccgagtttattaatcgttattttgaaaagtatcccagagtaaaagaatatttggacaatgtcgtcaagtttgcccgtgaaaacggatttgttttgacaatatttaacaggaaaaggtatatcaaggatataaagtctactaataaaaacctgagaaactatgcagagagaatagcaatgaattcacctatccagggaagtgctgcagatattatgaaaatagcaatgataagagtttataaaaagctaaaagaaaacaatttaaaatcaagaattattctgcaggtccatgacgaacttttgattgaatcaccctatgaagagaaagagatagtaaaggaaatagtaaaatcggagatggaaaatgcggttttattgaaagttcctttggtagttgaagtgaaagaaggttcaaattggtatgaaacaaagtaaaggatcc

SEQ ID NO: 1842 - DNA, 2623 bp, Artificial Sequence
  Description of Artificial Sequence: Synthetic DNA sequence of Caldicellulosiruptor TOK13B DNA Polymerase G606C
atgaaatacctgctgccgaccgctgctgctggtctgctgctcctcgctgcccagccggcgatggccatggaatttgttatttttgatgggaatagtattctgtatagagctttttttgccttgccacagcttactacctcaacaggcatacctacaaatgctatatatggttttttgaatgtgctgttaaaatacttagattctgaaaaaccggattatgtagcagtagcttttgacaaaaaaggcagagctgtccgaaaaagtgaatatgaagaatacaaggctaacagaaaaccgatgccagattctcttcaggttcagataccttacgtaagagaaatacttgctgctctgaacattcctgtactgaaatgtgaagggtatgaagctgatgacgttataggcacacttgtaaatagatttaaagcccaggatttagagattgtgataataaccggagacagagatacacttcagttacttgataaaaatgtaattgtcaaaatagtcacaacaaggtttgacaggacaactgaagatttgtatgctgtagaaaatgtaaaagaaaaatatggtgtttttgcgcatcaggttgttgactataaagcattagtaggtgatgcgtcagacaatataccaggtgttaagggaattggagataaaactgccataaagctgttagaagagtaccagactctggagaatatatatcagaatctaaataacattaaaggagcgctaaaagagaagttggaatcaggaaaagacatggcatttttatcaaaaagactggctactatcatatgcgatttaccaattgaggtgaatcttgaagaattaaaaaccaaagaatgggacaaagaaagactttatcagattttacttcaacttgagtttaaaagctttattaaaagactgggcttttcagaagagattaactatgcaaggcagaactttcagctacctgaatttagtattaaagaacttcgtgatgtttcagcaatagggggcaaagaaatctatctattgtactcagatgaagaaggacttttttatatttatgaccatcaaacctcaaccatttttacaacttctgataaggaagctattaaagatcttttaacactccaaagcattcaaaaggttgtatatgatttaaaaaatatactccataaggtggactttgatgaagctaatcagataaaaaattgtaatgatgttatgttggcttcatatgttttggacagtacacgcagttcgtacgatttggaaacattgtttatttcttatctcaacactgatatagctgcaatcaaagagaatagatgggctggtgctacagttttattaagaaatctttgggatgaactttcaaaactcattgatttaaactcggcccaatacgtttatgagagcatagagatgcctcttgttcccattttatatgaaatggagaaaatcggttttaaggttgacaaaaacactttgcaggagtatacaaaagagattgagagcaagcttttaaagttggaatcacagatttatcaaatagccggtgaatggtttaacataaactcgccaaaacaactctcatatatattattcgaaaaactgaagcttccggttgttaaaaagaccaaaacaggatattcaacagatgccgaggtattagaagagctgtatgataaacatgacataataccgcttattctggattatagaatgtatacgaaaatactgacaacttactgtcagggactggttcaggcaataaatcctgcaactggaagaattcataccaactttattcagacatgtacggcaactggaagacttgcaagtgcagagcccaatctgcaaaatattcctgtaaaatatgatgagggaaagctaataagaaaggcatttgttccagatgaaggttatgtgttgatagatgctgattattctcagattgagcttagaatacttgcacatatctctgaggatgaacgactgataaatgcttttaaaaataaccttgatattcattcacagacggcggcagagatctttggtgtggatataagtcaggttacaccaattatgcgaagccaggcaaaagcagttaactttggaattgtatatggtatatctgattatggactttcacgggatataaagatttcaagaaaagaagcagccgagtttattaatcgttattttgaaaagtatcccagagtaaaagaatatttggacaatgtcgtcaagtttgcccgtgaaaacggatttgttttgacaatatttaacaggaaaaggtatatcaaggatataaagtctactaataaaaacctgagaaactatgcagagagaatagcaatgaattcacctatccagggaagtgctgcagatattatgaaaatagcaatgataagagtttataaaaagctaaaagaaaacaatttaaaatcaagaattattctgcaggtccatgacgaacttttgattgaatcaccctatgaagagaaagagatagtaaaggaaatagtaaaatcggagatggaaaatgcggttttattgaaagttcctttggtagttgaagtgaaagaaggttcaaattggtatgaaacaaagtaaaggatcc

SEQ ID NO: 1843 - DNA, 2623 bp, Artificial Sequence
  Description of Artificial Sequence: Synthetic DNA sequence of Caldicellulosiruptor TOK13B DNA Polymerase G606D
atgaaatacctgctgccgaccgctgctgctggtctgctgctcctcgctgcccagccggcgatggccatggaatttgttatttttgatgggaatagtattctgtatagagctttttttgccttgccacagcttactacctcaacaggcatacctacaaatgctatatatggttttttgaatgtgctgttaaaatacttagattctgaaaaaccggattatgtagcagtagcttttgacaaaaaaggcagagctgtccgaaaaagtgaatatgaagaatacaaggctaacagaaaaccgatgccagattctcttcaggttcagataccttacgtaagagaaatacttgctgctctgaacattcctgtactgaaatgtgaagggtatgaagctgatgacgttataggcacacttgtaaatagatttaaagcccaggatttagagattgtgataataaccggagacagagatacacttcagttacttgataaaaatgtaattgtcaaaatagtcacaacaaggtttgacaggacaactgaagatttgtatgctgtagaaaatgtaaaagaaaaatatggtgtttttgcgcatcaggttgttgactataaagcattagtaggtgatgcgtcagacaatataccaggtgttaagggaattggagataaaactgccataaagctgttagaagagtaccagactctggagaatatatatcagaatctaaataacattaaaggagcgctaaaagagaagttggaatcaggaaaagacatggcatttttatcaaaaagactggctactatcatatgcgatttaccaattgaggtgaatcttgaagaattaaaaaccaaagaatgggacaaagaaagactttatcagattttacttcaacttgagtttaaaagctttattaaaagactgggcttttcagaagagattaactatgcaaggcagaactttcagctacctgaatttagtattaaagaacttcgtgatgtttcagcaatagggggcaaagaaatctatctattgtactcagatgaagaaggacttttttatatttatgaccatcaaacctcaaccatttttacaacttctgataaggaagctattaaagatcttttaacactccaaagcattcaaaaggttgtatatgatttaaaaaatatactccataaggtggactttgatgaagctaatcagataaaaaattgtaatgatgttatgttggcttcatatgttttggacagtacacgcagttcgtacgatttggaaacattgtttatttcttatctcaacactgatatagctgcaatcaaagagaatagatgggctggtgctacagttttattaagaaatctttgggatgaactttcaaaactcattgatttaaactcggcccaatacgtttatgagagcatagagatgcctcttgttcccattttatatgaaatggagaaaatcggttttaaggttgacaaaaacactttgcaggagtatacaaaagagattgagagcaagcttttaaagttggaatcacagatttatcaaatagccggtgaatggtttaacataaactcgccaaaacaactctcatatatattattcgaaaaactgaagcttccggttgttaaaaagaccaaaacaggatattcaacagatgccgaggtattagaagagctgtatgataaacatgacataataccgcttattctggattatagaatgtatacgaaaatactgacaacttactgtcagggactggttcaggcaataaatcctgcaactggaagaattcataccaactttattcagacagatacggcaactggaagacttgcaagtgcagagcccaatctgcaaaatattcctgtaaaatatgatgagggaaagctaataagaaaggcatttgttccagatgaaggttatgtgttgatagatgctgattattctcagattgagcttagaatacttgcacatatctctgaggatgaacgactgataaatgcttttaaaaataaccttgatattcattcacagacggcggcagagatctttggtgtggatataagtcaggttacaccaattatgcgaagccaggcaaaagcagttaactttggaattgtatatggtatatctgattatggactttcacgggatataaagatttcaagaaaagaagcagccgagtttattaatcgttattttgaaaagtatcccagagtaaaagaatatttggacaatgtcgtcaagtttgcccgtgaaaacggatttgttttgacaatatttaacaggaaaaggtatatcaaggatataaagtctactaataaaaacctgagaaactatgcagagagaatagcaatgaattcacctatccagggaagtgctgcagatattatgaaaatagcaatgataagagtttataaaaagctaaaagaaaacaatttaaaatcaagaattattctgcaggtccatgacgaacttttgattgaatcaccctatgaagagaaagagatagtaaaggaaatagtaaaatcggagatggaaaatgcggttttattgaaagttcctttggtagttgaagtgaaagaaggttcaaattggtatgaaacaaagtaaaggatcc

SEQ ID NO: 1844 - DNA, 2623 bp, Artificial Sequence
  Description of Artificial Sequence: Synthetic DNA sequence of Caldicellulosiruptor TOK13B DNA Polymerase G606F
atgaaatacctgctgccgaccgctgctgctggtctgctgctcctcgctgcccagccggcgatggccatggaatttgttatttttgatgggaatagtattctgtatagagctttttttgccttgccacagcttactacctcaacaggcatacctacaaatgctatatatggttttttgaatgtgctgttaaaatacttagattctgaaaaaccggattatgtagcagtagcttttgacaaaaaaggcagagctgtccgaaaaagtgaatatgaagaatacaaggctaacagaaaaccgatgccagattctcttcaggttcagataccttacgtaagagaaatacttgctgctctgaacattcctgtactgaaatgtgaagggtatgaagctgatgacgttataggcacacttgtaaatagatttaaagcccaggatttagagattgtgataataaccggagacagagatacacttcagttacttgataaaaatgtaattgtcaaaatagtcacaacaaggtttgacaggacaactgaagatttgtatgctgtagaaaatgtaaaagaaaaatatggtgtttttgcgcatcaggttgttgactataaagcattagtaggtgatgcgtcagacaatataccaggtgttaagggaattggagataaaactgccataaagctgttagaagagtaccagactctggagaatatatatcagaatctaaataacattaaaggagcgctaaaagagaagttggaatcaggaaaagacatggcatttttatcaaaaagactggctactatcatatgcgatttaccaattgaggtgaatcttgaagaattaaaaaccaaagaatgggacaaagaaagactttatcagattttacttcaacttgagtttaaaagctttattaaaagactgggcttttcagaagagattaactatgcaaggcagaactttcagctacctgaatttagtattaaagaacttcgtgatgtttcagcaatagggggcaaagaaatctatctattgtactcagatgaagaaggacttttttatatttatgaccatcaaacctcaaccatttttacaacttctgataaggaagctattaaagatcttttaacactccaaagcattcaaaaggttgtatatgatttaaaaaatatactccataaggtggactttgatgaagctaatcagataaaaaattgtaatgatgttatgttggcttcatatgttttggacagtacacgcagttcgtacgatttggaaacattgtttatttcttatctcaacactgatatagctgcaatcaaagagaatagatgggctggtgctacagttttattaagaaatctttgggatgaactttcaaaactcattgatttaaactcggcccaatacgtttatgagagcatagagatgcctcttgttcccattttatatgaaatggagaaaatcggttttaaggttgacaaaaacactttgcaggagtatacaaaagagattgagagcaagcttttaaagttggaatcacagatttatcaaatagccggtgaatggtttaacataaactcgccaaaacaactctcatatatattattcgaaaaactgaagcttccggttgttaaaaagaccaaaacaggatattcaacagatgccgaggtattagaagagctgtatgataaacatgacataataccgcttattctggattatagaatgtatacgaaaatactgacaacttactgtcagggactggttcaggcaataaatcctgcaactggaagaattcataccaactttattcagacatttacggcaactggaagacttgcaagtgcagagcccaatctgcaaaatattcctgtaaaatatgatgagggaaagctaataagaaaggcatttgttccagatgaaggttatgtgttgatagatgctgattattctcagattgagcttagaatacttgcacatatctctgaggatgaacgactgataaatgcttttaaaaataaccttgatattcattcacagacggcggcagagatctttggtgtggatataagtcaggttacaccaattatgcgaagccaggcaaaagcagttaactttggaattgtatatggtatatctgattatggactttcacgggatataaagatttcaagaaaagaagcagccgagtttattaatcgttattttgaaaagtatcccagagtaaaagaatatttggacaatgtcgtcaagtttgcccgtgaaaacggatttgttttgacaatatttaacaggaaaaggtatatcaaggatataaagtctactaataaaaacctgagaaactatgcagagagaatagcaatgaattcacctatccagggaagtgctgcagatattatgaaaatagcaatgataagagtttataaaaagctaaaagaaaacaatttaaaatcaagaattattctgcaggtccatgacgaacttttgattgaatcaccctatgaagagaaagagatagtaaaggaaatagtaaaatcggagatggaaaatgcggttttattgaaagttcctttggtagttgaagtgaaagaaggttcaaattggtatgaaacaaagtaaaggatcc

SEQ ID NO: 1845 - DNA, 2623 bp, Artificial Sequence
  Description of Artificial Sequence: Synthetic DNA sequence of Caldicellulosiruptor TOK13B DNA Polymerase G606H
atgaaatacctgctgccgaccgctgctgctggtctgctgctcctcgctgcccagccggcgatggccatggaatttgttatttttgatgggaatagtattctgtatagagctttttttgccttgccacagcttactacctcaacaggcatacctacaaatgctatatatggttttttgaatgtgctgttaaaatacttagattctgaaaaaccggattatgtagcagtagcttttgacaaaaaaggcagagctgtccgaaaaagtgaatatgaagaatacaaggctaacagaaaaccgatgccagattctcttcaggttcagataccttacgtaagagaaatacttgctgctctgaacattcctgtactgaaatgtgaagggtatgaagctgatgacgttataggcacacttgtaaatagatttaaagcccaggatttagagattgtgataataaccggagacagagatacacttcagttacttgataaaaatgtaattgtcaaaatagtcacaacaaggtttgacaggacaactgaagatttgtatgctgtagaaaatgtaaaagaaaaatatggtgtttttgcgcatcaggttgttgactataaagcattagtaggtgatgcgtcagacaatataccaggtgttaagggaattggagataaaactgccataaagctgttagaagagtaccagactctggagaatatatatcagaatctaaataacattaaaggagcgctaaaagagaagttggaatcaggaaaagacatggcatttttatcaaaaagactggctactatcatatgcgatttaccaattgaggtgaatcttgaagaattaaaaaccaaagaatgggacaaagaaagactttatcagattttacttcaacttgagtttaaaagctttattaaaagactgggcttttcagaagagattaactatgcaaggcagaactttcagctacctgaatttagtattaaagaacttcgtgatgtttcagcaatagggggcaaagaaatctatctattgtactcagatgaagaaggacttttttatatttatgaccatcaaacctcaaccatttttacaacttctgataaggaagctattaaagatcttttaacactccaaagcattcaaaaggttgtatatgatttaaaaaatatactccataaggtggactttgatgaagctaatcagataaaaaattgtaatgatgttatgttggcttcatatgttttggacagtacacgcagttcgtacgatttggaaacattgtttatttcttatctcaacactgatatagctgcaatcaaagagaatagatgggctggtgctacagttttattaagaaatctttgggatgaactttcaaaactcattgatttaaactcggcccaatacgtttatgagagcatagagatgcctcttgttcccattttatatgaaatggagaaaatcggttttaaggttgacaaaaacactttgcaggagtatacaaaagagattgagagcaagcttttaaagttggaatcacagatttatcaaatagccggtgaatggtttaacataaactcgccaaaacaactctcatatatattattcgaaaaactgaagcttccggttgttaaaaagaccaaaacaggatattcaacagatgccgaggtattagaagagctgtatgataaacatgacataataccgcttattctggattatagaatgtatacgaaaatactgacaacttactgtcagggactggttcaggcaataaatcctgcaactggaagaattcataccaactttattcagacacatacggcaactggaagacttgcaagtgcagagcccaatctgcaaaatattcctgtaaaatatgatgagggaaagctaataagaaaggcatttgttccagatgaaggttatgtgttgatagatgctgattattctcagattgagcttagaatacttgcacatatctctgaggatgaacgactgataaatgcttttaaaaataaccttgatattcattcacagacggcggcagagatctttggtgtggatataagtcaggttacaccaattatgcgaagccaggcaaaagcagttaactttggaattgtatatggtatatctgattatggactttcacgggatataaagatttcaagaaaagaagcagccgagtttattaatcgttattttgaaaagtatcccagagtaaaagaatatttggacaatgtcgtcaagtttgcccgtgaaaacggatttgttttgacaatatttaacaggaaaaggtatatcaaggatataaagtctactaataaaaacctgagaaactatgcagagagaatagcaatgaattcacctatccagggaagtgctgcagatattatgaaaatagcaatgataagagtttataaaaagctaaaagaaaacaatttaaaatcaagaattattctgcaggtccatgacgaacttttgattgaatcaccctatgaagagaaagagatagtaaaggaaatagtaaaatcggagatggaaaatgcggttttattgaaagttcctttggtagttgaagtgaaagaaggttcaaattggtatgaaacaaagtaaaggatcc

SEQ ID NO: 1846 - DNA, 2623 bp, Artificial Sequence
  Description of Artificial Sequence: Synthetic DNA sequence of Caldicellulosiruptor TOK13B DNA Polymerase G606I
atgaaatacctgctgccgaccgctgctgctggtctgctgctcctcgctgcccagccggcgatggccatggaatttgttatttttgatgggaatagtattctgtatagagctttttttgccttgccacagcttactacctcaacaggcatacctacaaatgctatatatggttttttgaatgtgctgttaaaatacttagattctgaaaaaccggattatgtagcagtagcttttgacaaaaaaggcagagctgtccgaaaaagtgaatatgaagaatacaaggctaacagaaaaccgatgccagattctcttcaggttcagataccttacgtaagagaaatacttgctgctctgaacattcctgtactgaaatgtgaagggtatgaagctgatgacgttataggcacacttgtaaatagatttaaagcccaggatttagagattgtgataataaccggagacagagatacacttcagttacttgataaaaatgtaattgtcaaaatagtcacaacaaggtttgacaggacaactgaagatttgtatgctgtagaaaatgtaaaagaaaaatatggtgtttttgcgcatcaggttgttgactataaagcattagtaggtgatgcgtcagacaatataccaggtgttaagggaattggagataaaactgccataaagctgttagaagagtaccagactctggagaatatatatcagaatctaaataacattaaaggagcgctaaaagagaagttggaatcaggaaaagacatggcatttttatcaaaaagactggctactatcatatgcgatttaccaattgaggtgaatcttgaagaattaaaaaccaaagaatgggacaaagaaagactttatcagattttacttcaacttgagtttaaaagctttattaaaagactgggcttttcagaagagattaactatgcaaggcagaactttcagctacctgaatttagtattaaagaacttcgtgatgtttcagcaatagggggcaaagaaatctatctattgtactcagatgaagaaggacttttttatatttatgaccatcaaacctcaaccatttttacaacttctgataaggaagctattaaagatcttttaacactccaaagcattcaaaaggttgtatatgatttaaaaaatatactccataaggtggactttgatgaagctaatcagataaaaaattgtaatgatgttatgttggcttcatatgttttggacagtacacgcagttcgtacgatttggaaacattgtttatttcttatctcaacactgatatagctgcaatcaaagagaatagatgggctggtgctacagttttattaagaaatctttgggatgaactttcaaaactcattgatttaaactcggcccaatacgtttatgagagcatagagatgcctcttgttcccattttatatgaaatggagaaaatcggttttaaggttgacaaaaacactttgcaggagtatacaaaagagattgagagcaagcttttaaagttggaatcacagatttatcaaatagccggtgaatggtttaacataaactcgccaaaacaactctcatatatattattcgaaaaactgaagcttccggttgttaaaaagaccaaaacaggatattcaacagatgccgaggtattagaagagctgtatgataaacatgacataataccgcttattctggattatagaatgtatacgaaaatactgacaacttactgtcagggactggttcaggcaataaatcctgcaactggaagaattcataccaactttattcagacaattacggcaactggaagacttgcaagtgcagagcccaatctgcaaaatattcctgtaaaatatgatgagggaaagctaataagaaaggcatttgttccagatgaaggttatgtgttgatagatgctgattattctcagattgagcttagaatacttgcacatatctctgaggatgaacgactgataaatgcttttaaaaataaccttgatattcattcacagacggcggcagagatctttggtgtggatataagtcaggttacaccaattatgcgaagccaggcaaaagcagttaactttggaattgtatatggtatatctgattatggactttcacgggatataaagatttcaagaaaagaagcagccgagtttattaatcgttattttgaaaagtatcccagagtaaaagaatatttggacaatgtcgtcaagtttgcccgtgaaaacggatttgttttgacaatatttaacaggaaaaggtatatcaaggatataaagtctactaataaaaacctgagaaactatgcagagagaatagcaatgaattcacctatccagggaagtgctgcagatattatgaaaatagcaatgataagagtttataaaaagctaaaagaaaacaatttaaaatcaagaattattctgcaggtccatgacgaacttttgattgaatcaccctatgaagagaaagagatagtaaaggaaatagtaaaatcggagatggaaaatgcggttttattgaaagttcctttggtagttgaagtgaaagaaggttcaaattggtatgaaacaaagtaaaggatcc

SEQ ID NO: 1847 - DNA, 2623 bp, Artificial Sequence
  Description of Artificial Sequence: Synthetic DNA sequence of Caldicellulosiruptor TOK13B DNA Polymerase G606L
atgaaatacctgctgccgaccgctgctgctggtctgctgctcctcgctgcccagccggcgatggccatggaatttgttatttttgatgggaatagtattctgtatagagctttttttgccttgccacagcttactacctcaacaggcatacctacaaatgctatatatggttttttgaatgtgctgttaaaatacttagattctgaaaaaccggattatgtagcagtagcttttgacaaaaaaggcagagctgtccgaaaaagtgaatatgaagaatacaaggctaacagaaaaccgatgccagattctcttcaggttcagataccttacgtaagagaaatacttgctgctctgaacattcctgtactgaaatgtgaagggtatgaagctgatgacgttataggcacacttgtaaatagatttaaagcccaggatttagagattgtgataataaccggagacagagatacacttcagttacttgataaaaatgtaattgtcaaaatagtcacaacaaggtttgacaggacaactgaagatttgtatgctgtagaaaatgtaaaagaaaaatatggtgtttttgcgcatcaggttgttgactataaagcattagtaggtgatgcgtcagacaatataccaggtgttaagggaattggagataaaactgccataaagctgttagaagagtaccagactctggagaatatatatcagaatctaaataacattaaaggagcgctaaaagagaagttggaatcaggaaaagacatggcatttttatcaaaaagactggctactatcatatgcgatttaccaattgaggtgaatcttgaagaattaaaaaccaaagaatgggacaaagaaagactttatcagattttacttcaacttgagtttaaaagctttattaaaagactgggcttttcagaagagattaactatgcaaggcagaactttcagctacctgaatttagtattaaagaacttcgtgatgtttcagcaatagggggcaaagaaatctatctattgtactcagatgaagaaggacttttttatatttatgaccatcaaacctcaaccatttttacaacttctgataaggaagctattaaagatcttttaacactccaaagcattcaaaaggttgtatatgatttaaaaaatatactccataaggtggactttgatgaagctaatcagataaaaaattgtaatgatgttatgttggcttcatatgttttggacagtacacgcagttcgtacgatttggaaacattgtttatttcttatctcaacactgatatagctgcaatcaaagagaatagatgggctggtgctacagttttattaagaaatctttgggatgaactttcaaaactcattgatttaaactcggcccaatacgtttatgagagcatagagatgcctcttgttcccattttatatgaaatggagaaaatcggttttaaggttgacaaaaacactttgcaggagtatacaaaagagattgagagcaagcttttaaagttggaatcacagatttatcaaatagccggtgaatggtttaacataaactcgccaaaacaactctcatatatattattcgaaaaactgaagcttccggttgttaaaaagaccaaaacaggatattcaacagatgccgaggtattagaagagctgtatgataaacatgacataataccgcttattctggattatagaatgtatacgaaaatactgacaacttactgtcagggactggttcaggcaataaatcctgcaactggaagaattcataccaactttattcagacacttacggcaactggaagacttgcaagtgcagagcccaatctgcaaaatattcctgtaaaatatgatgagggaaagctaataagaaaggcatttgttccagatgaaggttatgtgttgatagatgctgattattctcagattgagcttagaatacttgcacatatctctgaggatgaacgactgataaatgcttttaaaaataaccttgatattcattcacagacggcggcagagatctttggtgtggatataagtcaggttacaccaattatgcgaagccaggcaaaagcagttaactttggaattgtatatggtatatctgattatggactttcacgggatataaagatttcaagaaaagaagcagccgagtttattaatcgttattttgaaaagtatcccagagtaaaagaatatttggacaatgtcgtcaagtttgcccgtgaaaacggatttgttttgacaatatttaacaggaaaaggtatatcaaggatataaagtctactaataaaaacctgagaaactatgcagagagaatagcaatgaattcacctatccagggaagtgctgcagatattatgaaaatagcaatgataagagtttataaaaagctaaaagaaaacaatttaaaatcaagaattattctgcaggtccatgacgaacttttgattgaatcaccctatgaagagaaagagatagtaaaggaaatagtaaaatcggagatggaaaatgcggttttattgaaagttcctttggtagttgaagtgaaagaaggttcaaattggtatgaaacaaagtaaaggatcc

SEQ ID NO: 1848 - DNA, 2623 bp, Artificial Sequence
  Description of Artificial Sequence: Synthetic DNA sequence of Caldicellulosiruptor TOK13B DNA Polymerase G606M
atgaaatacctgctgccgaccgctgctgctggtctgctgctcctcgctgcccagccggcgatggccatggaatttgttatttttgatgggaatagtattctgtatagagctttttttgccttgccacagcttactacctcaacaggcatacctacaaatgctatatatggttttttgaatgtgctgttaaaatacttagattctgaaaaaccggattatgtagcagtagcttttgacaaaaaaggcagagctgtccgaaaaagtgaatatgaagaatacaaggctaacagaaaaccgatgccagattctcttcaggttcagataccttacgtaagagaaatacttgctgctctgaacattcctgtactgaaatgtgaagggtatgaagctgatgacgttataggcacacttgtaaatagatttaaagcccaggatttagagattgtgataataaccggagacagagatacacttcagttacttgataaaaatgtaattgtcaaaatagtcacaacaaggtttgacaggacaactgaagatttgtatgctgtagaaaatgtaaaagaaaaatatggtgtttttgcgcatcaggttgttgactataaagcattagtaggtgatgcgtcagacaatataccaggtgttaagggaattggagataaaactgccataaagctgttagaagagtaccagactctggagaatatatatcagaatctaaataacattaaaggagcgctaaaagagaagttggaatcaggaaaagacatggcatttttatcaaaaagactggctactatcatatgcgatttaccaattgaggtgaatcttgaagaattaaaaaccaaagaatgggacaaagaaagactttatcagattttacttcaacttgagtttaaaagctttattaaaagactgggcttttcagaagagattaactatgcaaggcagaactttcagctacctgaatttagtattaaagaacttcgtgatgtttcagcaatagggggcaaagaaatctatctattgtactcagatgaagaaggacttttttatatttatgaccatcaaacctcaaccatttttacaacttctgataaggaagctattaaagatcttttaacactccaaagcattcaaaaggttgtatatgatttaaaaaatatactccataaggtggactttgatgaagctaatcagataaaaaattgtaatgatgttatgttggcttcatatgttttggacagtacacgcagttcgtacgatttggaaacattgtttatttcttatctcaacactgatatagctgcaatcaaagagaatagatgggctggtgctacagttttattaagaaatctttgggatgaactttcaaaactcattgatttaaactcggcccaatacgtttatgagagcatagagatgcctcttgttcccattttatatgaaatggagaaaatcggttttaaggttgacaaaaacactttgcaggagtatacaaaagagattgagagcaagcttttaaagttggaatcacagatttatcaaatagccggtgaatggtttaacataaactcgccaaaacaactctcatatatattattcgaaaaactgaagcttccggttgttaaaaagaccaaaacaggatattcaacagatgccgaggtattagaagagctgtatgataaacatgacataataccgcttattctggattatagaatgtatacgaaaatactgacaacttactgtcagggactggttcaggcaataaatcctgcaactggaagaattcataccaactttattcagacaatgacggcaactggaagacttgcaagtgcagagcccaatctgcaaaatattcctgtaaaatatgatgagggaaagctaataagaaaggcatttgttccagatgaaggttatgtgttgatagatgctgattattctcagattgagcttagaatacttgcacatatctctgaggatgaacgactgataaatgcttttaaaaataaccttgatattcattcacagacggcggcagagatctttggtgtggatataagtcaggttacaccaattatgcgaagccaggcaaaagcagttaactttggaattgtatatggtatatctgattatggactttcacgggatataaagatttcaagaaaagaagcagccgagtttattaatcgttattttgaaaagtatcccagagtaaaagaatatttggacaatgtcgtcaagtttgcccgtgaaaacggatttgttttgacaatatttaacaggaaaaggtatatcaaggatataaagtctactaataaaaacctgagaaactatgcagagagaatagcaatgaattcacctatccagggaagtgctgcagatattatgaaaatagcaatgataagagtttataaaaagctaaaagaaaacaatttaaaatcaagaattattctgcaggtccatgacgaacttttgattgaatcaccctatgaagagaaagagatagtaaaggaaatagtaaaatcggagatggaaaatgcggttttattgaaagttcctttggtagttgaagtgaaagaaggttcaaattggtatgaaacaaagtaaaggatcc

SEQ ID NO: 1849 - DNA, 2623 bp, Artificial Sequence
  Description of Artificial Sequence: Synthetic DNA sequence of Caldicellulosiruptor TOK13B DNA Polymerase G606N
atgaaatacctgctgccgaccgctgctgctggtctgctgctcctcgctgcccagccggcgatggccatggaatttgttatttttgatgggaatagtattctgtatagagctttttttgccttgccacagcttactacctcaacaggcatacctacaaatgctatatatggttttttgaatgtgctgttaaaatacttagattctgaaaaaccggattatgtagcagtagcttttgacaaaaaaggcagagctgtccgaaaaagtgaatatgaagaatacaaggctaacagaaaaccgatgccagattctcttcaggttcagataccttacgtaagagaaatacttgctgctctgaacattcctgtactgaaatgtgaagggtatgaagctgatgacgttataggcacacttgtaaatagatttaaagcccaggatttagagattgtgataataaccggagacagagatacacttcagttacttgataaaaatgtaattgtcaaaatagtcacaacaaggtttgacaggacaactgaagatttgtatgctgtagaaaatgtaaaagaaaaatatggtgtttttgcgcatcaggttgttgactataaagcattagtaggtgatgcgtcagacaatataccaggtgttaagggaattggagataaaactgccataaagctgttagaagagtaccagactctggagaatatatatcagaatctaaataacattaaaggagcgctaaaagagaagttggaatcaggaaaagacatggcatttttatcaaaaagactggctactatcatatgcgatttaccaattgaggtgaatcttgaagaattaaaaaccaaagaatgggacaaagaaagactttatcagattttacttcaacttgagtttaaaagctttattaaaagactgggcttttcagaagagattaactatgcaaggcagaactttcagctacctgaatttagtattaaagaacttcgtgatgtttcagcaatagggggcaaagaaatctatctattgtactcagatgaagaaggacttttttatatttatgaccatcaaacctcaaccatttttacaacttctgataaggaagctattaaagatcttttaacactccaaagcattcaaaaggttgtatatgatttaaaaaatatactccataaggtggactttgatgaagctaatcagataaaaaattgtaatgatgttatgttggcttcatatgttttggacagtacacgcagttcgtacgatttggaaacattgtttatttcttatctcaacactgatatagctgcaatcaaagagaatagatgggctggtgctacagttttattaagaaatctttgggatgaactttcaaaactcattgatttaaactcggcccaatacgtttatgagagcatagagatgcctcttgttcccattttatatgaaatggagaaaatcggttttaaggttgacaaaaacactttgcaggagtatacaaaagagattgagagcaagcttttaaagttggaatcacagatttatcaaatagccggtgaatggtttaacataaactcgccaaaacaactctcatatatattattcgaaaaactgaagcttccggttgttaaaaagaccaaaacaggatattcaacagatgccgaggtattagaagagctgtatgataaacatgacataataccgcttattctggattatagaatgtatacgaaaatactgacaacttactgtcagggactggttcaggcaataaatcctgcaactggaagaattcataccaactttattcagacaaatacggcaactggaagacttgcaagtgcagagcccaatctgcaaaatattcctgtaaaatatgatgagggaaagctaataagaaaggcatttgttccagatgaaggttatgtgttgatagatgctgattattctcagattgagcttagaatacttgcacatatctctgaggatgaacgactgataaatgcttttaaaaataaccttgatattcattcacagacggcggcagagatctttggtgtggatataagtcaggttacaccaattatgcgaagccaggcaaaagcagttaactttggaattgtatatggtatatctgattatggactttcacgggatataaagatttcaagaaaagaagcagccgagtttattaatcgttattttgaaaagtatcccagagtaaaagaatatttggacaatgtcgtcaagtttgcccgtgaaaacggatttgttttgacaatatttaacaggaaaaggtatatcaaggatataaagtctactaataaaaacctgagaaactatgcagagagaatagcaatgaattcacctatccagggaagtgctgcagatattatgaaaatagcaatgataagagtttataaaaagctaaaagaaaacaatttaaaatcaagaattattctgcaggtccatgacgaacttttgattgaatcaccctatgaagagaaagagatagtaaaggaaatagtaaaatcggagatggaaaatgcggttttattgaaagttcctttggtagttgaagtgaaagaaggttcaaattggtatgaaacaaagtaaaggatcc

SEQ ID NO: 1850 - DNA, 2623 bp, Artificial Sequence
  Description of Artificial Sequence: Synthetic DNA sequence of Caldicellulosiruptor TOK13B DNA Polymerase G606P
atgaaatacctgctgccgaccgctgctgctggtctgctgctcctcgctgcccagccggcgatggccatggaatttgttatttttgatgggaatagtattctgtatagagctttttttgccttgccacagcttactacctcaacaggcatacctacaaatgctatatatggttttttgaatgtgctgttaaaatacttagattctgaaaaaccggattatgtagcagtagcttttgacaaaaaaggcagagctgtccgaaaaagtgaatatgaagaatacaaggctaacagaaaaccgatgccagattctcttcaggttcagataccttacgtaagagaaatacttgctgctctgaacattcctgtactgaaatgtgaagggtatgaagctgatgacgttataggcacacttgtaaatagatttaaagcccaggatttagagattgtgataataaccggagacagagatacacttcagttacttgataaaaatgtaattgtcaaaatagtcacaacaaggtttgacaggacaactgaagatttgtatgctgtagaaaatgtaaaagaaaaatatggtgtttttgcgcatcaggttgttgactataaagcattagtaggtgatgcgtcagacaatataccaggtgttaagggaattggagataaaactgccataaagctgttagaagagtaccagactctggagaatatatatcagaatctaaataacattaaaggagcgctaaaagagaagttggaatcaggaaaagacatggcatttttatcaaaaagactggctactatcatatgcgatttaccaattgaggtgaatcttgaagaattaaaaaccaaagaatgggacaaagaaagactttatcagattttacttcaacttgagtttaaaagctttattaaaagactgggcttttcagaagagattaactatgcaaggcagaactttcagctacctgaatttagtattaaagaacttcgtgatgtttcagcaatagggggcaaagaaatctatctattgtactcagatgaagaaggacttttttatatttatgaccatcaaacctcaaccatttttacaacttctgataaggaagctattaaagatcttttaacactccaaagcattcaaaaggttgtatatgatttaaaaaatatactccataaggtggactttgatgaagctaatcagataaaaaattgtaatgatgttatgttggcttcatatgttttggacagtacacgcagttcgtacgatttggaaacattgtttatttcttatctcaacactgatatagctgcaatcaaagagaatagatgggctggtgctacagttttattaagaaatctttgggatgaactttcaaaactcattgatttaaactcggcccaatacgtttatgagagcatagagatgcctcttgttcccattttatatgaaatggagaaaatcggttttaaggttgacaaaaacactttgcaggagtatacaaaagagattgagagcaagcttttaaagttggaatcacagatttatcaaatagccggtgaatggtttaacataaactcgccaaaacaactctcatatatattattcgaaaaactgaagcttccggttgttaaaaagaccaaaacaggatattcaacagatgccgaggtattagaagagctgtatgataaacatgacataataccgcttattctggattatagaatgtatacgaaaatactgacaacttactgtcagggactggttcaggcaataaatcctgcaactggaagaattcataccaactttattcagacacctacggcaactggaagacttgcaagtgcagagcccaatctgcaaaatattcctgtaaaatatgatgagggaaagctaataagaaaggcatttgttccagatgaaggttatgtgttgatagatgctgattattctcagattgagcttagaatacttgcacatatctctgaggatgaacgactgataaatgcttttaaaaataaccttgatattcattcacagacggcggcagagatctttggtgtggatataagtcaggttacaccaattatgcgaagccaggcaaaagcagttaactttggaattgtatatggtatatctgattatggactttcacgggatataaagatttcaagaaaagaagcagccgagtttattaatcgttattttgaaaagtatcccagagtaaaagaatatttggacaatgtcgtcaagtttgcccgtgaaaacggatttgttttgacaatatttaacaggaaaaggtatatcaaggatataaagtctactaataaaaacctgagaaactatgcagagagaatagcaatgaattcacctatccagggaagtgctgcagatattatgaaaatagcaatgataagagtttataaaaagctaaaagaaaacaatttaaaatcaagaattattctgcaggtccatgacgaacttttgattgaatcaccctatgaagagaaagagatagtaaaggaaatagtaaaatcggagatggaaaatgcggttttattgaaagttcctttggtagttgaagtgaaagaaggttcaaattggtatgaaacaaagtaaaggatcc

SEQ ID NO: 1851 - DNA, 2623 bp, Artificial Sequence
  Description of Artificial Sequence: Synthetic DNA sequence of Caldicellulosiruptor TOK13B DNA Polymerase G606Q
atgaaatacctgctgccgaccgctgctgctggtctgctgctcctcgctgcccagccggcgatggccatggaatttgttatttttgatgggaatagtattctgtatagagctttttttgccttgccacagcttactacctcaacaggcatacctacaaatgctatatatggttttttgaatgtgctgttaaaatacttagattctgaaaaaccggattatgtagcagtagcttttgacaaaaaaggcagagctgtccgaaaaagtgaatatgaagaatacaaggctaacagaaaaccgatgccagattctcttcaggttcagataccttacgtaagagaaatacttgctgctctgaacattcctgtactgaaatgtgaagggtatgaagctgatgacgttataggcacacttgtaaatagatttaaagcccaggatttagagattgtgataataaccggagacagagatacacttcagttacttgataaaaatgtaattgtcaaaatagtcacaacaaggtttgacaggacaactgaagatttgtatgctgtagaaaatgtaaaagaaaaatatggtgtttttgcgcatcaggttgttgactataaagcattagtaggtgatgcgtcagacaatataccaggtgttaagggaattggagataaaactgccataaagctgttagaagagtaccagactctggagaatatatatcagaatctaaataacattaaaggagcgctaaaagagaagttggaatcaggaaaagacatggcatttttatcaaaaagactggctactatcatatgcgatttaccaattgaggtgaatcttgaagaattaaaaaccaaagaatgggacaaagaaagactttatcagattttacttcaacttgagtttaaaagctttattaaaagactgggcttttcagaagagattaactatgcaaggcagaactttcagctacctgaatttagtattaaagaacttcgtgatgtttcagcaatagggggcaaagaaatctatctattgtactcagatgaagaaggacttttttatatttatgaccatcaaacctcaaccatttttacaacttctgataaggaagctattaaagatcttttaacactccaaagcattcaaaaggttgtatatgatttaaaaaatatactccataaggtggactttgatgaagctaatcagataaaaaattgtaatgatgttatgttggcttcatatgttttggacagtacacgcagttcgtacgatttggaaacattgtttatttcttatctcaacactgatatagctgcaatcaaagagaatagatgggctggtgctacagttttattaagaaatctttgggatgaactttcaaaactcattgatttaaactcggcccaatacgtttatgagagcatagagatgcctcttgttcccattttatatgaaatggagaaaatcggttttaaggttgacaaaaacactttgcaggagtatacaaaagagattgagagcaagcttttaaagttggaatcacagatttatcaaatagccggtgaatggtttaacataaactcgccaaaacaactctcatatatattattcgaaaaactgaagcttccggttgttaaaaagaccaaaacaggatattcaacagatgccgaggtattagaagagctgtatgataaacatgacataataccgcttattctggattatagaatgtatacgaaaatactgacaacttactgtcagggactggttcaggcaataaatcctgcaactggaagaattcataccaactttattcagacacaaacggcaactggaagacttgcaagtgcagagcccaatctgcaaaatattcctgtaaaatatgatgagggaaagctaataagaaaggcatttgttccagatgaaggttatgtgttgatagatgctgattattctcagattgagcttagaatacttgcacatatctctgaggatgaacgactgataaatgcttttaaaaataaccttgatattcattcacagacggcggcagagatctttggtgtggatataagtcaggttacaccaattatgcgaagccaggcaaaagcagttaactttggaattgtatatggtatatctgattatggactttcacgggatataaagatttcaagaaaagaagcagccgagtttattaatcgttattttgaaaagtatcccagagtaaaagaatatttggacaatgtcgtcaagtttgcccgtgaaaacggatttgttttgacaatatttaacaggaaaaggtatatcaaggatataaagtctactaataaaaacctgagaaactatgcagagagaatagcaatgaattcacctatccagggaagtgctgcagatattatgaaaatagcaatgataagagtttataaaaagctaaaagaaaacaatttaaaatcaagaattattctgcaggtccatgacgaacttttgattgaatcaccctatgaagagaaagagatagtaaaggaaatagtaaaatcggagatggaaaatgcggttttattgaaagttcctttggtagttgaagtgaaagaaggttcaaattggtatgaaacaaagtaaaggatcc

SEQ ID NO: 1852 - DNA, 2623 bp, Artificial Sequence
  Description of Artificial Sequence: Synthetic DNA sequence of Caldicellulosiruptor TOK13B DNA Polymerase G606R
atgaaatacctgctgccgaccgctgctgctggtctgctgctcctcgctgcccagccggcgatggccatggaatttgttatttttgatgggaatagtattctgtatagagctttttttgccttgccacagcttactacctcaacaggcatacctacaaatgctatatatggttttttgaatgtgctgttaaaatacttagattctgaaaaaccggattatgtagcagtagcttttgacaaaaaaggcagagctgtccgaaaaagtgaatatgaagaatacaaggctaacagaaaaccgatgccagattctcttcaggttcagataccttacgtaagagaaatacttgctgctctgaacattcctgtactgaaatgtgaagggtatgaagctgatgacgttataggcacacttgtaaatagatttaaagcccaggatttagagattgtgataataaccggagacagagatacacttcagttacttgataaaaatgtaattgtcaaaatagtcacaacaaggtttgacaggacaactgaagatttgtatgctgtagaaaatgtaaaagaaaaatatggtgtttttgcgcatcaggttgttgactataaagcattagtaggtgatgcgtcagacaatataccaggtgttaagggaattggagataaaactgccataaagctgttagaagagtaccagactctggagaatatatatcagaatctaaataacattaaaggagcgctaaaagagaagttggaatcaggaaaagacatggcatttttatcaaaaagactggctactatcatatgcgatttaccaattgaggtgaatcttgaagaattaaaaaccaaagaatgggacaaagaaagactttatcagattttacttcaacttgagtttaaaagctttattaaaagactgggcttttcagaagagattaactatgcaaggcagaactttcagctacctgaatttagtattaaagaacttcgtgatgtttcagcaatagggggcaaagaaatctatctattgtactcagatgaagaaggacttttttatatttatgaccatcaaacctcaaccatttttacaacttctgataaggaagctattaaagatcttttaacactccaaagcattcaaaaggttgtatatgatttaaaaaatatactccataaggtggactttgatgaagctaatcagataaaaaattgtaatgatgttatgttggcttcatatgttttggacagtacacgcagttcgtacgatttggaaacattgtttatttcttatctcaacactgatatagctgcaatcaaagagaatagatgggctggtgctacagttttattaagaaatctttgggatgaactttcaaaactcattgatttaaactcggcccaatacgtttatgagagcatagagatgcctcttgttcccattttatatgaaatggagaaaatcggttttaaggttgacaaaaacactttgcaggagtatacaaaagagattgagagcaagcttttaaagttggaatcacagatttatcaaatagccggtgaatggtttaacataaactcgccaaaacaactctcatatatattattcgaaaaactgaagcttccggttgttaaaaagaccaaaacaggatattcaacagatgccgaggtattagaagagctgtatgataaacatgacataataccgcttattctggattatagaatgtatacgaaaatactgacaacttactgtcagggactggttcaggcaataaatcctgcaactggaagaattcataccaactttattcagacacgtacggcaactggaagacttgcaagtgcagagcccaatctgcaaaatattcctgtaaaatatgatgagggaaagctaataagaaaggcatttgttccagatgaaggttatgtgttgatagatgctgattattctcagattgagcttagaatacttgcacatatctctgaggatgaacgactgataaatgcttttaaaaataaccttgatattcattcacagacggcggcagagatctttggtgtggatataagtcaggttacaccaattatgcgaagccaggcaaaagcagttaactttggaattgtatatggtatatctgattatggactttcacgggatataaagatttcaagaaaagaagcagccgagtttattaatcgttattttgaaaagtatcccagagtaaaagaatatttggacaatgtcgtcaagtttgcccgtgaaaacggatttgttttgacaatatttaacaggaaaaggtatatcaaggatataaagtctactaataaaaacctgagaaactatgcagagagaatagcaatgaattcacctatccagggaagtgctgcagatattatgaaaatagcaatgataagagtttataaaaagctaaaagaaaacaatttaaaatcaagaattattctgcaggtccatgacgaacttttgattgaatcaccctatgaagagaaagagatagtaaaggaaatagtaaaatcggagatggaaaatgcggttttattgaaagttcctttggtagttgaagtgaaagaaggttcaaattggtatgaaacaaagtaaaggatcc

SEQ ID NO: 1853 - DNA, 2623 bp, Artificial Sequence
  Description of Artificial Sequence: Synthetic DNA sequence of Caldicellulosiruptor TOK13B DNA Polymerase G606S
atgaaatacctgctgccgaccgctgctgctggtctgctgctcctcgctgcccagccggcgatggccatggaatttgttatttttgatgggaatagtattctgtatagagctttttttgccttgccacagcttactacctcaacaggcatacctacaaatgctatatatggttttttgaatgtgctgttaaaatacttagattctgaaaaaccggattatgtagcagtagcttttgacaaaaaaggcagagctgtccgaaaaagtgaatatgaagaatacaaggctaacagaaaaccgatgccagattctcttcaggttcagataccttacgtaagagaaatacttgctgctctgaacattcctgtactgaaatgtgaagggtatgaagctgatgacgttataggcacacttgtaaatagatttaaagcccaggatttagagattgtgataataaccggagacagagatacacttcagttacttgataaaaatgtaattgtcaaaatagtcacaacaaggtttgacaggacaactgaagatttgtatgctgtagaaaatgtaaaagaaaaatatggtgtttttgcgcatcaggttgttgactataaagcattagtaggtgatgcgtcagacaatataccaggtgttaagggaattggagataaaactgccataaagctgttagaagagtaccagactctggagaatatatatcagaatctaaataacattaaaggagcgctaaaagagaagttggaatcaggaaaagacatggcatttttatcaaaaagactggctactatcatatgcgatttaccaattgaggtgaatcttgaagaattaaaaaccaaagaatgggacaaagaaagactttatcagattttacttcaacttgagtttaaaagctttattaaaagactgggcttttcagaagagattaactatgcaaggcagaactttcagctacctgaatttagtattaaagaacttcgtgatgtttcagcaatagggggcaaagaaatctatctattgtactcagatgaagaaggacttttttatatttatgaccatcaaacctcaaccatttttacaacttctgataaggaagctattaaagatcttttaacactccaaagcattcaaaaggttgtatatgatttaaaaaatatactccataaggtggactttgatgaagctaatcagataaaaaattgtaatgatgttatgttggcttcatatgttttggacagtacacgcagttcgtacgatttggaaacattgtttatttcttatctcaacactgatatagctgcaatcaaagagaatagatgggctggtgctacagttttattaagaaatctttgggatgaactttcaaaactcattgatttaaactcggcccaatacgtttatgagagcatagagatgcctcttgttcccattttatatgaaatggagaaaatcggttttaaggttgacaaaaacactttgcaggagtatacaaaagagattgagagcaagcttttaaagttggaatcacagatttatcaaatagccggtgaatggtttaacataaactcgccaaaacaactctcatatatattattcgaaaaactgaagcttccggttgttaaaaagaccaaaacaggatattcaacagatgccgaggtattagaagagctgtatgataaacatgacataataccgcttattctggattatagaatgtatacgaaaatactgacaacttactgtcagggactggttcaggcaataaatcctgcaactggaagaattcataccaactttattcagacatctacggcaactggaagacttgcaagtgcagagcccaatctgcaaaatattcctgtaaaatatgatgagggaaagctaataagaaaggcatttgttccagatgaaggttatgtgttgatagatgctgattattctcagattgagcttagaatacttgcacatatctctgaggatgaacgactgataaatgcttttaaaaataaccttgatattcattcacagacggcggcagagatctttggtgtggatataagtcaggttacaccaattatgcgaagccaggcaaaagcagttaactttggaattgtatatggtatatctgattatggactttcacgggatataaagatttcaagaaaagaagcagccgagtttattaatcgttattttgaaaagtatcccagagtaaaagaatatttggacaatgtcgtcaagtttgcccgtgaaaacggatttgttttgacaatatttaacaggaaaaggtatatcaaggatataaagtctactaataaaaacctgagaaactatgcagagagaatagcaatgaattcacctatccagggaagtgctgcagatattatgaaaatagcaatgataagagtttataaaaagctaaaagaaaacaatttaaaatcaagaattattctgcaggtccatgacgaacttttgattgaatcaccctatgaagagaaagagatagtaaaggaaatagtaaaatcggagatggaaaatgcggttttattgaaagttcctttggtagttgaagtgaaagaaggttcaaattggtatgaaacaaagtaaaggatcc

SEQ ID NO: 1854 - DNA, 2623 bp, Artificial Sequence
  Description of Artificial Sequence: Synthetic DNA sequence of Caldicellulosiruptor TOK13B DNA Polymerase G606T
atgaaatacctgctgccgaccgctgctgctggtctgctgctcctcgctgcccagccggcgatggccatggaatttgttatttttgatgggaatagtattctgtatagagctttttttgccttgccacagcttactacctcaacaggcatacctacaaatgctatatatggttttttgaatgtgctgttaaaatacttagattctgaaaaaccggattatgtagcagtagcttttgacaaaaaaggcagagctgtccgaaaaagtgaatatgaagaatacaaggctaacagaaaaccgatgccagattctcttcaggttcagataccttacgtaagagaaatacttgctgctctgaacattcctgtactgaaatgtgaagggtatgaagctgatgacgttataggcacacttgtaaatagatttaaagcccaggatttagagattgtgataataaccggagacagagatacacttcagttacttgataaaaatgtaattgtcaaaatagtcacaacaaggtttgacaggacaactgaagatttgtatgctgtagaaaatgtaaaagaaaaatatggtgtttttgcgcatcaggttgttgactataaagcattagtaggtgatgcgtcagacaatataccaggtgttaagggaattggagataaaactgccataaagctgttagaagagtaccagactctggagaatatatatcagaatctaaataacattaaaggagcgctaaaagagaagttggaatcaggaaaagacatggcatttttatcaaaaagactggctactatcatatgcgatttaccaattgaggtgaatcttgaagaattaaaaaccaaagaatgggacaaagaaagactttatcagattttacttcaacttgagtttaaaagctttattaaaagactgggcttttcagaagagattaactatgcaaggcagaactttcagctacctgaatttagtattaaagaacttcgtgatgtttcagcaatagggggcaaagaaatctatctattgtactcagatgaagaaggacttttttatatttatgaccatcaaacctcaaccatttttacaacttctgataaggaagctattaaagatcttttaacactccaaagcattcaaaaggttgtatatgatttaaaaaatatactccataaggtggactttgatgaagctaatcagataaaaaattgtaatgatgttatgttggcttcatatgttttggacagtacacgcagttcgtacgatttggaaacattgtttatttcttatctcaacactgatatagctgcaatcaaagagaatagatgggctggtgctacagttttattaagaaatctttgggatgaactttcaaaactcattgatttaaactcggcccaatacgtttatgagagcatagagatgcctcttgttcccattttatatgaaatggagaaaatcggttttaaggttgacaaaaacactttgcaggagtatacaaaagagattgagagcaagcttttaaagttggaatcacagatttatcaaatagccggtgaatggtttaacataaactcgccaaaacaactctcatatatattattcgaaaaactgaagcttccggttgttaaaaagaccaaaacaggatattcaacagatgccgaggtattagaagagctgtatgataaacatgacataataccgcttattctggattatagaatgtatacgaaaatactgacaacttactgtcagggactggttcaggcaataaatcctgcaactggaagaattcataccaactttattcagacaactacggcaactggaagacttgcaagtgcagagcccaatctgcaaaatattcctgtaaaatatgatgagggaaagctaataagaaaggcatttgttccagatgaaggttatgtgttgatagatgctgattattctcagattgagcttagaatacttgcacatatctctgaggatgaacgactgataaatgcttttaaaaataaccttgatattcattcacagacggcggcagagatctttggtgtggatataagtcaggttacaccaattatgcgaagccaggcaaaagcagttaactttggaattgtatatggtatatctgattatggactttcacgggatataaagatttcaagaaaagaagcagccgagtttattaatcgttattttgaaaagtatcccagagtaaaagaatatttggacaatgtcgtcaagtttgcccgtgaaaacggatttgttttgacaatatttaacaggaaaaggtatatcaaggatataaagtctactaataaaaacctgagaaactatgcagagagaatagcaatgaattcacctatccagggaagtgctgcagatattatgaaaatagcaatgataagagtttataaaaagctaaaagaaaacaatttaaaatcaagaattattctgcaggtccatgacgaacttttgattgaatcaccctatgaagagaaagagatagtaaaggaaatagtaaaatcggagatggaaaatgcggttttattgaaagttcctttggtagttgaagtgaaagaaggttcaaattggtatgaaacaaagtaaaggatcc

SEQ ID NO: 1855 - DNA, 2623 bp, Artificial Sequence
  Description of Artificial Sequence: Synthetic DNA sequence of Caldicellulosiruptor TOK13B DNA Polymerase G606V
atgaaatacctgctgccgaccgctgctgctggtctgctgctcctcgctgcccagccggcgatggccatggaatttgttatttttgatgggaatagtattctgtatagagctttttttgccttgccacagcttactacctcaacaggcatacctacaaatgctatatatggttttttgaatgtgctgttaaaatacttagattctgaaaaaccggattatgtagcagtagcttttgacaaaaaaggcagagctgtccgaaaaagtgaatatgaagaatacaaggctaacagaaaaccgatgccagattctcttcaggttcagataccttacgtaagagaaatacttgctgctctgaacattcctgtactgaaatgtgaagggtatgaagctgatgacgttataggcacacttgtaaatagatttaaagcccaggatttagagattgtgataataaccggagacagagatacacttcagttacttgataaaaatgtaattgtcaaaatagtcacaacaaggtttgacaggacaactgaagatttgtatgctgtagaaaatgtaaaagaaaaatatggtgtttttgcgcatcaggttgttgactataaagcattagtaggtgatgcgtcagacaatataccaggtgttaagggaattggagataaaactgccataaagctgttagaagagtaccagactctggagaatatatatcagaatctaaataacattaaaggagcgctaaaagagaagttggaatcaggaaaagacatggcatttttatcaaaaagactggctactatcatatgcgatttaccaattgaggtgaatcttgaagaattaaaaaccaaagaatgggacaaagaaagactttatcagattttacttcaacttgagtttaaaagctttattaaaagactgggcttttcagaagagattaactatgcaaggcagaactttcagctacctgaatttagtattaaagaacttcgtgatgtttcagcaatagggggcaaagaaatctatctattgtactcagatgaagaaggacttttttatatttatgaccatcaaacctcaaccatttttacaacttctgataaggaagctattaaagatcttttaacactccaaagcattcaaaaggttgtatatgatttaaaaaatatactccataaggtggactttgatgaagctaatcagataaaaaattgtaatgatgttatgttggcttcatatgttttggacagtacacgcagttcgtacgatttggaaacattgtttatttcttatctcaacactgatatagctgcaatcaaagagaatagatgggctggtgctacagttttattaagaaatctttgggatgaactttcaaaactcattgatttaaactcggcccaatacgtttatgagagcatagagatgcctcttgttcccattttatatgaaatggagaaaatcggttttaaggttgacaaaaacactttgcaggagtatacaaaagagattgagagcaagcttttaaagttggaatcacagatttatcaaatagccggtgaatggtttaacataaactcgccaaaacaactctcatatatattattcgaaaaactgaagcttccggttgttaaaaagaccaaaacaggatattcaacagatgccgaggtattagaagagctgtatgataaacatgacataataccgcttattctggattatagaatgtatacgaaaatactgacaacttactgtcagggactggttcaggcaataaatcctgcaactggaagaattcataccaactttattcagacagttacggcaactggaagacttgcaagtgcagagcccaatctgcaaaatattcctgtaaaatatgatgagggaaagctaataagaaaggcatttgttccagatgaaggttatgtgttgatagatgctgattattctcagattgagcttagaatacttgcacatatctctgaggatgaacgactgataaatgcttttaaaaataaccttgatattcattcacagacggcggcagagatctttggtgtggatataagtcaggttacaccaattatgcgaagccaggcaaaagcagttaactttggaattgtatatggtatatctgattatggactttcacgggatataaagatttcaagaaaagaagcagccgagtttattaatcgttattttgaaaagtatcccagagtaaaagaatatttggacaatgtcgtcaagtttgcccgtgaaaacggatttgttttgacaatatttaacaggaaaaggtatatcaaggatataaagtctactaataaaaacctgagaaactatgcagagagaatagcaatgaattcacctatccagggaagtgctgcagatattatgaaaatagcaatgataagagtttataaaaagctaaaagaaaacaatttaaaatcaagaattattctgcaggtccatgacgaacttttgattgaatcaccctatgaagagaaagagatagtaaaggaaatagtaaaatcggagatggaaaatgcggttttattgaaagttcctttggtagttgaagtgaaagaaggttcaaattggtatgaaacaaagtaaaggatcc

SEQ ID NO: 1856 - DNA, 2623 bp, Artificial Sequence
  Description of Artificial Sequence: Synthetic DNA sequence of Caldicellulosiruptor TOK13B DNA Polymerase G606W
atgaaatacctgctgccgaccgctgctgctggtctgctgctcctcgctgcccagccggcgatggccatggaatttgttatttttgatgggaatagtattctgtatagagctttttttgccttgccacagcttactacctcaacaggcatacctacaaatgctatatatggttttttgaatgtgctgttaaaatacttagattctgaaaaaccggattatgtagcagtagcttttgacaaaaaaggcagagctgtccgaaaaagtgaatatgaagaatacaaggctaacagaaaaccgatgccagattctcttcaggttcagataccttacgtaagagaaatacttgctgctctgaacattcctgtactgaaatgtgaagggtatgaagctgatgacgttataggcacacttgtaaatagatttaaagcccaggatttagagattgtgataataaccggagacagagatacacttcagttacttgataaaaatgtaattgtcaaaatagtcacaacaaggtttgacaggacaactgaagatttgtatgctgtagaaaatgtaaaagaaaaatatggtgtttttgcgcatcaggttgttgactataaagcattagtaggtgatgcgtcagacaatataccaggtgttaagggaattggagataaaactgccataaagctgttagaagagtaccagactctggagaatatatatcagaatctaaataacattaaaggagcgctaaaagagaagttggaatcaggaaaagacatggcatttttatcaaaaagactggctactatcatatgcgatttaccaattgaggtgaatcttgaagaattaaaaaccaaagaatgggacaaagaaagactttatcagattttacttcaacttgagtttaaaagctttattaaaagactgggcttttcagaagagattaactatgcaaggcagaactttcagctacctgaatttagtattaaagaacttcgtgatgtttcagcaatagggggcaaagaaatctatctattgtactcagatgaagaaggacttttttatatttatgaccatcaaacctcaaccatttttacaacttctgataaggaagctattaaagatcttttaacactccaaagcattcaaaaggttgtatatgatttaaaaaatatactccataaggtggactttgatgaagctaatcagataaaaaattgtaatgatgttatgttggcttcatatgttttggacagtacacgcagttcgtacgatttggaaacattgtttatttcttatctcaacactgatatagctgcaatcaaagagaatagatgggctggtgctacagttttattaagaaatctttgggatgaactttcaaaactcattgatttaaactcggcccaatacgtttatgagagcatagagatgcctcttgttcccattttatatgaaatggagaaaatcggttttaaggttgacaaaaacactttgcaggagtatacaaaagagattgagagcaagcttttaaagttggaatcacagatttatcaaatagccggtgaatggtttaacataaactcgccaaaacaactctcatatatattattcgaaaaactgaagcttccggttgttaaaaagaccaaaacaggatattcaacagatgccgaggtattagaagagctgtatgataaacatgacataataccgcttattctggattatagaatgtatacgaaaatactgacaacttactgtcagggactggttcaggcaataaatcctgcaactggaagaattcataccaactttattcagacatggacggcaactggaagacttgcaagtgcagagcccaatctgcaaaatattcctgtaaaatatgatgagggaaagctaataagaaaggcatttgttccagatgaaggttatgtgttgatagatgctgattattctcagattgagcttagaatacttgcacatatctctgaggatgaacgactgataaatgcttttaaaaataaccttgatattcattcacagacggcggcagagatctttggtgtggatataagtcaggttacaccaattatgcgaagccaggcaaaagcagttaactttggaattgtatatggtatatctgattatggactttcacgggatataaagatttcaagaaaagaagcagccgagtttattaatcgttattttgaaaagtatcccagagtaaaagaatatttggacaatgtcgtcaagtttgcccgtgaaaacggatttgttttgacaatatttaacaggaaaaggtatatcaaggatataaagtctactaataaaaacctgagaaactatgcagagagaatagcaatgaattcacctatccagggaagtgctgcagatattatgaaaatagcaatgataagagtttataaaaagctaaaagaaaacaatttaaaatcaagaattattctgcaggtccatgacgaacttttgattgaatcaccctatgaagagaaagagatagtaaaggaaatagtaaaatcggagatggaaaatgcggttttattgaaagttcctttggtagttgaagtgaaagaaggttcaaattggtatgaaacaaagtaaaggatcc

SEQ ID NO: 1857 - DNA, 2623 bp, Artificial Sequence
  Description of Artificial Sequence: Synthetic DNA sequence of Caldicellulosiruptor TOK13B DNA Polymerase G606Y
atgaaatacctgctgccgaccgctgctgctggtctgctgctcctcgctgcccagccggcgatggccatggaatttgttatttttgatgggaatagtattctgtatagagctttttttgccttgccacagcttactacctcaacaggcatacctacaaatgctatatatggttttttgaatgtgctgttaaaatacttagattctgaaaaaccggattatgtagcagtagcttttgacaaaaaaggcagagctgtccgaaaaagtgaatatgaagaatacaaggctaacagaaaaccgatgccagattctcttcaggttcagataccttacgtaagagaaatacttgctgctctgaacattcctgtactgaaatgtgaagggtatgaagctgatgacgttataggcacacttgtaaatagatttaaagcccaggatttagagattgtgataataaccggagacagagatacacttcagttacttgataaaaatgtaattgtcaaaatagtcacaacaaggtttgacaggacaactgaagatttgtatgctgtagaaaatgtaaaagaaaaatatggtgtttttgcgcatcaggttgttgactataaagcattagtaggtgatgcgtcagacaatataccaggtgttaagggaattggagataaaactgccataaagctgttagaagagtaccagactctggagaatatatatcagaatctaaataacattaaaggagcgctaaaagagaagttggaatcaggaaaagacatggcatttttatcaaaaagactggctactatcatatgcgatttaccaattgaggtgaatcttgaagaattaaaaaccaaagaatgggacaaagaaagactttatcagattttacttcaacttgagtttaaaagctttattaaaagactgggcttttcagaagagattaactatgcaaggcagaactttcagctacctgaatttagtattaaagaacttcgtgatgtttcagcaatagggggcaaagaaatctatctattgtactcagatgaagaaggacttttttatatttatgaccatcaaacctcaaccatttttacaacttctgataaggaagctattaaagatcttttaacactccaaagcattcaaaaggttgtatatgatttaaaaaatatactccataaggtggactttgatgaagctaatcagataaaaaattgtaatgatgttatgttggcttcatatgttttggacagtacacgcagttcgtacgatttggaaacattgtttatttcttatctcaacactgatatagctgcaatcaaagagaatagatgggctggtgctacagttttattaagaaatctttgggatgaactttcaaaactcattgatttaaactcggcccaatacgtttatgagagcatagagatgcctcttgttcccattttatatgaaatggagaaaatcggttttaaggttgacaaaaacactttgcaggagtatacaaaagagattgagagcaagcttttaaagttggaatcacagatttatcaaatagccggtgaatggtttaacataaactcgccaaaacaactctcatatatattattcgaaaaactgaagcttccggttgttaaaaagaccaaaacaggatattcaacagatgccgaggtattagaagagctgtatgataaacatgacataataccgcttattctggattatagaatgtatacgaaaatactgacaacttactgtcagggactggttcaggcaataaatcctgcaactggaagaattcataccaactttattcagacatatacggcaactggaagacttgcaagtgcagagcccaatctgcaaaatattcctgtaaaatatgatgagggaaagctaataagaaaggcatttgttccagatgaaggttatgtgttgatagatgctgattattctcagattgagcttagaatacttgcacatatctctgaggatgaacgactgataaatgcttttaaaaataaccttgatattcattcacagacggcggcagagatctttggtgtggatataagtcaggttacaccaattatgcgaagccaggcaaaagcagttaactttggaattgtatatggtatatctgattatggactttcacgggatataaagatttcaagaaaagaagcagccgagtttattaatcgttattttgaaaagtatcccagagtaaaagaatatttggacaatgtcgtcaagtttgcccgtgaaaacggatttgttttgacaatatttaacaggaaaaggtatatcaaggatataaagtctactaataaaaacctgagaaactatgcagagagaatagcaatgaattcacctatccagggaagtgctgcagatattatgaaaatagcaatgataagagtttataaaaagctaaaagaaaacaatttaaaatcaagaattattctgcaggtccatgacgaacttttgattgaatcaccctatgaagagaaagagatagtaaaggaaatagtaaaatcggagatggaaaatgcggttttattgaaagttcctttggtagttgaagtgaaagaaggttcaaattggtatgaaacaaagtaaaggatcc

SEQ ID NO: 1858 - DNA, 2623 bp, Artificial Sequence
  Description of Artificial Sequence: Synthetic DNA sequence of Caldicellulosiruptor TOK13B DNA Polymerase A615C
atgaaatacctgctgccgaccgctgctgctggtctgctgctcctcgctgcccagccggcgatggccatggaatttgttatttttgatgggaatagtattctgtatagagctttttttgccttgccacagcttactacctcaacaggcatacctacaaatgctatatatggttttttgaatgtgctgttaaaatacttagattctgaaaaaccggattatgtagcagtagcttttgacaaaaaaggcagagctgtccgaaaaagtgaatatgaagaatacaaggctaacagaaaaccgatgccagattctcttcaggttcagataccttacgtaagagaaatacttgctgctctgaacattcctgtactgaaatgtgaagggtatgaagctgatgacgttataggcacacttgtaaatagatttaaagcccaggatttagagattgtgataataaccggagacagagatacacttcagttacttgataaaaatgtaattgtcaaaatagtcacaacaaggtttgacaggacaactgaagatttgtatgctgtagaaaatgtaaaagaaaaatatggtgtttttgcgcatcaggttgttgactataaagcattagtaggtgatgcgtcagacaatataccaggtgttaagggaattggagataaaactgccataaagctgttagaagagtaccagactctggagaatatatatcagaatctaaataacattaaaggagcgctaaaagagaagttggaatcaggaaaagacatggcatttttatcaaaaagactggctactatcatatgcgatttaccaattgaggtgaatcttgaagaattaaaaaccaaagaatgggacaaagaaagactttatcagattttacttcaacttgagtttaaaagctttattaaaagactgggcttttcagaagagattaactatgcaaggcagaactttcagctacctgaatttagtattaaagaacttcgtgatgtttcagcaatagggggcaaagaaatctatctattgtactcagatgaagaaggacttttttatatttatgaccatcaaacctcaaccatttttacaacttctgataaggaagctattaaagatcttttaacactccaaagcattcaaaaggttgtatatgatttaaaaaatatactccataaggtggactttgatgaagctaatcagataaaaaattgtaatgatgttatgttggcttcatatgttttggacagtacacgcagttcgtacgatttggaaacattgtttatttcttatctcaacactgatatagctgcaatcaaagagaatagatgggctggtgctacagttttattaagaaatctttgggatgaactttcaaaactcattgatttaaactcggcccaatacgtttatgagagcatagagatgcctcttgttcccattttatatgaaatggagaaaatcggttttaaggttgacaaaaacactttgcaggagtatacaaaagagattgagagcaagcttttaaagttggaatcacagatttatcaaatagccggtgaatggtttaacataaactcgccaaaacaactctcatatatattattcgaaaaactgaagcttccggttgttaaaaagaccaaaacaggatattcaacagatgccgaggtattagaagagctgtatgataaacatgacataataccgcttattctggattatagaatgtatacgaaaatactgacaacttactgtcagggactggttcaggcaataaatcctgcaactggaagaattcataccaactttattcagacaggtacggcaactggaagacttgcaagttgtgagcccaatctgcaaaatattcctgtaaaatatgatgagggaaagctaataagaaaggcatttgttccagatgaaggttatgtgttgatagatgctgattattctcagattgagcttagaatacttgcacatatctctgaggatgaacgactgataaatgcttttaaaaataaccttgatattcattcacagacggcggcagagatctttggtgtggatataagtcaggttacaccaattatgcgaagccaggcaaaagcagttaactttggaattgtatatggtatatctgattatggactttcacgggatataaagatttcaagaaaagaagcagccgagtttattaatcgttattttgaaaagtatcccagagtaaaagaatatttggacaatgtcgtcaagtttgcccgtgaaaacggatttgttttgacaatatttaacaggaaaaggtatatcaaggatataaagtctactaataaaaacctgagaaactatgcagagagaatagcaatgaattcacctatccagggaagtgctgcagatattatgaaaatagcaatgataagagtttataaaaagctaaaagaaaacaatttaaaatcaagaattattctgcaggtccatgacgaacttttgattgaatcaccctatgaagagaaagagatagtaaaggaaatagtaaaatcggagatggaaaatgcggttttattgaaagttcctttggtagttgaagtgaaagaaggttcaaattggtatgaaacaaagtaaaggatcc

SEQ ID NO: 1859 - DNA, 2623 bp, Artificial Sequence
  Description of Artificial Sequence: Synthetic DNA sequence of Caldicellulosiruptor TOK13B DNA Polymerase A615D
atgaaatacctgctgccgaccgctgctgctggtctgctgctcctcgctgcccagccggcgatggccatggaatttgttatttttgatgggaatagtattctgtatagagctttttttgccttgccacagcttactacctcaacaggcatacctacaaatgctatatatggttttttgaatgtgctgttaaaatacttagattctgaaaaaccggattatgtagcagtagcttttgacaaaaaaggcagagctgtccgaaaaagtgaatatgaagaatacaaggctaacagaaaaccgatgccagattctcttcaggttcagataccttacgtaagagaaatacttgctgctctgaacattcctgtactgaaatgtgaagggtatgaagctgatgacgttataggcacacttgtaaatagatttaaagcccaggatttagagattgtgataataaccggagacagagatacacttcagttacttgataaaaatgtaattgtcaaaatagtcacaacaaggtttgacaggacaactgaagatttgtatgctgtagaaaatgtaaaagaaaaatatggtgtttttgcgcatcaggttgttgactataaagcattagtaggtgatgcgtcagacaatataccaggtgttaagggaattggagataaaactgccataaagctgttagaagagtaccagactctggagaatatatatcagaatctaaataacattaaaggagcgctaaaagagaagttggaatcaggaaaagacatggcatttttatcaaaaagactggctactatcatatgcgatttaccaattgaggtgaatcttgaagaattaaaaaccaaagaatgggacaaagaaagactttatcagattttacttcaacttgagtttaaaagctttattaaaagactgggcttttcagaagagattaactatgcaaggcagaactttcagctacctgaatttagtattaaagaacttcgtgatgtttcagcaatagggggcaaagaaatctatctattgtactcagatgaagaaggacttttttatatttatgaccatcaaacctcaaccatttttacaacttctgataaggaagctattaaagatcttttaacactccaaagcattcaaaaggttgtatatgatttaaaaaatatactccataaggtggactttgatgaagctaatcagataaaaaattgtaatgatgttatgttggcttcatatgttttggacagtacacgcagttcgtacgatttggaaacattgtttatttcttatctcaacactgatatagctgcaatcaaagagaatagatgggctggtgctacagttttattaagaaatctttgggatgaactttcaaaactcattgatttaaactcggcccaatacgtttatgagagcatagagatgcctcttgttcccattttatatgaaatggagaaaatcggttttaaggttgacaaaaacactttgcaggagtatacaaaagagattgagagcaagcttttaaagttggaatcacagatttatcaaatagccggtgaatggtttaacataaactcgccaaaacaactctcatatatattattcgaaaaactgaagcttccggttgttaaaaagaccaaaacaggatattcaacagatgccgaggtattagaagagctgtatgataaacatgacataataccgcttattctggattatagaatgtatacgaaaatactgacaacttactgtcagggactggttcaggcaataaatcctgcaactggaagaattcataccaactttattcagacaggtacggcaactggaagacttgcaagtgatgagcccaatctgcaaaatattcctgtaaaatatgatgagggaaagctaataagaaaggcatttgttccagatgaaggttatgtgttgatagatgctgattattctcagattgagcttagaatacttgcacatatctctgaggatgaacgactgataaatgcttttaaaaataaccttgatattcattcacagacggcggcagagatctttggtgtggatataagtcaggttacaccaattatgcgaagccaggcaaaagcagttaactttggaattgtatatggtatatctgattatggactttcacgggatataaagatttcaagaaaagaagcagccgagtttattaatcgttattttgaaaagtatcccagagtaaaagaatatttggacaatgtcgtcaagtttgcccgtgaaaacggatttgttttgacaatatttaacaggaaaaggtatatcaaggatataaagtctactaataaaaacctgagaaactatgcagagagaatagcaatgaattcacctatccagggaagtgctgcagatattatgaaaatagcaatgataagagtttataaaaagctaaaagaaaacaatttaaaatcaagaattattctgcaggtccatgacgaacttttgattgaatcaccctatgaagagaaagagatagtaaaggaaatagtaaaatcggagatggaaaatgcggttttattgaaagttcctttggtagttgaagtgaaagaaggttcaaattggtatgaaacaaagtaaaggatcc

SEQ ID NO: 1860 - DNA, 2623 bp, Artificial Sequence
  Description of Artificial Sequence: Synthetic DNA sequence of Caldicellulosiruptor TOK13B DNA Polymerase A615F
atgaaatacctgctgccgaccgctgctgctggtctgctgctcctcgctgcccagccggcgatggccatggaatttgttatttttgatgggaatagtattctgtatagagctttttttgccttgccacagcttactacctcaacaggcatacctacaaatgctatatatggttttttgaatgtgctgttaaaatacttagattctgaaaaaccggattatgtagcagtagcttttgacaaaaaaggcagagctgtccgaaaaagtgaatatgaagaatacaaggctaacagaaaaccgatgccagattctcttcaggttcagataccttacgtaagagaaatacttgctgctctgaacattcctgtactgaaatgtgaagggtatgaagctgatgacgttataggcacacttgtaaatagatttaaagcccaggatttagagattgtgataataaccggagacagagatacacttcagttacttgataaaaatgtaattgtcaaaatagtcacaacaaggtttgacaggacaactgaagatttgtatgctgtagaaaatgtaaaagaaaaatatggtgtttttgcgcatcaggttgttgactataaagcattagtaggtgatgcgtcagacaatataccaggtgttaagggaattggagataaaactgccataaagctgttagaagagtaccagactctggagaatatatatcagaatctaaataacattaaaggagcgctaaaagagaagttggaatcaggaaaagacatggcatttttatcaaaaagactggctactatcatatgcgatttaccaattgaggtgaatcttgaagaattaaaaaccaaagaatgggacaaagaaagactttatcagattttacttcaacttgagtttaaaagctttattaaaagactgggcttttcagaagagattaactatgcaaggcagaactttcagctacctgaatttagtattaaagaacttcgtgatgtttcagcaatagggggcaaagaaatctatctattgtactcagatgaagaaggacttttttatatttatgaccatcaaacctcaaccatttttacaacttctgataaggaagctattaaagatcttttaacactccaaagcattcaaaaggttgtatatgatttaaaaaatatactccataaggtggactttgatgaagctaatcagataaaaaattgtaatgatgttatgttggcttcatatgttttggacagtacacgcagttcgtacgatttggaaacattgtttatttcttatctcaacactgatatagctgcaatcaaagagaatagatgggctggtgctacagttttattaagaaatctttgggatgaactttcaaaactcattgatttaaactcggcccaatacgtttatgagagcatagagatgcctcttgttcccattttatatgaaatggagaaaatcggttttaaggttgacaaaaacactttgcaggagtatacaaaagagattgagagcaagcttttaaagttggaatcacagatttatcaaatagccggtgaatggtttaacataaactcgccaaaacaactctcatatatattattcgaaaaactgaagcttccggttgttaaaaagaccaaaacaggatattcaacagatgccgaggtattagaagagctgtatgataaacatgacataataccgcttattctggattatagaatgtatacgaaaatactgacaacttactgtcagggactggttcaggcaataaatcctgcaactggaagaattcataccaactttattcagacaggtacggcaactggaagacttgcaagttttgagcccaatctgcaaaatattcctgtaaaatatgatgagggaaagctaataagaaaggcatttgttccagatgaaggttatgtgttgatagatgctgattattctcagattgagcttagaatacttgcacatatctctgaggatgaacgactgataaatgcttttaaaaataaccttgatattcattcacagacggcggcagagatctttggtgtggatataagtcaggttacaccaattatgcgaagccaggcaaaagcagttaactttggaattgtatatggtatatctgattatggactttcacgggatataaagatttcaagaaaagaagcagccgagtttattaatcgttattttgaaaagtatcccagagtaaaagaatatttggacaatgtcgtcaagtttgcccgtgaaaacggatttgttttgacaatatttaacaggaaaaggtatatcaaggatataaagtctactaataaaaacctgagaaactatgcagagagaatagcaatgaattcacctatccagggaagtgctgcagatattatgaaaatagcaatgataagagtttataaaaagctaaaagaaaacaatttaaaatcaagaattattctgcaggtccatgacgaacttttgattgaatcaccctatgaagagaaagagatagtaaaggaaatagtaaaatcggagatggaaaatgcggttttattgaaagttcctttggtagttgaagtgaaagaaggttcaaattggtatgaaacaaagtaaaggatcc

SEQ ID NO: 1861 - DNA, 2623 bp, Artificial Sequence
  Description of Artificial Sequence: Synthetic DNA sequence of Caldicellulosiruptor TOK13B DNA Polymerase A615G
atgaaatacctgctgccgaccgctgctgctggtctgctgctcctcgctgcccagccggcgatggccatggaatttgttatttttgatgggaatagtattctgtatagagctttttttgccttgccacagcttactacctcaacaggcatacctacaaatgctatatatggttttttgaatgtgctgttaaaatacttagattctgaaaaaccggattatgtagcagtagcttttgacaaaaaaggcagagctgtccgaaaaagtgaatatgaagaatacaaggctaacagaaaaccgatgccagattctcttcaggttcagataccttacgtaagagaaatacttgctgctctgaacattcctgtactgaaatgtgaagggtatgaagctgatgacgttataggcacacttgtaaatagatttaaagcccaggatttagagattgtgataataaccggagacagagatacacttcagttacttgataaaaatgtaattgtcaaaatagtcacaacaaggtttgacaggacaactgaagatttgtatgctgtagaaaatgtaaaagaaaaatatggtgtttttgcgcatcaggttgttgactataaagcattagtaggtgatgcgtcagacaatataccaggtgttaagggaattggagataaaactgccataaagctgttagaagagtaccagactctggagaatatatatcagaatctaaataacattaaaggagcgctaaaagagaagttggaatcaggaaaagacatggcatttttatcaaaaagactggctactatcatatgcgatttaccaattgaggtgaatcttgaagaattaaaaaccaaagaatgggacaaagaaagactttatcagattttacttcaacttgagtttaaaagctttattaaaagactgggcttttcagaagagattaactatgcaaggcagaactttcagctacctgaatttagtattaaagaacttcgtgatgtttcagcaatagggggcaaagaaatctatctattgtactcagatgaagaaggacttttttatatttatgaccatcaaacctcaaccatttttacaacttctgataaggaagctattaaagatcttttaacactccaaagcattcaaaaggttgtatatgatttaaaaaatatactccataaggtggactttgatgaagctaatcagataaaaaattgtaatgatgttatgttggcttcatatgttttggacagtacacgcagttcgtacgatttggaaacattgtttatttcttatctcaacactgatatagctgcaatcaaagagaatagatgggctggtgctacagttttattaagaaatctttgggatgaactttcaaaactcattgatttaaactcggcccaatacgtttatgagagcatagagatgcctcttgttcccattttatatgaaatggagaaaatcggttttaaggttgacaaaaacactttgcaggagtatacaaaagagattgagagcaagcttttaaagttggaatcacagatttatcaaatagccggtgaatggtttaacataaactcgccaaaacaactctcatatatattattcgaaaaactgaagcttccggttgttaaaaagaccaaaacaggatattcaacagatgccgaggtattagaagagctgtatgataaacatgacataataccgcttattctggattatagaatgtatacgaaaatactgacaacttactgtcagggactggttcaggcaataaatcctgcaactggaagaattcataccaactttattcagacaggtacggcaactggaagacttgcaagtggtgagcccaatctgcaaaatattcctgtaaaatatgatgagggaaagctaataagaaaggcatttgttccagatgaaggttatgtgttgatagatgctgattattctcagattgagcttagaatacttgcacatatctctgaggatgaacgactgataaatgcttttaaaaataaccttgatattcattcacagacggcggcagagatctttggtgtggatataagtcaggttacaccaattatgcgaagccaggcaaaagcagttaactttggaattgtatatggtatatctgattatggactttcacgggatataaagatttcaagaaaagaagcagccgagtttattaatcgttattttgaaaagtatcccagagtaaaagaatatttggacaatgtcgtcaagtttgcccgtgaaaacggatttgttttgacaatatttaacaggaaaaggtatatcaaggatataaagtctactaataaaaacctgagaaactatgcagagagaatagcaatgaattcacctatccagggaagtgctgcagatattatgaaaatagcaatgataagagtttataaaaagctaaaagaaaacaatttaaaatcaagaattattctgcaggtccatgacgaacttttgattgaatcaccctatgaagagaaagagatagtaaaggaaatagtaaaatcggagatggaaaatgcggttttattgaaagttcctttggtagttgaagtgaaagaaggttcaaattggtatgaaacaaagtaaaggatcc

SEQ ID NO: 1862 - DNA, 2623 bp, Artificial Sequence
  Description of Artificial Sequence: Synthetic DNA sequence of Caldicellulosiruptor TOK13B DNA Polymerase A615H
atgaaatacctgctgccgaccgctgctgctggtctgctgctcctcgctgcccagccggcgatggccatggaatttgttatttttgatgggaatagtattctgtatagagctttttttgccttgccacagcttactacctcaacaggcatacctacaaatgctatatatggttttttgaatgtgctgttaaaatacttagattctgaaaaaccggattatgtagcagtagcttttgacaaaaaaggcagagctgtccgaaaaagtgaatatgaagaatacaaggctaacagaaaaccgatgccagattctcttcaggttcagataccttacgtaagagaaatacttgctgctctgaacattcctgtactgaaatgtgaagggtatgaagctgatgacgttataggcacacttgtaaatagatttaaagcccaggatttagagattgtgataataaccggagacagagatacacttcagttacttgataaaaatgtaattgtcaaaatagtcacaacaaggtttgacaggacaactgaagatttgtatgctgtagaaaatgtaaaagaaaaatatggtgtttttgcgcatcaggttgttgactataaagcattagtaggtgatgcgtcagacaatataccaggtgttaagggaattggagataaaactgccataaagctgttagaagagtaccagactctggagaatatatatcagaatctaaataacattaaaggagcgctaaaagagaagttggaatcaggaaaagacatggcatttttatcaaaaagactggctactatcatatgcgatttaccaattgaggtgaatcttgaagaattaaaaaccaaagaatgggacaaagaaagactttatcagattttacttcaacttgagtttaaaagctttattaaaagactgggcttttcagaagagattaactatgcaaggcagaactttcagctacctgaatttagtattaaagaacttcgtgatgtttcagcaatagggggcaaagaaatctatctattgtactcagatgaagaaggacttttttatatttatgaccatcaaacctcaaccatttttacaacttctgataaggaagctattaaagatcttttaacactccaaagcattcaaaaggttgtatatgatttaaaaaatatactccataaggtggactttgatgaagctaatcagataaaaaattgtaatgatgttatgttggcttcatatgttttggacagtacacgcagttcgtacgatttggaaacattgtttatttcttatctcaacactgatatagctgcaatcaaagagaatagatgggctggtgctacagttttattaagaaatctttgggatgaactttcaaaactcattgatttaaactcggcccaatacgtttatgagagcatagagatgcctcttgttcccattttatatgaaatggagaaaatcggttttaaggttgacaaaaacactttgcaggagtatacaaaagagattgagagcaagcttttaaagttggaatcacagatttatcaaatagccggtgaatggtttaacataaactcgccaaaacaactctcatatatattattcgaaaaactgaagcttccggttgttaaaaagaccaaaacaggatattcaacagatgccgaggtattagaagagctgtatgataaacatgacataataccgcttattctggattatagaatgtatacgaaaatactgacaacttactgtcagggactggttcaggcaataaatcctgcaactggaagaattcataccaactttattcagacaggtacggcaactggaagacttgcaagtcatgagcccaatctgcaaaatattcctgtaaaatatgatgagggaaagctaataagaaaggcatttgttccagatgaaggttatgtgttgatagatgctgattattctcagattgagcttagaatacttgcacatatctctgaggatgaacgactgataaatgcttttaaaaataaccttgatattcattcacagacggcggcagagatctttggtgtggatataagtcaggttacaccaattatgcgaagccaggcaaaagcagttaactttggaattgtatatggtatatctgattatggactttcacgggatataaagatttcaagaaaagaagcagccgagtttattaatcgttattttgaaaagtatcccagagtaaaagaatatttggacaatgtcgtcaagtttgcccgtgaaaacggatttgttttgacaatatttaacaggaaaaggtatatcaaggatataaagtctactaataaaaacctgagaaactatgcagagagaatagcaatgaattcacctatccagggaagtgctgcagatattatgaaaatagcaatgataagagtttataaaaagctaaaagaaaacaatttaaaatcaagaattattctgcaggtccatgacgaacttttgattgaatcaccctatgaagagaaagagatagtaaaggaaatagtaaaatcggagatggaaaatgcggttttattgaaagttcctttggtagttgaagtgaaagaaggttcaaattggtatgaaacaaagtaaaggatcc

SEQ ID NO: 1863 - DNA, 2623 bp, Artificial Sequence
  Description of Artificial Sequence: Synthetic DNA sequence of Caldicellulosiruptor TOK13B DNA Polymerase A615I
atgaaatacctgctgccgaccgctgctgctggtctgctgctcctcgctgcccagccggcgatggccatggaatttgttatttttgatgggaatagtattctgtatagagctttttttgccttgccacagcttactacctcaacaggcatacctacaaatgctatatatggttttttgaatgtgctgttaaaatacttagattctgaaaaaccggattatgtagcagtagcttttgacaaaaaaggcagagctgtccgaaaaagtgaatatgaagaatacaaggctaacagaaaaccgatgccagattctcttcaggttcagataccttacgtaagagaaatacttgctgctctgaacattcctgtactgaaatgtgaagggtatgaagctgatgacgttataggcacacttgtaaatagatttaaagcccaggatttagagattgtgataataaccggagacagagatacacttcagttacttgataaaaatgtaattgtcaaaatagtcacaacaaggtttgacaggacaactgaagatttgtatgctgtagaaaatgtaaaagaaaaatatggtgtttttgcgcatcaggttgttgactataaagcattagtaggtgatgcgtcagacaatataccaggtgttaagggaattggagataaaactgccataaagctgttagaagagtaccagactctggagaatatatatcagaatctaaataacattaaaggagcgctaaaagagaagttggaatcaggaaaagacatggcatttttatcaaaaagactggctactatcatatgcgatttaccaattgaggtgaatcttgaagaattaaaaaccaaagaatgggacaaagaaagactttatcagattttacttcaacttgagtttaaaagctttattaaaagactgggcttttcagaagagattaactatgcaaggcagaactttcagctacctgaatttagtattaaagaacttcgtgatgtttcagcaatagggggcaaagaaatctatctattgtactcagatgaagaaggacttttttatatttatgaccatcaaacctcaaccatttttacaacttctgataaggaagctattaaagatcttttaacactccaaagcattcaaaaggttgtatatgatttaaaaaatatactccataaggtggactttgatgaagctaatcagataaaaaattgtaatgatgttatgttggcttcatatgttttggacagtacacgcagttcgtacgatttggaaacattgtttatttcttatctcaacactgatatagctgcaatcaaagagaatagatgggctggtgctacagttttattaagaaatctttgggatgaactttcaaaactcattgatttaaactcggcccaatacgtttatgagagcatagagatgcctcttgttcccattttatatgaaatggagaaaatcggttttaaggttgacaaaaacactttgcaggagtatacaaaagagattgagagcaagcttttaaagttggaatcacagatttatcaaatagccggtgaatggtttaacataaactcgccaaaacaactctcatatatattattcgaaaaactgaagcttccggttgttaaaaagaccaaaacaggatattcaacagatgccgaggtattagaagagctgtatgataaacatgacataataccgcttattctggattatagaatgtatacgaaaatactgacaacttactgtcagggactggttcaggcaataaatcctgcaactggaagaattcataccaactttattcagacaggtacggcaactggaagacttgcaagtattgagcccaatctgcaaaatattcctgtaaaatatgatgagggaaagctaataagaaaggcatttgttccagatgaaggttatgtgttgatagatgctgattattctcagattgagcttagaatacttgcacatatctctgaggatgaacgactgataaatgcttttaaaaataaccttgatattcattcacagacggcggcagagatctttggtgtggatataagtcaggttacaccaattatgcgaagccaggcaaaagcagttaactttggaattgtatatggtatatctgattatggactttcacgggatataaagatttcaagaaaagaagcagccgagtttattaatcgttattttgaaaagtatcccagagtaaaagaatatttggacaatgtcgtcaagtttgcccgtgaaaacggatttgttttgacaatatttaacaggaaaaggtatatcaaggatataaagtctactaataaaaacctgagaaactatgcagagagaatagcaatgaattcacctatccagggaagtgctgcagatattatgaaaatagcaatgataagagtttataaaaagctaaaagaaaacaatttaaaatcaagaattattctgcaggtccatgacgaacttttgattgaatcaccctatgaagagaaagagatagtaaaggaaatagtaaaatcggagatggaaaatgcggttttattgaaagttcctttggtagttgaagtgaaagaaggttcaaattggtatgaaacaaagtaaaggatcc

SEQ ID NO: 1864 - DNA, 2623 bp, Artificial Sequence
  Description of Artificial Sequence: Synthetic DNA sequence of Caldicellulosiruptor TOK13B DNA Polymerase A615L
atgaaatacctgctgccgaccgctgctgctggtctgctgctcctcgctgcccagccggcgatggccatggaatttgttatttttgatgggaatagtattctgtatagagctttttttgccttgccacagcttactacctcaacaggcatacctacaaatgctatatatggttttttgaatgtgctgttaaaatacttagattctgaaaaaccggattatgtagcagtagcttttgacaaaaaaggcagagctgtccgaaaaagtgaatatgaagaatacaaggctaacagaaaaccgatgccagattctcttcaggttcagataccttacgtaagagaaatacttgctgctctgaacattcctgtactgaaatgtgaagggtatgaagctgatgacgttataggcacacttgtaaatagatttaaagcccaggatttagagattgtgataataaccggagacagagatacacttcagttacttgataaaaatgtaattgtcaaaatagtcacaacaaggtttgacaggacaactgaagatttgtatgctgtagaaaatgtaaaagaaaaatatggtgtttttgcgcatcaggttgttgactataaagcattagtaggtgatgcgtcagacaatataccaggtgttaagggaattggagataaaactgccataaagctgttagaagagtaccagactctggagaatatatatcagaatctaaataacattaaaggagcgctaaaagagaagttggaatcaggaaaagacatggcatttttatcaaaaagactggctactatcatatgcgatttaccaattgaggtgaatcttgaagaattaaaaaccaaagaatgggacaaagaaagactttatcagattttacttcaacttgagtttaaaagctttattaaaagactgggcttttcagaagagattaactatgcaaggcagaactttcagctacctgaatttagtattaaagaacttcgtgatgtttcagcaatagggggcaaagaaatctatctattgtactcagatgaagaaggacttttttatatttatgaccatcaaacctcaaccatttttacaacttctgataaggaagctattaaagatcttttaacactccaaagcattcaaaaggttgtatatgatttaaaaaatatactccataaggtggactttgatgaagctaatcagataaaaaattgtaatgatgttatgttggcttcatatgttttggacagtacacgcagttcgtacgatttggaaacattgtttatttcttatctcaacactgatatagctgcaatcaaagagaatagatgggctggtgctacagttttattaagaaatctttgggatgaactttcaaaactcattgatttaaactcggcccaatacgtttatgagagcatagagatgcctcttgttcccattttatatgaaatggagaaaatcggttttaaggttgacaaaaacactttgcaggagtatacaaaagagattgagagcaagcttttaaagttggaatcacagatttatcaaatagccggtgaatggtttaacataaactcgccaaaacaactctcatatatattattcgaaaaactgaagcttccggttgttaaaaagaccaaaacaggatattcaacagatgccgaggtattagaagagctgtatgataaacatgacataataccgcttattctggattatagaatgtatacgaaaatactgacaacttactgtcagggactggttcaggcaataaatcctgcaactggaagaattcataccaactttattcagacaggtacggcaactggaagacttgcaagtcttgagcccaatctgcaaaatattcctgtaaaatatgatgagggaaagctaataagaaaggcatttgttccagatgaaggttatgtgttgatagatgctgattattctcagattgagcttagaatacttgcacatatctctgaggatgaacgactgataaatgcttttaaaaataaccttgatattcattcacagacggcggcagagatctttggtgtggatataagtcaggttacaccaattatgcgaagccaggcaaaagcagttaactttggaattgtatatggtatatctgattatggactttcacgggatataaagatttcaagaaaagaagcagccgagtttattaatcgttattttgaaaagtatcccagagtaaaagaatatttggacaatgtcgtcaagtttgcccgtgaaaacggatttgttttgacaatatttaacaggaaaaggtatatcaaggatataaagtctactaataaaaacctgagaaactatgcagagagaatagcaatgaattcacctatccagggaagtgctgcagatattatgaaaatagcaatgataagagtttataaaaagctaaaagaaaacaatttaaaatcaagaattattctgcaggtccatgacgaacttttgattgaatcaccctatgaagagaaagagatagtaaaggaaatagtaaaatcggagatggaaaatgcggttttattgaaagttcctttggtagttgaagtgaaagaaggttcaaattggtatgaaacaaagtaaaggatcc

SEQ ID NO: 1865 - DNA, 2623 bp, Artificial Sequence
  Description of Artificial Sequence: Synthetic DNA sequence of Caldicellulosiruptor TOK13B DNA Polymerase A615M
atgaaatacctgctgccgaccgctgctgctggtctgctgctcctcgctgcccagccggcgatggccatggaatttgttatttttgatgggaatagtattctgtatagagctttttttgccttgccacagcttactacctcaacaggcatacctacaaatgctatatatggttttttgaatgtgctgttaaaatacttagattctgaaaaaccggattatgtagcagtagcttttgacaaaaaaggcagagctgtccgaaaaagtgaatatgaagaatacaaggctaacagaaaaccgatgccagattctcttcaggttcagataccttacgtaagagaaatacttgctgctctgaacattcctgtactgaaatgtgaagggtatgaagctgatgacgttataggcacacttgtaaatagatttaaagcccaggatttagagattgtgataataaccggagacagagatacacttcagttacttgataaaaatgtaattgtcaaaatagtcacaacaaggtttgacaggacaactgaagatttgtatgctgtagaaaatgtaaaagaaaaatatggtgtttttgcgcatcaggttgttgactataaagcattagtaggtgatgcgtcagacaatataccaggtgttaagggaattggagataaaactgccataaagctgttagaagagtaccagactctggagaatatatatcagaatctaaataacattaaaggagcgctaaaagagaagttggaatcaggaaaagacatggcatttttatcaaaaagactggctactatcatatgcgatttaccaattgaggtgaatcttgaagaattaaaaaccaaagaatgggacaaagaaagactttatcagattttacttcaacttgagtttaaaagctttattaaaagactgggcttttcagaagagattaactatgcaaggcagaactttcagctacctgaatttagtattaaagaacttcgtgatgtttcagcaatagggggcaaagaaatctatctattgtactcagatgaagaaggacttttttatatttatgaccatcaaacctcaaccatttttacaacttctgataaggaagctattaaagatcttttaacactccaaagcattcaaaaggttgtatatgatttaaaaaatatactccataaggtggactttgatgaagctaatcagataaaaaattgtaatgatgttatgttggcttcatatgttttggacagtacacgcagttcgtacgatttggaaacattgtttatttcttatctcaacactgatatagctgcaatcaaagagaatagatgggctggtgctacagttttattaagaaatctttgggatgaactttcaaaactcattgatttaaactcggcccaatacgtttatgagagcatagagatgcctcttgttcccattttatatgaaatggagaaaatcggttttaaggttgacaaaaacactttgcaggagtatacaaaagagattgagagcaagcttttaaagttggaatcacagatttatcaaatagccggtgaatggtttaacataaactcgccaaaacaactctcatatatattattcgaaaaactgaagcttccggttgttaaaaagaccaaaacaggatattcaacagatgccgaggtattagaagagctgtatgataaacatgacataataccgcttattctggattatagaatgtatacgaaaatactgacaacttactgtcagggactggttcaggcaataaatcctgcaactggaagaattcataccaactttattcagacaggtacggcaactggaagacttgcaagtatggagcccaatctgcaaaatattcctgtaaaatatgatgagggaaagctaataagaaaggcatttgttccagatgaaggttatgtgttgatagatgctgattattctcagattgagcttagaatacttgcacatatctctgaggatgaacgactgataaatgcttttaaaaataaccttgatattcattcacagacggcggcagagatctttggtgtggatataagtcaggttacaccaattatgcgaagccaggcaaaagcagttaactttggaattgtatatggtatatctgattatggactttcacgggatataaagatttcaagaaaagaagcagccgagtttattaatcgttattttgaaaagtatcccagagtaaaagaatatttggacaatgtcgtcaagtttgcccgtgaaaacggatttgttttgacaatatttaacaggaaaaggtatatcaaggatataaagtctactaataaaaacctgagaaactatgcagagagaatagcaatgaattcacctatccagggaagtgctgcagatattatgaaaatagcaatgataagagtttataaaaagctaaaagaaaacaatttaaaatcaagaattattctgcaggtccatgacgaacttttgattgaatcaccctatgaagagaaagagatagtaaaggaaatagtaaaatcggagatggaaaatgcggttttattgaaagttcctttggtagttgaagtgaaagaaggttcaaattggtatgaaacaaagtaaaggatcc

SEQ ID NO: 1866 - DNA, 2623 bp, Artificial Sequence
  Description of Artificial Sequence: Synthetic DNA sequence of Caldicellulosiruptor TOK13B DNA Polymerase A615N
atgaaatacctgctgccgaccgctgctgctggtctgctgctcctcgctgcccagccggcgatggccatggaatttgttatttttgatgggaatagtattctgtatagagctttttttgccttgccacagcttactacctcaacaggcatacctacaaatgctatatatggttttttgaatgtgctgttaaaatacttagattctgaaaaaccggattatgtagcagtagcttttgacaaaaaaggcagagctgtccgaaaaagtgaatatgaagaatacaaggctaacagaaaaccgatgccagattctcttcaggttcagataccttacgtaagagaaatacttgctgctctgaacattcctgtactgaaatgtgaagggtatgaagctgatgacgttataggcacacttgtaaatagatttaaagcccaggatttagagattgtgataataaccggagacagagatacacttcagttacttgataaaaatgtaattgtcaaaatagtcacaacaaggtttgacaggacaactgaagatttgtatgctgtagaaaatgtaaaagaaaaatatggtgtttttgcgcatcaggttgttgactataaagcattagtaggtgatgcgtcagacaatataccaggtgttaagggaattggagataaaactgccataaagctgttagaagagtaccagactctggagaatatatatcagaatctaaataacattaaaggagcgctaaaagagaagttggaatcaggaaaagacatggcatttttatcaaaaagactggctactatcatatgcgatttaccaattgaggtgaatcttgaagaattaaaaaccaaagaatgggacaaagaaagactttatcagattttacttcaacttgagtttaaaagctttattaaaagactgggcttttcagaagagattaactatgcaaggcagaactttcagctacctgaatttagtattaaagaacttcgtgatgtttcagcaatagggggcaaagaaatctatctattgtactcagatgaagaaggacttttttatatttatgaccatcaaacctcaaccatttttacaacttctgataaggaagctattaaagatcttttaacactccaaagcattcaaaaggttgtatatgatttaaaaaatatactccataaggtggactttgatgaagctaatcagataaaaaattgtaatgatgttatgttggcttcatatgttttggacagtacacgcagttcgtacgatttggaaacattgtttatttcttatctcaacactgatatagctgcaatcaaagagaatagatgggctggtgctacagttttattaagaaatctttgggatgaactttcaaaactcattgatttaaactcggcccaatacgtttatgagagcatagagatgcctcttgttcccattttatatgaaatggagaaaatcggttttaaggttgacaaaaacactttgcaggagtatacaaaagagattgagagcaagcttttaaagttggaatcacagatttatcaaatagccggtgaatggtttaacataaactcgccaaaacaactctcatatatattattcgaaaaactgaagcttccggttgttaaaaagaccaaaacaggatattcaacagatgccgaggtattagaagagctgtatgataaacatgacataataccgcttattctggattatagaatgtatacgaaaatactgacaacttactgtcagggactggttcaggcaataaatcctgcaactggaagaattcataccaactttattcagacaggtacggcaactggaagacttgcaagtaatgagcccaatctgcaaaatattcctgtaaaatatgatgagggaaagctaataagaaaggcatttgttccagatgaaggttatgtgttgatagatgctgattattctcagattgagcttagaatacttgcacatatctctgaggatgaacgactgataaatgcttttaaaaataaccttgatattcattcacagacggcggcagagatctttggtgtggatataagtcaggttacaccaattatgcgaagccaggcaaaagcagttaactttggaattgtatatggtatatctgattatggactttcacgggatataaagatttcaagaaaagaagcagccgagtttattaatcgttattttgaaaagtatcccagagtaaaagaatatttggacaatgtcgtcaagtttgcccgtgaaaacggatttgttttgacaatatttaacaggaaaaggtatatcaaggatataaagtctactaataaaaacctgagaaactatgcagagagaatagcaatgaattcacctatccagggaagtgctgcagatattatgaaaatagcaatgataagagtttataaaaagctaaaagaaaacaatttaaaatcaagaattattctgcaggtccatgacgaacttttgattgaatcaccctatgaagagaaagagatagtaaaggaaatagtaaaatcggagatggaaaatgcggttttattgaaagttcctttggtagttgaagtgaaagaaggttcaaattggtatgaaacaaagtaaaggatcc

SEQ ID NO: 1867 - DNA, 2623 bp, Artificial Sequence
  Description of Artificial Sequence: Synthetic DNA sequence of Caldicellulosiruptor TOK13B DNA Polymerase A615P
atgaaatacctgctgccgaccgctgctgctggtctgctgctcctcgctgcccagccggcgatggccatggaatttgttatttttgatgggaatagtattctgtatagagctttttttgccttgccacagcttactacctcaacaggcatacctacaaatgctatatatggttttttgaatgtgctgttaaaatacttagattctgaaaaaccggattatgtagcagtagcttttgacaaaaaaggcagagctgtccgaaaaagtgaatatgaagaatacaaggctaacagaaaaccgatgccagattctcttcaggttcagataccttacgtaagagaaatacttgctgctctgaacattcctgtactgaaatgtgaagggtatgaagctgatgacgttataggcacacttgtaaatagatttaaagcccaggatttagagattgtgataataaccggagacagagatacacttcagttacttgataaaaatgtaattgtcaaaatagtcacaacaaggtttgacaggacaactgaagatttgtatgctgtagaaaatgtaaaagaaaaatatggtgtttttgcgcatcaggttgttgactataaagcattagtaggtgatgcgtcagacaatataccaggtgttaagggaattggagataaaactgccataaagctgttagaagagtaccagactctggagaatatatatcagaatctaaataacattaaaggagcgctaaaagagaagttggaatcaggaaaagacatggcatttttatcaaaaagactggctactatcatatgcgatttaccaattgaggtgaatcttgaagaattaaaaaccaaagaatgggacaaagaaagactttatcagattttacttcaacttgagtttaaaagctttattaaaagactgggcttttcagaagagattaactatgcaaggcagaactttcagctacctgaatttagtattaaagaacttcgtgatgtttcagcaatagggggcaaagaaatctatctattgtactcagatgaagaaggacttttttatatttatgaccatcaaacctcaaccatttttacaacttctgataaggaagctattaaagatcttttaacactccaaagcattcaaaaggttgtatatgatttaaaaaatatactccataaggtggactttgatgaagctaatcagataaaaaattgtaatgatgttatgttggcttcatatgttttggacagtacacgcagttcgtacgatttggaaacattgtttatttcttatctcaacactgatatagctgcaatcaaagagaatagatgggctggtgctacagttttattaagaaatctttgggatgaactttcaaaactcattgatttaaactcggcccaatacgtttatgagagcatagagatgcctcttgttcccattttatatgaaatggagaaaatcggttttaaggttgacaaaaacactttgcaggagtatacaaaagagattgagagcaagcttttaaagttggaatcacagatttatcaaatagccggtgaatggtttaacataaactcgccaaaacaactctcatatatattattcgaaaaactgaagcttccggttgttaaaaagaccaaaacaggatattcaacagatgccgaggtattagaagagctgtatgataaacatgacataataccgcttattctggattatagaatgtatacgaaaatactgacaacttactgtcagggactggttcaggcaataaatcctgcaactggaagaattcataccaactttattcagacaggtacggcaactggaagacttgcaagtcctgagcccaatctgcaaaatattcctgtaaaatatgatgagggaaagctaataagaaaggcatttgttccagatgaaggttatgtgttgatagatgctgattattctcagattgagcttagaatacttgcacatatctctgaggatgaacgactgataaatgcttttaaaaataaccttgatattcattcacagacggcggcagagatctttggtgtggatataagtcaggttacaccaattatgcgaagccaggcaaaagcagttaactttggaattgtatatggtatatctgattatggactttcacgggatataaagatttcaagaaaagaagcagccgagtttattaatcgttattttgaaaagtatcccagagtaaaagaatatttggacaatgtcgtcaagtttgcccgtgaaaacggatttgttttgacaatatttaacaggaaaaggtatatcaaggatataaagtctactaataaaaacctgagaaactatgcagagagaatagcaatgaattcacctatccagggaagtgctgcagatattatgaaaatagcaatgataagagtttataaaaagctaaaagaaaacaatttaaaatcaagaattattctgcaggtccatgacgaacttttgattgaatcaccctatgaagagaaagagatagtaaaggaaatagtaaaatcggagatggaaaatgcggttttattgaaagttcctttggtagttgaagtgaaagaaggttcaaattggtatgaaacaaagtaaaggatcc

SEQ ID NO: 1868 - DNA, 2623 bp, Artificial Sequence
  Description of Artificial Sequence: Synthetic DNA sequence of Caldicellulosiruptor TOK13B DNA Polymerase A615Q
atgaaatacctgctgccgaccgctgctgctggtctgctgctcctcgctgcccagccggcgatggccatggaatttgttatttttgatgggaatagtattctgtatagagctttttttgccttgccacagcttactacctcaacaggcatacctacaaatgctatatatggttttttgaatgtgctgttaaaatacttagattctgaaaaaccggattatgtagcagtagcttttgacaaaaaaggcagagctgtccgaaaaagtgaatatgaagaatacaaggctaacagaaaaccgatgccagattctcttcaggttcagataccttacgtaagagaaatacttgctgctctgaacattcctgtactgaaatgtgaagggtatgaagctgatgacgttataggcacacttgtaaatagatttaaagcccaggatttagagattgtgataataaccggagacagagatacacttcagttacttgataaaaatgtaattgtcaaaatagtcacaacaaggtttgacaggacaactgaagatttgtatgctgtagaaaatgtaaaagaaaaatatggtgtttttgcgcatcaggttgttgactataaagcattagtaggtgatgcgtcagacaatataccaggtgttaagggaattggagataaaactgccataaagctgttagaagagtaccagactctggagaatatatatcagaatctaaataacattaaaggagcgctaaaagagaagttggaatcaggaaaagacatggcatttttatcaaaaagactggctactatcatatgcgatttaccaattgaggtgaatcttgaagaattaaaaaccaaagaatgggacaaagaaagactttatcagattttacttcaacttgagtttaaaagctttattaaaagactgggcttttcagaagagattaactatgcaaggcagaactttcagctacctgaatttagtattaaagaacttcgtgatgtttcagcaatagggggcaaagaaatctatctattgtactcagatgaagaaggacttttttatatttatgaccatcaaacctcaaccatttttacaacttctgataaggaagctattaaagatcttttaacactccaaagcattcaaaaggttgtatatgatttaaaaaatatactccataaggtggactttgatgaagctaatcagataaaaaattgtaatgatgttatgttggcttcatatgttttggacagtacacgcagttcgtacgatttggaaacattgtttatttcttatctcaacactgatatagctgcaatcaaagagaatagatgggctggtgctacagttttattaagaaatctttgggatgaactttcaaaactcattgatttaaactcggcccaatacgtttatgagagcatagagatgcctcttgttcccattttatatgaaatggagaaaatcggttttaaggttgacaaaaacactttgcaggagtatacaaaagagattgagagcaagcttttaaagttggaatcacagatttatcaaatagccggtgaatggtttaacataaactcgccaaaacaactctcatatatattattcgaaaaactgaagcttccggttgttaaaaagaccaaaacaggatattcaacagatgccgaggtattagaagagctgtatgataaacatgacataataccgcttattctggattatagaatgtatacgaaaatactgacaacttactgtcagggactggttcaggcaataaatcctgcaactggaagaattcataccaactttattcagacaggtacggcaactggaagacttgcaagtcaagagcccaatctgcaaaatattcctgtaaaatatgatgagggaaagctaataagaaaggcatttgttccagatgaaggttatgtgttgatagatgctgattattctcagattgagcttagaatacttgcacatatctctgaggatgaacgactgataaatgcttttaaaaataaccttgatattcattcacagacggcggcagagatctttggtgtggatataagtcaggttacaccaattatgcgaagccaggcaaaagcagttaactttggaattgtatatggtatatctgattatggactttcacgggatataaagatttcaagaaaagaagcagccgagtttattaatcgttattttgaaaagtatcccagagtaaaagaatatttggacaatgtcgtcaagtttgcccgtgaaaacggatttgttttgacaatatttaacaggaaaaggtatatcaaggatataaagtctactaataaaaacctgagaaactatgcagagagaatagcaatgaattcacctatccagggaagtgctgcagatattatgaaaatagcaatgataagagtttataaaaagctaaaagaaaacaatttaaaatcaagaattattctgcaggtccatgacgaacttttgattgaatcaccctatgaagagaaagagatagtaaaggaaatagtaaaatcggagatggaaaatgcggttttattgaaagttcctttggtagttgaagtgaaagaaggttcaaattggtatgaaacaaagtaaaggatcc

SEQ ID NO: 1869 - DNA, 2623 bp, Artificial Sequence
  Description of Artificial Sequence: Synthetic DNA sequence of Caldicellulosiruptor TOK13B DNA Polymerase A615R
atgaaatacctgctgccgaccgctgctgctggtctgctgctcctcgctgcccagccggcgatggccatggaatttgttatttttgatgggaatagtattctgtatagagctttttttgccttgccacagcttactacctcaacaggcatacctacaaatgctatatatggttttttgaatgtgctgttaaaatacttagattctgaaaaaccggattatgtagcagtagcttttgacaaaaaaggcagagctgtccgaaaaagtgaatatgaagaatacaaggctaacagaaaaccgatgccagattctcttcaggttcagataccttacgtaagagaaatacttgctgctctgaacattcctgtactgaaatgtgaagggtatgaagctgatgacgttataggcacacttgtaaatagatttaaagcccaggatttagagattgtgataataaccggagacagagatacacttcagttacttgataaaaatgtaattgtcaaaatagtcacaacaaggtttgacaggacaactgaagatttgtatgctgtagaaaatgtaaaagaaaaatatggtgtttttgcgcatcaggttgttgactataaagcattagtaggtgatgcgtcagacaatataccaggtgttaagggaattggagataaaactgccataaagctgttagaagagtaccagactctggagaatatatatcagaatctaaataacattaaaggagcgctaaaagagaagttggaatcaggaaaagacatggcatttttatcaaaaagactggctactatcatatgcgatttaccaattgaggtgaatcttgaagaattaaaaaccaaagaatgggacaaagaaagactttatcagattttacttcaacttgagtttaaaagctttattaaaagactgggcttttcagaagagattaactatgcaaggcagaactttcagctacctgaatttagtattaaagaacttcgtgatgtttcagcaatagggggcaaagaaatctatctattgtactcagatgaagaaggacttttttatatttatgaccatcaaacctcaaccatttttacaacttctgataaggaagctattaaagatcttttaacactccaaagcattcaaaaggttgtatatgatttaaaaaatatactccataaggtggactttgatgaagctaatcagataaaaaattgtaatgatgttatgttggcttcatatgttttggacagtacacgcagttcgtacgatttggaaacattgtttatttcttatctcaacactgatatagctgcaatcaaagagaatagatgggctggtgctacagttttattaagaaatctttgggatgaactttcaaaactcattgatttaaactcggcccaatacgtttatgagagcatagagatgcctcttgttcccattttatatgaaatggagaaaatcggttttaaggttgacaaaaacactttgcaggagtatacaaaagagattgagagcaagcttttaaagttggaatcacagatttatcaaatagccggtgaatggtttaacataaactcgccaaaacaactctcatatatattattcgaaaaactgaagcttccggttgttaaaaagaccaaaacaggatattcaacagatgccgaggtattagaagagctgtatgataaacatgacataataccgcttattctggattatagaatgtatacgaaaatactgacaacttactgtcagggactggttcaggcaataaatcctgcaactggaagaattcataccaactttattcagacaggtacggcaactggaagacttgcaagtcgtgagcccaatctgcaaaatattcctgtaaaatatgatgagggaaagctaataagaaaggcatttgttccagatgaaggttatgtgttgatagatgctgattattctcagattgagcttagaatacttgcacatatctctgaggatgaacgactgataaatgcttttaaaaataaccttgatattcattcacagacggcggcagagatctttggtgtggatataagtcaggttacaccaattatgcgaagccaggcaaaagcagttaactttggaattgtatatggtatatctgattatggactttcacgggatataaagatttcaagaaaagaagcagccgagtttattaatcgttattttgaaaagtatcccagagtaaaagaatatttggacaatgtcgtcaagtttgcccgtgaaaacggatttgttttgacaatatttaacaggaaaaggtatatcaaggatataaagtctactaataaaaacctgagaaactatgcagagagaatagcaatgaattcacctatccagggaagtgctgcagatattatgaaaatagcaatgataagagtttataaaaagctaaaagaaaacaatttaaaatcaagaattattctgcaggtccatgacgaacttttgattgaatcaccctatgaagagaaagagatagtaaaggaaatagtaaaatcggagatggaaaatgcggttttattgaaagttcctttggtagttgaagtgaaagaaggttcaaattggtatgaaacaaagtaaaggatcc

SEQ ID NO: 1870 - DNA, 2623 bp, Artificial Sequence
  Description of Artificial Sequence: Synthetic DNA sequence of Caldicellulosiruptor TOK13B DNA Polymerase A615S
atgaaatacctgctgccgaccgctgctgctggtctgctgctcctcgctgcccagccggcgatggccatggaatttgttatttttgatgggaatagtattctgtatagagctttttttgccttgccacagcttactacctcaacaggcatacctacaaatgctatatatggttttttgaatgtgctgttaaaatacttagattctgaaaaaccggattatgtagcagtagcttttgacaaaaaaggcagagctgtccgaaaaagtgaatatgaagaatacaaggctaacagaaaaccgatgccagattctcttcaggttcagataccttacgtaagagaaatacttgctgctctgaacattcctgtactgaaatgtgaagggtatgaagctgatgacgttataggcacacttgtaaatagatttaaagcccaggatttagagattgtgataataaccggagacagagatacacttcagttacttgataaaaatgtaattgtcaaaatagtcacaacaaggtttgacaggacaactgaagatttgtatgctgtagaaaatgtaaaagaaaaatatggtgtttttgcgcatcaggttgttgactataaagcattagtaggtgatgcgtcagacaatataccaggtgttaagggaattggagataaaactgccataaagctgttagaagagtaccagactctggagaatatatatcagaatctaaataacattaaaggagcgctaaaagagaagttggaatcaggaaaagacatggcatttttatcaaaaagactggctactatcatatgcgatttaccaattgaggtgaatcttgaagaattaaaaaccaaagaatgggacaaagaaagactttatcagattttacttcaacttgagtttaaaagctttattaaaagactgggcttttcagaagagattaactatgcaaggcagaactttcagctacctgaatttagtattaaagaacttcgtgatgtttcagcaatagggggcaaagaaatctatctattgtactcagatgaagaaggacttttttatatttatgaccatcaaacctcaaccatttttacaacttctgataaggaagctattaaagatcttttaacactccaaagcattcaaaaggttgtatatgatttaaaaaatatactccataaggtggactttgatgaagctaatcagataaaaaattgtaatgatgttatgttggcttcatatgttttggacagtacacgcagttcgtacgatttggaaacattgtttatttcttatctcaacactgatatagctgcaatcaaagagaatagatgggctggtgctacagttttattaagaaatctttgggatgaactttcaaaactcattgatttaaactcggcccaatacgtttatgagagcatagagatgcctcttgttcccattttatatgaaatggagaaaatcggttttaaggttgacaaaaacactttgcaggagtatacaaaagagattgagagcaagcttttaaagttggaatcacagatttatcaaatagccggtgaatggtttaacataaactcgccaaaacaactctcatatatattattcgaaaaactgaagcttccggttgttaaaaagaccaaaacaggatattcaacagatgccgaggtattagaagagctgtatgataaacatgacataataccgcttattctggattatagaatgtatacgaaaatactgacaacttactgtcagggactggttcaggcaataaatcctgcaactggaagaattcataccaactttattcagacaggtacggcaactggaagacttgcaagttctgagcccaatctgcaaaatattcctgtaaaatatgatgagggaaagctaataagaaaggcatttgttccagatgaaggttatgtgttgatagatgctgattattctcagattgagcttagaatacttgcacatatctctgaggatgaacgactgataaatgcttttaaaaataaccttgatattcattcacagacggcggcagagatctttggtgtggatataagtcaggttacaccaattatgcgaagccaggcaaaagcagttaactttggaattgtatatggtatatctgattatggactttcacgggatataaagatttcaagaaaagaagcagccgagtttattaatcgttattttgaaaagtatcccagagtaaaagaatatttggacaatgtcgtcaagtttgcccgtgaaaacggatttgttttgacaatatttaacaggaaaaggtatatcaaggatataaagtctactaataaaaacctgagaaactatgcagagagaatagcaatgaattcacctatccagggaagtgctgcagatattatgaaaatagcaatgataagagtttataaaaagctaaaagaaaacaatttaaaatcaagaattattctgcaggtccatgacgaacttttgattgaatcaccctatgaagagaaagagatagtaaaggaaatagtaaaatcggagatggaaaatgcggttttattgaaagttcctttggtagttgaagtgaaagaaggttcaaattggtatgaaacaaagtaaaggatcc

SEQ ID NO: 1871 - DNA, 2623 bp, Artificial Sequence
  Description of Artificial Sequence: Synthetic DNA sequence of Caldicellulosiruptor TOK13B DNA Polymerase A615T
atgaaatacctgctgccgaccgctgctgctggtctgctgctcctcgctgcccagccggcgatggccatggaatttgttatttttgatgggaatagtattctgtatagagctttttttgccttgccacagcttactacctcaacaggcatacctacaaatgctatatatggttttttgaatgtgctgttaaaatacttagattctgaaaaaccggattatgtagcagtagcttttgacaaaaaaggcagagctgtccgaaaaagtgaatatgaagaatacaaggctaacagaaaaccgatgccagattctcttcaggttcagataccttacgtaagagaaatacttgctgctctgaacattcctgtactgaaatgtgaagggtatgaagctgatgacgttataggcacacttgtaaatagatttaaagcccaggatttagagattgtgataataaccggagacagagatacacttcagttacttgataaaaatgtaattgtcaaaatagtcacaacaaggtttgacaggacaactgaagatttgtatgctgtagaaaatgtaaaagaaaaatatggtgtttttgcgcatcaggttgttgactataaagcattagtaggtgatgcgtcagacaatataccaggtgttaagggaattggagataaaactgccataaagctgttagaagagtaccagactctggagaatatatatcagaatctaaataacattaaaggagcgctaaaagagaagttggaatcaggaaaagacatggcatttttatcaaaaagactggctactatcatatgcgatttaccaattgaggtgaatcttgaagaattaaaaaccaaagaatgggacaaagaaagactttatcagattttacttcaacttgagtttaaaagctttattaaaagactgggcttttcagaagagattaactatgcaaggcagaactttcagctacctgaatttagtattaaagaacttcgtgatgtttcagcaatagggggcaaagaaatctatctattgtactcagatgaagaaggacttttttatatttatgaccatcaaacctcaaccatttttacaacttctgataaggaagctattaaagatcttttaacactccaaagcattcaaaaggttgtatatgatttaaaaaatatactccataaggtggactttgatgaagctaatcagataaaaaattgtaatgatgttatgttggcttcatatgttttggacagtacacgcagttcgtacgatttggaaacattgtttatttcttatctcaacactgatatagctgcaatcaaagagaatagatgggctggtgctacagttttattaagaaatctttgggatgaactttcaaaactcattgatttaaactcggcccaatacgtttatgagagcatagagatgcctcttgttcccattttatatgaaatggagaaaatcggttttaaggttgacaaaaacactttgcaggagtatacaaaagagattgagagcaagcttttaaagttggaatcacagatttatcaaatagccggtgaatggtttaacataaactcgccaaaacaactctcatatatattattcgaaaaactgaagcttccggttgttaaaaagaccaaaacaggatattcaacagatgccgaggtattagaagagctgtatgataaacatgacataataccgcttattctggattatagaatgtatacgaaaatactgacaacttactgtcagggactggttcaggcaataaatcctgcaactggaagaattcataccaactttattcagacaggtacggcaactggaagacttgcaagtactgagcccaatctgcaaaatattcctgtaaaatatgatgagggaaagctaataagaaaggcatttgttccagatgaaggttatgtgttgatagatgctgattattctcagattgagcttagaatacttgcacatatctctgaggatgaacgactgataaatgcttttaaaaataaccttgatattcattcacagacggcggcagagatctttggtgtggatataagtcaggttacaccaattatgcgaagccaggcaaaagcagttaactttggaattgtatatggtatatctgattatggactttcacgggatataaagatttcaagaaaagaagcagccgagtttattaatcgttattttgaaaagtatcccagagtaaaagaatatttggacaatgtcgtcaagtttgcccgtgaaaacggatttgttttgacaatatttaacaggaaaaggtatatcaaggatataaagtctactaataaaaacctgagaaactatgcagagagaatagcaatgaattcacctatccagggaagtgctgcagatattatgaaaatagcaatgataagagtttataaaaagctaaaagaaaacaatttaaaatcaagaattattctgcaggtccatgacgaacttttgattgaatcaccctatgaagagaaagagatagtaaaggaaatagtaaaatcggagatggaaaatgcggttttattgaaagttcctttggtagttgaagtgaaagaaggttcaaattggtatgaaacaaagtaaaggatcc

SEQ ID NO: 1872 - DNA, 2623 bp, Artificial Sequence
  Description of Artificial Sequence: Synthetic DNA sequence of Caldicellulosiruptor TOK13B DNA Polymerase A615V
atgaaatacctgctgccgaccgctgctgctggtctgctgctcctcgctgcccagccggcgatggccatggaatttgttatttttgatgggaatagtattctgtatagagctttttttgccttgccacagcttactacctcaacaggcatacctacaaatgctatatatggttttttgaatgtgctgttaaaatacttagattctgaaaaaccggattatgtagcagtagcttttgacaaaaaaggcagagctgtccgaaaaagtgaatatgaagaatacaaggctaacagaaaaccgatgccagattctcttcaggttcagataccttacgtaagagaaatacttgctgctctgaacattcctgtactgaaatgtgaagggtatgaagctgatgacgttataggcacacttgtaaatagatttaaagcccaggatttagagattgtgataataaccggagacagagatacacttcagttacttgataaaaatgtaattgtcaaaatagtcacaacaaggtttgacaggacaactgaagatttgtatgctgtagaaaatgtaaaagaaaaatatggtgtttttgcgcatcaggttgttgactataaagcattagtaggtgatgcgtcagacaatataccaggtgttaagggaattggagataaaactgccataaagctgttagaagagtaccagactctggagaatatatatcagaatctaaataacattaaaggagcgctaaaagagaagttggaatcaggaaaagacatggcatttttatcaaaaagactggctactatcatatgcgatttaccaattgaggtgaatcttgaagaattaaaaaccaaagaatgggacaaagaaagactttatcagattttacttcaacttgagtttaaaagctttattaaaagactgggcttttcagaagagattaactatgcaaggcagaactttcagctacctgaatttagtattaaagaacttcgtgatgtttcagcaatagggggcaaagaaatctatctattgtactcagatgaagaaggacttttttatatttatgaccatcaaacctcaaccatttttacaacttctgataaggaagctattaaagatcttttaacactccaaagcattcaaaaggttgtatatgatttaaaaaatatactccataaggtggactttgatgaagctaatcagataaaaaattgtaatgatgttatgttggcttcatatgttttggacagtacacgcagttcgtacgatttggaaacattgtttatttcttatctcaacactgatatagctgcaatcaaagagaatagatgggctggtgctacagttttattaagaaatctttgggatgaactttcaaaactcattgatttaaactcggcccaatacgtttatgagagcatagagatgcctcttgttcccattttatatgaaatggagaaaatcggttttaaggttgacaaaaacactttgcaggagtatacaaaagagattgagagcaagcttttaaagttggaatcacagatttatcaaatagccggtgaatggtttaacataaactcgccaaaacaactctcatatatattattcgaaaaactgaagcttccggttgttaaaaagaccaaaacaggatattcaacagatgccgaggtattagaagagctgtatgataaacatgacataataccgcttattctggattatagaatgtatacgaaaatactgacaacttactgtcagggactggttcaggcaataaatcctgcaactggaagaattcataccaactttattcagacaggtacggcaactggaagacttgcaagtgttgagcccaatctgcaaaatattcctgtaaaatatgatgagggaaagctaataagaaaggcatttgttccagatgaaggttatgtgttgatagatgctgattattctcagattgagcttagaatacttgcacatatctctgaggatgaacgactgataaatgcttttaaaaataaccttgatattcattcacagacggcggcagagatctttggtgtggatataagtcaggttacaccaattatgcgaagccaggcaaaagcagttaactttggaattgtatatggtatatctgattatggactttcacgggatataaagatttcaagaaaagaagcagccgagtttattaatcgttattttgaaaagtatcccagagtaaaagaatatttggacaatgtcgtcaagtttgcccgtgaaaacggatttgttttgacaatatttaacaggaaaaggtatatcaaggatataaagtctactaataaaaacctgagaaactatgcagagagaatagcaatgaattcacctatccagggaagtgctgcagatattatgaaaatagcaatgataagagtttataaaaagctaaaagaaaacaatttaaaatcaagaattattctgcaggtccatgacgaacttttgattgaatcaccctatgaagagaaagagatagtaaaggaaatagtaaaatcggagatggaaaatgcggttttattgaaagttcctttggtagttgaagtgaaagaaggttcaaattggtatgaaacaaagtaaaggatcc

SEQ ID NO: 1873 - DNA, 2623 bp, Artificial Sequence
  Description of Artificial Sequence: Synthetic DNA sequence of Caldicellulosiruptor TOK13B DNA Polymerase A615W
atgaaatacctgctgccgaccgctgctgctggtctgctgctcctcgctgcccagccggcgatggccatggaatttgttatttttgatgggaatagtattctgtatagagctttttttgccttgccacagcttactacctcaacaggcatacctacaaatgctatatatggttttttgaatgtgctgttaaaatacttagattctgaaaaaccggattatgtagcagtagcttttgacaaaaaaggcagagctgtccgaaaaagtgaatatgaagaatacaaggctaacagaaaaccgatgccagattctcttcaggttcagataccttacgtaagagaaatacttgctgctctgaacattcctgtactgaaatgtgaagggtatgaagctgatgacgttataggcacacttgtaaatagatttaaagcccaggatttagagattgtgataataaccggagacagagatacacttcagttacttgataaaaatgtaattgtcaaaatagtcacaacaaggtttgacaggacaactgaagatttgtatgctgtagaaaatgtaaaagaaaaatatggtgtttttgcgcatcaggttgttgactataaagcattagtaggtgatgcgtcagacaatataccaggtgttaagggaattggagataaaactgccataaagctgttagaagagtaccagactctggagaatatatatcagaatctaaataacattaaaggagcgctaaaagagaagttggaatcaggaaaagacatggcatttttatcaaaaagactggctactatcatatgcgatttaccaattgaggtgaatcttgaagaattaaaaaccaaagaatgggacaaagaaagactttatcagattttacttcaacttgagtttaaaagctttattaaaagactgggcttttcagaagagattaactatgcaaggcagaactttcagctacctgaatttagtattaaagaacttcgtgatgtttcagcaatagggggcaaagaaatctatctattgtactcagatgaagaaggacttttttatatttatgaccatcaaacctcaaccatttttacaacttctgataaggaagctattaaagatcttttaacactccaaagcattcaaaaggttgtatatgatttaaaaaatatactccataaggtggactttgatgaagctaatcagataaaaaattgtaatgatgttatgttggcttcatatgttttggacagtacacgcagttcgtacgatttggaaacattgtttatttcttatctcaacactgatatagctgcaatcaaagagaatagatgggctggtgctacagttttattaagaaatctttgggatgaactttcaaaactcattgatttaaactcggcccaatacgtttatgagagcatagagatgcctcttgttcccattttatatgaaatggagaaaatcggttttaaggttgacaaaaacactttgcaggagtatacaaaagagattgagagcaagcttttaaagttggaatcacagatttatcaaatagccggtgaatggtttaacataaactcgccaaaacaactctcatatatattattcgaaaaactgaagcttccggttgttaaaaagaccaaaacaggatattcaacagatgccgaggtattagaagagctgtatgataaacatgacataataccgcttattctggattatagaatgtatacgaaaatactgacaacttactgtcagggactggttcaggcaataaatcctgcaactggaagaattcataccaactttattcagacaggtacggcaactggaagacttgcaagttgggagcccaatctgcaaaatattcctgtaaaatatgatgagggaaagctaataagaaaggcatttgttccagatgaaggttatgtgttgatagatgctgattattctcagattgagcttagaatacttgcacatatctctgaggatgaacgactgataaatgcttttaaaaataaccttgatattcattcacagacggcggcagagatctttggtgtggatataagtcaggttacaccaattatgcgaagccaggcaaaagcagttaactttggaattgtatatggtatatctgattatggactttcacgggatataaagatttcaagaaaagaagcagccgagtttattaatcgttattttgaaaagtatcccagagtaaaagaatatttggacaatgtcgtcaagtttgcccgtgaaaacggatttgttttgacaatatttaacaggaaaaggtatatcaaggatataaagtctactaataaaaacctgagaaactatgcagagagaatagcaatgaattcacctatccagggaagtgctgcagatattatgaaaatagcaatgataagagtttataaaaagctaaaagaaaacaatttaaaatcaagaattattctgcaggtccatgacgaacttttgattgaatcaccctatgaagagaaagagatagtaaaggaaatagtaaaatcggagatggaaaatgcggttttattgaaagttcctttggtagttgaagtgaaagaaggttcaaattggtatgaaacaaagtaaaggatcc

SEQ ID NO: 1874 - DNA, 2623 bp, Artificial Sequence
  Description of Artificial Sequence: Synthetic DNA sequence of Caldicellulosiruptor TOK13B DNA Polymerase A615Y
atgaaatacctgctgccgaccgctgctgctggtctgctgctcctcgctgcccagccggcgatggccatggaatttgttatttttgatgggaatagtattctgtatagagctttttttgccttgccacagcttactacctcaacaggcatacctacaaatgctatatatggttttttgaatgtgctgttaaaatacttagattctgaaaaaccggattatgtagcagtagcttttgacaaaaaaggcagagctgtccgaaaaagtgaatatgaagaatacaaggctaacagaaaaccgatgccagattctcttcaggttcagataccttacgtaagagaaatacttgctgctctgaacattcctgtactgaaatgtgaagggtatgaagctgatgacgttataggcacacttgtaaatagatttaaagcccaggatttagagattgtgataataaccggagacagagatacacttcagttacttgataaaaatgtaattgtcaaaatagtcacaacaaggtttgacaggacaactgaagatttgtatgctgtagaaaatgtaaaagaaaaatatggtgtttttgcgcatcaggttgttgactataaagcattagtaggtgatgcgtcagacaatataccaggtgttaagggaattggagataaaactgccataaagctgttagaagagtaccagactctggagaatatatatcagaatctaaataacattaaaggagcgctaaaagagaagttggaatcaggaaaagacatggcatttttatcaaaaagactggctactatcatatgcgatttaccaattgaggtgaatcttgaagaattaaaaaccaaagaatgggacaaagaaagactttatcagattttacttcaacttgagtttaaaagctttattaaaagactgggcttttcagaagagattaactatgcaaggcagaactttcagctacctgaatttagtattaaagaacttcgtgatgtttcagcaatagggggcaaagaaatctatctattgtactcagatgaagaaggacttttttatatttatgaccatcaaacctcaaccatttttacaacttctgataaggaagctattaaagatcttttaacactccaaagcattcaaaaggttgtatatgatttaaaaaatatactccataaggtggactttgatgaagctaatcagataaaaaattgtaatgatgttatgttggcttcatatgttttggacagtacacgcagttcgtacgatttggaaacattgtttatttcttatctcaacactgatatagctgcaatcaaagagaatagatgggctggtgctacagttttattaagaaatctttgggatgaactttcaaaactcattgatttaaactcggcccaatacgtttatgagagcatagagatgcctcttgttcccattttatatgaaatggagaaaatcggttttaaggttgacaaaaacactttgcaggagtatacaaaagagattgagagcaagcttttaaagttggaatcacagatttatcaaatagccggtgaatggtttaacataaactcgccaaaacaactctcatatatattattcgaaaaactgaagcttccggttgttaaaaagaccaaaacaggatattcaacagatgccgaggtattagaagagctgtatgataaacatgacataataccgcttattctggattatagaatgtatacgaaaatactgacaacttactgtcagggactggttcaggcaataaatcctgcaactggaagaattcataccaactttattcagacaggtacggcaactggaagacttgcaagttatgagcccaatctgcaaaatattcctgtaaaatatgatgagggaaagctaataagaaaggcatttgttccagatgaaggttatgtgttgatagatgctgattattctcagattgagcttagaatacttgcacatatctctgaggatgaacgactgataaatgcttttaaaaataaccttgatattcattcacagacggcggcagagatctttggtgtggatataagtcaggttacaccaattatgcgaagccaggcaaaagcagttaactttggaattgtatatggtatatctgattatggactttcacgggatataaagatttcaagaaaagaagcagccgagtttattaatcgttattttgaaaagtatcccagagtaaaagaatatttggacaatgtcgtcaagtttgcccgtgaaaacggatttgttttgacaatatttaacaggaaaaggtatatcaaggatataaagtctactaataaaaacctgagaaactatgcagagagaatagcaatgaattcacctatccagggaagtgctgcagatattatgaaaatagcaatgataagagtttataaaaagctaaaagaaaacaatttaaaatcaagaattattctgcaggtccatgacgaacttttgattgaatcaccctatgaagagaaagagatagtaaaggaaatagtaaaatcggagatggaaaatgcggttttattgaaagttcctttggtagttgaagtgaaagaaggttcaaattggtatgaaacaaagtaaaggatcc

SEQ ID NO: 1875 - DNA, 2623 bp, Artificial Sequence
  Description of Artificial Sequence: Synthetic DNA sequence of Caldicellulosiruptor TOK13B DNA Polymerase E616A
atgaaatacctgctgccgaccgctgctgctggtctgctgctcctcgctgcccagccggcgatggccatggaatttgttatttttgatgggaatagtattctgtatagagctttttttgccttgccacagcttactacctcaacaggcatacctacaaatgctatatatggttttttgaatgtgctgttaaaatacttagattctgaaaaaccggattatgtagcagtagcttttgacaaaaaaggcagagctgtccgaaaaagtgaatatgaagaatacaaggctaacagaaaaccgatgccagattctcttcaggttcagataccttacgtaagagaaatacttgctgctctgaacattcctgtactgaaatgtgaagggtatgaagctgatgacgttataggcacacttgtaaatagatttaaagcccaggatttagagattgtgataataaccggagacagagatacacttcagttacttgataaaaatgtaattgtcaaaatagtcacaacaaggtttgacaggacaactgaagatttgtatgctgtagaaaatgtaaaagaaaaatatggtgtttttgcgcatcaggttgttgactataaagcattagtaggtgatgcgtcagacaatataccaggtgttaagggaattggagataaaactgccataaagctgttagaagagtaccagactctggagaatatatatcagaatctaaataacattaaaggagcgctaaaagagaagttggaatcaggaaaagacatggcatttttatcaaaaagactggctactatcatatgcgatttaccaattgaggtgaatcttgaagaattaaaaaccaaagaatgggacaaagaaagactttatcagattttacttcaacttgagtttaaaagctttattaaaagactgggcttttcagaagagattaactatgcaaggcagaactttcagctacctgaatttagtattaaagaacttcgtgatgtttcagcaatagggggcaaagaaatctatctattgtactcagatgaagaaggacttttttatatttatgaccatcaaacctcaaccatttttacaacttctgataaggaagctattaaagatcttttaacactccaaagcattcaaaaggttgtatatgatttaaaaaatatactccataaggtggactttgatgaagctaatcagataaaaaattgtaatgatgttatgttggcttcatatgttttggacagtacacgcagttcgtacgatttggaaacattgtttatttcttatctcaacactgatatagctgcaatcaaagagaatagatgggctggtgctacagttttattaagaaatctttgggatgaactttcaaaactcattgatttaaactcggcccaatacgtttatgagagcatagagatgcctcttgttcccattttatatgaaatggagaaaatcggttttaaggttgacaaaaacactttgcaggagtatacaaaagagattgagagcaagcttttaaagttggaatcacagatttatcaaatagccggtgaatggtttaacataaactcgccaaaacaactctcatatatattattcgaaaaactgaagcttccggttgttaaaaagaccaaaacaggatattcaacagatgccgaggtattagaagagctgtatgataaacatgacataataccgcttattctggattatagaatgtatacgaaaatactgacaacttactgtcagggactggttcaggcaataaatcctgcaactggaagaattcataccaactttattcagacaggtacggcaactggaagacttgcaagtgcagctcccaatctgcaaaatattcctgtaaaatatgatgagggaaagctaataagaaaggcatttgttccagatgaaggttatgtgttgatagatgctgattattctcagattgagcttagaatacttgcacatatctctgaggatgaacgactgataaatgcttttaaaaataaccttgatattcattcacagacggcggcagagatctttggtgtggatataagtcaggttacaccaattatgcgaagccaggcaaaagcagttaactttggaattgtatatggtatatctgattatggactttcacgggatataaagatttcaagaaaagaagcagccgagtttattaatcgttattttgaaaagtatcccagagtaaaagaatatttggacaatgtcgtcaagtttgcccgtgaaaacggatttgttttgacaatatttaacaggaaaaggtatatcaaggatataaagtctactaataaaaacctgagaaactatgcagagagaatagcaatgaattcacctatccagggaagtgctgcagatattatgaaaatagcaatgataagagtttataaaaagctaaaagaaaacaatttaaaatcaagaattattctgcaggtccatgacgaacttttgattgaatcaccctatgaagagaaagagatagtaaaggaaatagtaaaatcggagatggaaaatgcggttttattgaaagttcctttggtagttgaagtgaaagaaggttcaaattggtatgaaacaaagtaaaggatcc

SEQ ID NO: 1876 - DNA, 2623 bp, Artificial Sequence
  Description of Artificial Sequence: Synthetic DNA sequence of Caldicellulosiruptor TOK13B DNA Polymerase E616C
atgaaatacctgctgccgaccgctgctgctggtctgctgctcctcgctgcccagccggcgatggccatggaatttgttatttttgatgggaatagtattctgtatagagctttttttgccttgccacagcttactacctcaacaggcatacctacaaatgctatatatggttttttgaatgtgctgttaaaatacttagattctgaaaaaccggattatgtagcagtagcttttgacaaaaaaggcagagctgtccgaaaaagtgaatatgaagaatacaaggctaacagaaaaccgatgccagattctcttcaggttcagataccttacgtaagagaaatacttgctgctctgaacattcctgtactgaaatgtgaagggtatgaagctgatgacgttataggcacacttgtaaatagatttaaagcccaggatttagagattgtgataataaccggagacagagatacacttcagttacttgataaaaatgtaattgtcaaaatagtcacaacaaggtttgacaggacaactgaagatttgtatgctgtagaaaatgtaaaagaaaaatatggtgtttttgcgcatcaggttgttgactataaagcattagtaggtgatgcgtcagacaatataccaggtgttaagggaattggagataaaactgccataaagctgttagaagagtaccagactctggagaatatatatcagaatctaaataacattaaaggagcgctaaaagagaagttggaatcaggaaaagacatggcatttttatcaaaaagactggctactatcatatgcgatttaccaattgaggtgaatcttgaagaattaaaaaccaaagaatgggacaaagaaagactttatcagattttacttcaacttgagtttaaaagctttattaaaagactgggcttttcagaagagattaactatgcaaggcagaactttcagctacctgaatttagtattaaagaacttcgtgatgtttcagcaatagggggcaaagaaatctatctattgtactcagatgaagaaggacttttttatatttatgaccatcaaacctcaaccatttttacaacttctgataaggaagctattaaagatcttttaacactccaaagcattcaaaaggttgtatatgatttaaaaaatatactccataaggtggactttgatgaagctaatcagataaaaaattgtaatgatgttatgttggcttcatatgttttggacagtacacgcagttcgtacgatttggaaacattgtttatttcttatctcaacactgatatagctgcaatcaaagagaatagatgggctggtgctacagttttattaagaaatctttgggatgaactttcaaaactcattgatttaaactcggcccaatacgtttatgagagcatagagatgcctcttgttcccattttatatgaaatggagaaaatcggttttaaggttgacaaaaacactttgcaggagtatacaaaagagattgagagcaagcttttaaagttggaatcacagatttatcaaatagccggtgaatggtttaacataaactcgccaaaacaactctcatatatattattcgaaaaactgaagcttccggttgttaaaaagaccaaaacaggatattcaacagatgccgaggtattagaagagctgtatgataaacatgacataataccgcttattctggattatagaatgtatacgaaaatactgacaacttactgtcagggactggttcaggcaataaatcctgcaactggaagaattcataccaactttattcagacaggtacggcaactggaagacttgcaagtgcatgtcccaatctgcaaaatattcctgtaaaatatgatgagggaaagctaataagaaaggcatttgttccagatgaaggttatgtgttgatagatgctgattattctcagattgagcttagaatacttgcacatatctctgaggatgaacgactgataaatgcttttaaaaataaccttgatattcattcacagacggcggcagagatctttggtgtggatataagtcaggttacaccaattatgcgaagccaggcaaaagcagttaactttggaattgtatatggtatatctgattatggactttcacgggatataaagatttcaagaaaagaagcagccgagtttattaatcgttattttgaaaagtatcccagagtaaaagaatatttggacaatgtcgtcaagtttgcccgtgaaaacggatttgttttgacaatatttaacaggaaaaggtatatcaaggatataaagtctactaataaaaacctgagaaactatgcagagagaatagcaatgaattcacctatccagggaagtgctgcagatattatgaaaatagcaatgataagagtttataaaaagctaaaagaaaacaatttaaaatcaagaattattctgcaggtccatgacgaacttttgattgaatcaccctatgaagagaaagagatagtaaaggaaatagtaaaatcggagatggaaaatgcggttttattgaaagttcctttggtagttgaagtgaaagaaggttcaaattggtatgaaacaaagtaaaggatcc

SEQ ID NO: 1877 - DNA, 2623 bp, Artificial Sequence
  Description of Artificial Sequence: Synthetic DNA sequence of Caldicellulosiruptor TOK13B DNA Polymerase E616D
atgaaatacctgctgccgaccgctgctgctggtctgctgctcctcgctgcccagccggcgatggccatggaatttgttatttttgatgggaatagtattctgtatagagctttttttgccttgccacagcttactacctcaacaggcatacctacaaatgctatatatggttttttgaatgtgctgttaaaatacttagattctgaaaaaccggattatgtagcagtagcttttgacaaaaaaggcagagctgtccgaaaaagtgaatatgaagaatacaaggctaacagaaaaccgatgccagattctcttcaggttcagataccttacgtaagagaaatacttgctgctctgaacattcctgtactgaaatgtgaagggtatgaagctgatgacgttataggcacacttgtaaatagatttaaagcccaggatttagagattgtgataataaccggagacagagatacacttcagttacttgataaaaatgtaattgtcaaaatagtcacaacaaggtttgacaggacaactgaagatttgtatgctgtagaaaatgtaaaagaaaaatatggtgtttttgcgcatcaggttgttgactataaagcattagtaggtgatgcgtcagacaatataccaggtgttaagggaattggagataaaactgccataaagctgttagaagagtaccagactctggagaatatatatcagaatctaaataacattaaaggagcgctaaaagagaagttggaatcaggaaaagacatggcatttttatcaaaaagactggctactatcatatgcgatttaccaattgaggtgaatcttgaagaattaaaaaccaaagaatgggacaaagaaagactttatcagattttacttcaacttgagtttaaaagctttattaaaagactgggcttttcagaagagattaactatgcaaggcagaactttcagctacctgaatttagtattaaagaacttcgtgatgtttcagcaatagggggcaaagaaatctatctattgtactcagatgaagaaggacttttttatatttatgaccatcaaacctcaaccatttttacaacttctgataaggaagctattaaagatcttttaacactccaaagcattcaaaaggttgtatatgatttaaaaaatatactccataaggtggactttgatgaagctaatcagataaaaaattgtaatgatgttatgttggcttcatatgttttggacagtacacgcagttcgtacgatttggaaacattgtttatttcttatctcaacactgatatagctgcaatcaaagagaatagatgggctggtgctacagttttattaagaaatctttgggatgaactttcaaaactcattgatttaaactcggcccaatacgtttatgagagcatagagatgcctcttgttcccattttatatgaaatggagaaaatcggttttaaggttgacaaaaacactttgcaggagtatacaaaagagattgagagcaagcttttaaagttggaatcacagatttatcaaatagccggtgaatggtttaacataaactcgccaaaacaactctcatatatattattcgaaaaactgaagcttccggttgttaaaaagaccaaaacaggatattcaacagatgccgaggtattagaagagctgtatgataaacatgacataataccgcttattctggattatagaatgtatacgaaaatactgacaacttactgtcagggactggttcaggcaataaatcctgcaactggaagaattcataccaactttattcagacaggtacggcaactggaagacttgcaagtgcagatcccaatctgcaaaatattcctgtaaaatatgatgagggaaagctaataagaaaggcatttgttccagatgaaggttatgtgttgatagatgctgattattctcagattgagcttagaatacttgcacatatctctgaggatgaacgactgataaatgcttttaaaaataaccttgatattcattcacagacggcggcagagatctttggtgtggatataagtcaggttacaccaattatgcgaagccaggcaaaagcagttaactttggaattgtatatggtatatctgattatggactttcacgggatataaagatttcaagaaaagaagcagccgagtttattaatcgttattttgaaaagtatcccagagtaaaagaatatttggacaatgtcgtcaagtttgcccgtgaaaacggatttgttttgacaatatttaacaggaaaaggtatatcaaggatataaagtctactaataaaaacctgagaaactatgcagagagaatagcaatgaattcacctatccagggaagtgctgcagatattatgaaaatagcaatgataagagtttataaaaagctaaaagaaaacaatttaaaatcaagaattattctgcaggtccatgacgaacttttgattgaatcaccctatgaagagaaagagatagtaaaggaaatagtaaaatcggagatggaaaatgcggttttattgaaagttcctttggtagttgaagtgaaagaaggttcaaattggtatgaaacaaagtaaaggatcc

SEQ ID NO: 1878 - DNA, 2623 bp, Artificial Sequence
  Description of Artificial Sequence: Synthetic Caldicellulosiruptor TOK13B DNA Polymerase E616F
atgaaatacctgctgccgaccgctgctgctggtctgctgctcctcgctgcccagccggcgatggccatggaatttgttatttttgatgggaatagtattctgtatagagctttttttgccttgccacagcttactacctcaacaggcatacctacaaatgctatatatggttttttgaatgtgctgttaaaatacttagattctgaaaaaccggattatgtagcagtagcttttgacaaaaaaggcagagctgtccgaaaaagtgaatatgaagaatacaaggctaacagaaaaccgatgccagattctcttcaggttcagataccttacgtaagagaaatacttgctgctctgaacattcctgtactgaaatgtgaagggtatgaagctgatgacgttataggcacacttgtaaatagatttaaagcccaggatttagagattgtgataataaccggagacagagatacacttcagttacttgataaaaatgtaattgtcaaaatagtcacaacaaggtttgacaggacaactgaagatttgtatgctgtagaaaatgtaaaagaaaaatatggtgtttttgcgcatcaggttgttgactataaagcattagtaggtgatgcgtcagacaatataccaggtgttaagggaattggagataaaactgccataaagctgttagaagagtaccagactctggagaatatatatcagaatctaaataacattaaaggagcgctaaaagagaagttggaatcaggaaaagacatggcatttttatcaaaaagactggctactatcatatgcgatttaccaattgaggtgaatcttgaagaattaaaaaccaaagaatgggacaaagaaagactttatcagattttacttcaacttgagtttaaaagctttattaaaagactgggcttttcagaagagattaactatgcaaggcagaactttcagctacctgaatttagtattaaagaacttcgtgatgtttcagcaatagggggcaaagaaatctatctattgtactcagatgaagaaggacttttttatatttatgaccatcaaacctcaaccatttttacaacttctgataaggaagctattaaagatcttttaacactccaaagcattcaaaaggttgtatatgatttaaaaaatatactccataaggtggactttgatgaagctaatcagataaaaaattgtaatgatgttatgttggcttcatatgttttggacagtacacgcagttcgtacgatttggaaacattgtttatttcttatctcaacactgatatagctgcaatcaaagagaatagatgggctggtgctacagttttattaagaaatctttgggatgaactttcaaaactcattgatttaaactcggcccaatacgtttatgagagcatagagatgcctcttgttcccattttatatgaaatggagaaaatcggttttaaggttgacaaaaacactttgcaggagtatacaaaagagattgagagcaagcttttaaagttggaatcacagatttatcaaatagccggtgaatggtttaacataaactcgccaaaacaactctcatatatattattcgaaaaactgaagcttccggttgttaaaaagaccaaaacaggatattcaacagatgccgaggtattagaagagctgtatgataaacatgacataataccgcttattctggattatagaatgtatacgaaaatactgacaacttactgtcagggactggttcaggcaataaatcctgcaactggaagaattcataccaactttattcagacaggtacggcaactggaagacttgcaagtgcatttcccaatctgcaaaatattcctgtaaaatatgatgagggaaagctaataagaaaggcatttgttccagatgaaggttatgtgttgatagatgctgattattctcagattgagcttagaatacttgcacatatctctgaggatgaacgactgataaatgcttttaaaaataaccttgatattcattcacagacggcggcagagatctttggtgtggatataagtcaggttacaccaattatgcgaagccaggcaaaagcagttaactttggaattgtatatggtatatctgattatggactttcacgggatataaagatttcaagaaaagaagcagccgagtttattaatcgttattttgaaaagtatcccagagtaaaagaatatttggacaatgtcgtcaagtttgcccgtgaaaacggatttgttttgacaatatttaacaggaaaaggtatatcaaggatataaagtctactaataaaaacctgagaaactatgcagagagaatagcaatgaattcacctatccagggaagtgctgcagatattatgaaaatagcaatgataagagtttataaaaagctaaaagaaaacaatttaaaatcaagaattattctgcaggtccatgacgaacttttgattgaatcaccctatgaagagaaagagatagtaaaggaaatagtaaaatcggagatggaaaatgcggttttattgaaagttcctttggtagttgaagtgaaagaaggttcaaattggtatgaaacaaagtaaaggatcc

SEQ ID NO: 1879 - DNA, 2623 bp, Artificial Sequence
  Description of Artificial Sequence: Synthetic DNA sequence of Caldicellulosiruptor TOK13B DNA Polymerase E616G
atgaaatacctgctgccgaccgctgctgctggtctgctgctcctcgctgcccagccggcgatggccatggaatttgttatttttgatgggaatagtattctgtatagagctttttttgccttgccacagcttactacctcaacaggcatacctacaaatgctatatatggttttttgaatgtgctgttaaaatacttagattctgaaaaaccggattatgtagcagtagcttttgacaaaaaaggcagagctgtccgaaaaagtgaatatgaagaatacaaggctaacagaaaaccgatgccagattctcttcaggttcagataccttacgtaagagaaatacttgctgctctgaacattcctgtactgaaatgtgaagggtatgaagctgatgacgttataggcacacttgtaaatagatttaaagcccaggatttagagattgtgataataaccggagacagagatacacttcagttacttgataaaaatgtaattgtcaaaatagtcacaacaaggtttgacaggacaactgaagatttgtatgctgtagaaaatgtaaaagaaaaatatggtgtttttgcgcatcaggttgttgactataaagcattagtaggtgatgcgtcagacaatataccaggtgttaagggaattggagataaaactgccataaagctgttagaagagtaccagactctggagaatatatatcagaatctaaataacattaaaggagcgctaaaagagaagttggaatcaggaaaagacatggcatttttatcaaaaagactggctactatcatatgcgatttaccaattgaggtgaatcttgaagaattaaaaaccaaagaatgggacaaagaaagactttatcagattttacttcaacttgagtttaaaagctttattaaaagactgggcttttcagaagagattaactatgcaaggcagaactttcagctacctgaatttagtattaaagaacttcgtgatgtttcagcaatagggggcaaagaaatctatctattgtactcagatgaagaaggacttttttatatttatgaccatcaaacctcaaccatttttacaacttctgataaggaagctattaaagatcttttaacactccaaagcattcaaaaggttgtatatgatttaaaaaatatactccataaggtggactttgatgaagctaatcagataaaaaattgtaatgatgttatgttggcttcatatgttttggacagtacacgcagttcgtacgatttggaaacattgtttatttcttatctcaacactgatatagctgcaatcaaagagaatagatgggctggtgctacagttttattaagaaatctttgggatgaactttcaaaactcattgatttaaactcggcccaatacgtttatgagagcatagagatgcctcttgttcccattttatatgaaatggagaaaatcggttttaaggttgacaaaaacactttgcaggagtatacaaaagagattgagagcaagcttttaaagttggaatcacagatttatcaaatagccggtgaatggtttaacataaactcgccaaaacaactctcatatatattattcgaaaaactgaagcttccggttgttaaaaagaccaaaacaggatattcaacagatgccgaggtattagaagagctgtatgataaacatgacataataccgcttattctggattatagaatgtatacgaaaatactgacaacttactgtcagggactggttcaggcaataaatcctgcaactggaagaattcataccaactttattcagacaggtacggcaactggaagacttgcaagtgcaggtcccaatctgcaaaatattcctgtaaaatatgatgagggaaagctaataagaaaggcatttgttccagatgaaggttatgtgttgatagatgctgattattctcagattgagcttagaatacttgcacatatctctgaggatgaacgactgataaatgcttttaaaaataaccttgatattcattcacagacggcggcagagatctttggtgtggatataagtcaggttacaccaattatgcgaagccaggcaaaagcagttaactttggaattgtatatggtatatctgattatggactttcacgggatataaagatttcaagaaaagaagcagccgagtttattaatcgttattttgaaaagtatcccagagtaaaagaatatttggacaatgtcgtcaagtttgcccgtgaaaacggatttgttttgacaatatttaacaggaaaaggtatatcaaggatataaagtctactaataaaaacctgagaaactatgcagagagaatagcaatgaattcacctatccagggaagtgctgcagatattatgaaaatagcaatgataagagtttataaaaagctaaaagaaaacaatttaaaatcaagaattattctgcaggtccatgacgaacttttgattgaatcaccctatgaagagaaagagatagtaaaggaaatagtaaaatcggagatggaaaatgcggttttattgaaagttcctttggtagttgaagtgaaagaaggttcaaattggtatgaaacaaagtaaaggatcc

SEQ ID NO: 1880 - DNA, 2623 bp, Artificial Sequence
  Description of Artificial Sequence: Synthetic DNA sequence of Caldicellulosiruptor TOK13B DNA Polymerase E616H
atgaaatacctgctgccgaccgctgctgctggtctgctgctcctcgctgcccagccggcgatggccatggaatttgttatttttgatgggaatagtattctgtatagagctttttttgccttgccacagcttactacctcaacaggcatacctacaaatgctatatatggttttttgaatgtgctgttaaaatacttagattctgaaaaaccggattatgtagcagtagcttttgacaaaaaaggcagagctgtccgaaaaagtgaatatgaagaatacaaggctaacagaaaaccgatgccagattctcttcaggttcagataccttacgtaagagaaatacttgctgctctgaacattcctgtactgaaatgtgaagggtatgaagctgatgacgttataggcacacttgtaaatagatttaaagcccaggatttagagattgtgataataaccggagacagagatacacttcagttacttgataaaaatgtaattgtcaaaatagtcacaacaaggtttgacaggacaactgaagatttgtatgctgtagaaaatgtaaaagaaaaatatggtgtttttgcgcatcaggttgttgactataaagcattagtaggtgatgcgtcagacaatataccaggtgttaagggaattggagataaaactgccataaagctgttagaagagtaccagactctggagaatatatatcagaatctaaataacattaaaggagcgctaaaagagaagttggaatcaggaaaagacatggcatttttatcaaaaagactggctactatcatatgcgatttaccaattgaggtgaatcttgaagaattaaaaaccaaagaatgggacaaagaaagactttatcagattttacttcaacttgagtttaaaagctttattaaaagactgggcttttcagaagagattaactatgcaaggcagaactttcagctacctgaatttagtattaaagaacttcgtgatgtttcagcaatagggggcaaagaaatctatctattgtactcagatgaagaaggacttttttatatttatgaccatcaaacctcaaccatttttacaacttctgataaggaagctattaaagatcttttaacactccaaagcattcaaaaggttgtatatgatttaaaaaatatactccataaggtggactttgatgaagctaatcagataaaaaattgtaatgatgttatgttggcttcatatgttttggacagtacacgcagttcgtacgatttggaaacattgtttatttcttatctcaacactgatatagctgcaatcaaagagaatagatgggctggtgctacagttttattaagaaatctttgggatgaactttcaaaactcattgatttaaactcggcccaatacgtttatgagagcatagagatgcctcttgttcccattttatatgaaatggagaaaatcggttttaaggttgacaaaaacactttgcaggagtatacaaaagagattgagagcaagcttttaaagttggaatcacagatttatcaaatagccggtgaatggtttaacataaactcgccaaaacaactctcatatatattattcgaaaaactgaagcttccggttgttaaaaagaccaaaacaggatattcaacagatgccgaggtattagaagagctgtatgataaacatgacataataccgcttattctggattatagaatgtatacgaaaatactgacaacttactgtcagggactggttcaggcaataaatcctgcaactggaagaattcataccaactttattcagacaggtacggcaactggaagacttgcaagtgcacatcccaatctgcaaaatattcctgtaaaatatgatgagggaaagctaataagaaaggcatttgttccagatgaaggttatgtgttgatagatgctgattattctcagattgagcttagaatacttgcacatatctctgaggatgaacgactgataaatgcttttaaaaataaccttgatattcattcacagacggcggcagagatctttggtgtggatataagtcaggttacaccaattatgcgaagccaggcaaaagcagttaactttggaattgtatatggtatatctgattatggactttcacgggatataaagatttcaagaaaagaagcagccgagtttattaatcgttattttgaaaagtatcccagagtaaaagaatatttggacaatgtcgtcaagtttgcccgtgaaaacggatttgttttgacaatatttaacaggaaaaggtatatcaaggatataaagtctactaataaaaacctgagaaactatgcagagagaatagcaatgaattcacctatccagggaagtgctgcagatattatgaaaatagcaatgataagagtttataaaaagctaaaagaaaacaatttaaaatcaagaattattctgcaggtccatgacgaacttttgattgaatcaccctatgaagagaaagagatagtaaaggaaatagtaaaatcggagatggaaaatgcggttttattgaaagttcctttggtagttgaagtgaaagaaggttcaaattggtatgaaacaaagtaaaggatcc

SEQ ID NO: 1881 - DNA, 2623 bp, Artificial Sequence
  Description of Artificial Sequence: Synthetic DNA sequence of Caldicellulosiruptor TOK13B DNA Polymerase E616I
atgaaatacctgctgccgaccgctgctgctggtctgctgctcctcgctgcccagccggcgatggccatggaatttgttatttttgatgggaatagtattctgtatagagctttttttgccttgccacagcttactacctcaacaggcatacctacaaatgctatatatggttttttgaatgtgctgttaaaatacttagattctgaaaaaccggattatgtagcagtagcttttgacaaaaaaggcagagctgtccgaaaaagtgaatatgaagaatacaaggctaacagaaaaccgatgccagattctcttcaggttcagataccttacgtaagagaaatacttgctgctctgaacattcctgtactgaaatgtgaagggtatgaagctgatgacgttataggcacacttgtaaatagatttaaagcccaggatttagagattgtgataataaccggagacagagatacacttcagttacttgataaaaatgtaattgtcaaaatagtcacaacaaggtttgacaggacaactgaagatttgtatgctgtagaaaatgtaaaagaaaaatatggtgtttttgcgcatcaggttgttgactataaagcattagtaggtgatgcgtcagacaatataccaggtgttaagggaattggagataaaactgccataaagctgttagaagagtaccagactctggagaatatatatcagaatctaaataacattaaaggagcgctaaaagagaagttggaatcaggaaaagacatggcatttttatcaaaaagactggctactatcatatgcgatttaccaattgaggtgaatcttgaagaattaaaaaccaaagaatgggacaaagaaagactttatcagattttacttcaacttgagtttaaaagctttattaaaagactgggcttttcagaagagattaactatgcaaggcagaactttcagctacctgaatttagtattaaagaacttcgtgatgtttcagcaatagggggcaaagaaatctatctattgtactcagatgaagaaggacttttttatatttatgaccatcaaacctcaaccatttttacaacttctgataaggaagctattaaagatcttttaacactccaaagcattcaaaaggttgtatatgatttaaaaaatatactccataaggtggactttgatgaagctaatcagataaaaaattgtaatgatgttatgttggcttcatatgttttggacagtacacgcagttcgtacgatttggaaacattgtttatttcttatctcaacactgatatagctgcaatcaaagagaatagatgggctggtgctacagttttattaagaaatctttgggatgaactttcaaaactcattgatttaaactcggcccaatacgtttatgagagcatagagatgcctcttgttcccattttatatgaaatggagaaaatcggttttaaggttgacaaaaacactttgcaggagtatacaaaagagattgagagcaagcttttaaagttggaatcacagatttatcaaatagccggtgaatggtttaacataaactcgccaaaacaactctcatatatattattcgaaaaactgaagcttccggttgttaaaaagaccaaaacaggatattcaacagatgccgaggtattagaagagctgtatgataaacatgacataataccgcttattctggattatagaatgtatacgaaaatactgacaacttactgtcagggactggttcaggcaataaatcctgcaactggaagaattcataccaactttattcagacaggtacggcaactggaagacttgcaagtgcaattcccaatctgcaaaatattcctgtaaaatatgatgagggaaagctaataagaaaggcatttgttccagatgaaggttatgtgttgatagatgctgattattctcagattgagcttagaatacttgcacatatctctgaggatgaacgactgataaatgcttttaaaaataaccttgatattcattcacagacggcggcagagatctttggtgtggatataagtcaggttacaccaattatgcgaagccaggcaaaagcagttaactttggaattgtatatggtatatctgattatggactttcacgggatataaagatttcaagaaaagaagcagccgagtttattaatcgttattttgaaaagtatcccagagtaaaagaatatttggacaatgtcgtcaagtttgcccgtgaaaacggatttgttttgacaatatttaacaggaaaaggtatatcaaggatataaagtctactaataaaaacctgagaaactatgcagagagaatagcaatgaattcacctatccagggaagtgctgcagatattatgaaaatagcaatgataagagtttataaaaagctaaaagaaaacaatttaaaatcaagaattattctgcaggtccatgacgaacttttgattgaatcaccctatgaagagaaagagatagtaaaggaaatagtaaaatcggagatggaaaatgcggttttattgaaagttcctttggtagttgaagtgaaagaaggttcaaattggtatgaaacaaagtaaaggatcc

SEQ ID NO: 1882 - DNA, 2623 bp, Artificial Sequence
  Description of Artificial Sequence: Synthetic DNA sequence of Caldicellulosiruptor TOK13B DNA Polymerase E616L
atgaaatacctgctgccgaccgctgctgctggtctgctgctcctcgctgcccagccggcgatggccatggaatttgttatttttgatgggaatagtattctgtatagagctttttttgccttgccacagcttactacctcaacaggcatacctacaaatgctatatatggttttttgaatgtgctgttaaaatacttagattctgaaaaaccggattatgtagcagtagcttttgacaaaaaaggcagagctgtccgaaaaagtgaatatgaagaatacaaggctaacagaaaaccgatgccagattctcttcaggttcagataccttacgtaagagaaatacttgctgctctgaacattcctgtactgaaatgtgaagggtatgaagctgatgacgttataggcacacttgtaaatagatttaaagcccaggatttagagattgtgataataaccggagacagagatacacttcagttacttgataaaaatgtaattgtcaaaatagtcacaacaaggtttgacaggacaactgaagatttgtatgctgtagaaaatgtaaaagaaaaatatggtgtttttgcgcatcaggttgttgactataaagcattagtaggtgatgcgtcagacaatataccaggtgttaagggaattggagataaaactgccataaagctgttagaagagtaccagactctggagaatatatatcagaatctaaataacattaaaggagcgctaaaagagaagttggaatcaggaaaagacatggcatttttatcaaaaagactggctactatcatatgcgatttaccaattgaggtgaatcttgaagaattaaaaaccaaagaatgggacaaagaaagactttatcagattttacttcaacttgagtttaaaagctttattaaaagactgggcttttcagaagagattaactatgcaaggcagaactttcagctacctgaatttagtattaaagaacttcgtgatgtttcagcaatagggggcaaagaaatctatctattgtactcagatgaagaaggacttttttatatttatgaccatcaaacctcaaccatttttacaacttctgataaggaagctattaaagatcttttaacactccaaagcattcaaaaggttgtatatgatttaaaaaatatactccataaggtggactttgatgaagctaatcagataaaaaattgtaatgatgttatgttggcttcatatgttttggacagtacacgcagttcgtacgatttggaaacattgtttatttcttatctcaacactgatatagctgcaatcaaagagaatagatgggctggtgctacagttttattaagaaatctttgggatgaactttcaaaactcattgatttaaactcggcccaatacgtttatgagagcatagagatgcctcttgttcccattttatatgaaatggagaaaatcggttttaaggttgacaaaaacactttgcaggagtatacaaaagagattgagagcaagcttttaaagttggaatcacagatttatcaaatagccggtgaatggtttaacataaactcgccaaaacaactctcatatatattattcgaaaaactgaagcttccggttgttaaaaagaccaaaacaggatattcaacagatgccgaggtattagaagagctgtatgataaacatgacataataccgcttattctggattatagaatgtatacgaaaatactgacaacttactgtcagggactggttcaggcaataaatcctgcaactggaagaattcataccaactttattcagacaggtacggcaactggaagacttgcaagtgcacttcccaatctgcaaaatattcctgtaaaatatgatgagggaaagctaataagaaaggcatttgttccagatgaaggttatgtgttgatagatgctgattattctcagattgagcttagaatacttgcacatatctctgaggatgaacgactgataaatgcttttaaaaataaccttgatattcattcacagacggcggcagagatctttggtgtggatataagtcaggttacaccaattatgcgaagccaggcaaaagcagttaactttggaattgtatatggtatatctgattatggactttcacgggatataaagatttcaagaaaagaagcagccgagtttattaatcgttattttgaaaagtatcccagagtaaaagaatatttggacaatgtcgtcaagtttgcccgtgaaaacggatttgttttgacaatatttaacaggaaaaggtatatcaaggatataaagtctactaataaaaacctgagaaactatgcagagagaatagcaatgaattcacctatccagggaagtgctgcagatattatgaaaatagcaatgataagagtttataaaaagctaaaagaaaacaatttaaaatcaagaattattctgcaggtccatgacgaacttttgattgaatcaccctatgaagagaaagagatagtaaaggaaatagtaaaatcggagatggaaaatgcggttttattgaaagttcctttggtagttgaagtgaaagaaggttcaaattggtatgaaacaaagtaaaggatcc

SEQ ID NO: 1883 - DNA, 2623 bp, Artificial Sequence
  Description of Artificial Sequence: Synthetic DNA sequence of Caldicellulosiruptor TOK13B DNA Polymerase E616M
atgaaatacctgctgccgaccgctgctgctggtctgctgctcctcgctgcccagccggcgatggccatggaatttgttatttttgatgggaatagtattctgtatagagctttttttgccttgccacagcttactacctcaacaggcatacctacaaatgctatatatggttttttgaatgtgctgttaaaatacttagattctgaaaaaccggattatgtagcagtagcttttgacaaaaaaggcagagctgtccgaaaaagtgaatatgaagaatacaaggctaacagaaaaccgatgccagattctcttcaggttcagataccttacgtaagagaaatacttgctgctctgaacattcctgtactgaaatgtgaagggtatgaagctgatgacgttataggcacacttgtaaatagatttaaagcccaggatttagagattgtgataataaccggagacagagatacacttcagttacttgataaaaatgtaattgtcaaaatagtcacaacaaggtttgacaggacaactgaagatttgtatgctgtagaaaatgtaaaagaaaaatatggtgtttttgcgcatcaggttgttgactataaagcattagtaggtgatgcgtcagacaatataccaggtgttaagggaattggagataaaactgccataaagctgttagaagagtaccagactctggagaatatatatcagaatctaaataacattaaaggagcgctaaaagagaagttggaatcaggaaaagacatggcatttttatcaaaaagactggctactatcatatgcgatttaccaattgaggtgaatcttgaagaattaaaaaccaaagaatgggacaaagaaagactttatcagattttacttcaacttgagtttaaaagctttattaaaagactgggcttttcagaagagattaactatgcaaggcagaactttcagctacctgaatttagtattaaagaacttcgtgatgtttcagcaatagggggcaaagaaatctatctattgtactcagatgaagaaggacttttttatatttatgaccatcaaacctcaaccatttttacaacttctgataaggaagctattaaagatcttttaacactccaaagcattcaaaaggttgtatatgatttaaaaaatatactccataaggtggactttgatgaagctaatcagataaaaaattgtaatgatgttatgttggcttcatatgttttggacagtacacgcagttcgtacgatttggaaacattgtttatttcttatctcaacactgatatagctgcaatcaaagagaatagatgggctggtgctacagttttattaagaaatctttgggatgaactttcaaaactcattgatttaaactcggcccaatacgtttatgagagcatagagatgcctcttgttcccattttatatgaaatggagaaaatcggttttaaggttgacaaaaacactttgcaggagtatacaaaagagattgagagcaagcttttaaagttggaatcacagatttatcaaatagccggtgaatggtttaacataaactcgccaaaacaactctcatatatattattcgaaaaactgaagcttccggttgttaaaaagaccaaaacaggatattcaacagatgccgaggtattagaagagctgtatgataaacatgacataataccgcttattctggattatagaatgtatacgaaaatactgacaacttactgtcagggactggttcaggcaataaatcctgcaactggaagaattcataccaactttattcagacaggtacggcaactggaagacttgcaagtgcaatgcccaatctgcaaaatattcctgtaaaatatgatgagggaaagctaataagaaaggcatttgttccagatgaaggttatgtgttgatagatgctgattattctcagattgagcttagaatacttgcacatatctctgaggatgaacgactgataaatgcttttaaaaataaccttgatattcattcacagacggcggcagagatctttggtgtggatataagtcaggttacaccaattatgcgaagccaggcaaaagcagttaactttggaattgtatatggtatatctgattatggactttcacgggatataaagatttcaagaaaagaagcagccgagtttattaatcgttattttgaaaagtatcccagagtaaaagaatatttggacaatgtcgtcaagtttgcccgtgaaaacggatttgttttgacaatatttaacaggaaaaggtatatcaaggatataaagtctactaataaaaacctgagaaactatgcagagagaatagcaatgaattcacctatccagggaagtgctgcagatattatgaaaatagcaatgataagagtttataaaaagctaaaagaaaacaatttaaaatcaagaattattctgcaggtccatgacgaacttttgattgaatcaccctatgaagagaaagagatagtaaaggaaatagtaaaatcggagatggaaaatgcggttttattgaaagttcctttggtagttgaagtgaaagaaggttcaaattggtatgaaacaaagtaaaggatcc

SEQ ID NO: 1884 - DNA, 2623 bp, Artificial Sequence
  Description of Artificial Sequence: Synthetic DNA sequence of Caldicellulosiruptor TOK13B DNA Polymerase E616N
atgaaatacctgctgccgaccgctgctgctggtctgctgctcctcgctgcccagccggcgatggccatggaatttgttatttttgatgggaatagtattctgtatagagctttttttgccttgccacagcttactacctcaacaggcatacctacaaatgctatatatggttttttgaatgtgctgttaaaatacttagattctgaaaaaccggattatgtagcagtagcttttgacaaaaaaggcagagctgtccgaaaaagtgaatatgaagaatacaaggctaacagaaaaccgatgccagattctcttcaggttcagataccttacgtaagagaaatacttgctgctctgaacattcctgtactgaaatgtgaagggtatgaagctgatgacgttataggcacacttgtaaatagatttaaagcccaggatttagagattgtgataataaccggagacagagatacacttcagttacttgataaaaatgtaattgtcaaaatagtcacaacaaggtttgacaggacaactgaagatttgtatgctgtagaaaatgtaaaagaaaaatatggtgtttttgcgcatcaggttgttgactataaagcattagtaggtgatgcgtcagacaatataccaggtgttaagggaattggagataaaactgccataaagctgttagaagagtaccagactctggagaatatatatcagaatctaaataacattaaaggagcgctaaaagagaagttggaatcaggaaaagacatggcatttttatcaaaaagactggctactatcatatgcgatttaccaattgaggtgaatcttgaagaattaaaaaccaaagaatgggacaaagaaagactttatcagattttacttcaacttgagtttaaaagctttattaaaagactgggcttttcagaagagattaactatgcaaggcagaactttcagctacctgaatttagtattaaagaacttcgtgatgtttcagcaatagggggcaaagaaatctatctattgtactcagatgaagaaggacttttttatatttatgaccatcaaacctcaaccatttttacaacttctgataaggaagctattaaagatcttttaacactccaaagcattcaaaaggttgtatatgatttaaaaaatatactccataaggtggactttgatgaagctaatcagataaaaaattgtaatgatgttatgttggcttcatatgttttggacagtacacgcagttcgtacgatttggaaacattgtttatttcttatctcaacactgatatagctgcaatcaaagagaatagatgggctggtgctacagttttattaagaaatctttgggatgaactttcaaaactcattgatttaaactcggcccaatacgtttatgagagcatagagatgcctcttgttcccattttatatgaaatggagaaaatcggttttaaggttgacaaaaacactttgcaggagtatacaaaagagattgagagcaagcttttaaagttggaatcacagatttatcaaatagccggtgaatggtttaacataaactcgccaaaacaactctcatatatattattcgaaaaactgaagcttccggttgttaaaaagaccaaaacaggatattcaacagatgccgaggtattagaagagctgtatgataaacatgacataataccgcttattctggattatagaatgtatacgaaaatactgacaacttactgtcagggactggttcaggcaataaatcctgcaactggaagaattcataccaactttattcagacaggtacggcaactggaagacttgcaagtgcaaatcccaatctgcaaaatattcctgtaaaatatgatgagggaaagctaataagaaaggcatttgttccagatgaaggttatgtgttgatagatgctgattattctcagattgagcttagaatacttgcacatatctctgaggatgaacgactgataaatgcttttaaaaataaccttgatattcattcacagacggcggcagagatctttggtgtggatataagtcaggttacaccaattatgcgaagccaggcaaaagcagttaactttggaattgtatatggtatatctgattatggactttcacgggatataaagatttcaagaaaagaagcagccgagtttattaatcgttattttgaaaagtatcccagagtaaaagaatatttggacaatgtcgtcaagtttgcccgtgaaaacggatttgttttgacaatatttaacaggaaaaggtatatcaaggatataaagtctactaataaaaacctgagaaactatgcagagagaatagcaatgaattcacctatccagggaagtgctgcagatattatgaaaatagcaatgataagagtttataaaaagctaaaagaaaacaatttaaaatcaagaattattctgcaggtccatgacgaacttttgattgaatcaccctatgaagagaaagagatagtaaaggaaatagtaaaatcggagatggaaaatgcggttttattgaaagttcctttggtagttgaagtgaaagaaggttcaaattggtatgaaacaaagtaaaggatcc

SEQ ID NO: 1885 - DNA, 2623 bp, Artificial Sequence
  Description of Artificial Sequence: Synthetic DNA sequence of Caldicellulosiruptor TOK13B DNA Polymerase E616P
atgaaatacctgctgccgaccgctgctgctggtctgctgctcctcgctgcccagccggcgatggccatggaatttgttatttttgatgggaatagtattctgtatagagctttttttgccttgccacagcttactacctcaacaggcatacctacaaatgctatatatggttttttgaatgtgctgttaaaatacttagattctgaaaaaccggattatgtagcagtagcttttgacaaaaaaggcagagctgtccgaaaaagtgaatatgaagaatacaaggctaacagaaaaccgatgccagattctcttcaggttcagataccttacgtaagagaaatacttgctgctctgaacattcctgtactgaaatgtgaagggtatgaagctgatgacgttataggcacacttgtaaatagatttaaagcccaggatttagagattgtgataataaccggagacagagatacacttcagttacttgataaaaatgtaattgtcaaaatagtcacaacaaggtttgacaggacaactgaagatttgtatgctgtagaaaatgtaaaagaaaaatatggtgtttttgcgcatcaggttgttgactataaagcattagtaggtgatgcgtcagacaatataccaggtgttaagggaattggagataaaactgccataaagctgttagaagagtaccagactctggagaatatatatcagaatctaaataacattaaaggagcgctaaaagagaagttggaatcaggaaaagacatggcatttttatcaaaaagactggctactatcatatgcgatttaccaattgaggtgaatcttgaagaattaaaaaccaaagaatgggacaaagaaagactttatcagattttacttcaacttgagtttaaaagctttattaaaagactgggcttttcagaagagattaactatgcaaggcagaactttcagctacctgaatttagtattaaagaacttcgtgatgtttcagcaatagggggcaaagaaatctatctattgtactcagatgaagaaggacttttttatatttatgaccatcaaacctcaaccatttttacaacttctgataaggaagctattaaagatcttttaacactccaaagcattcaaaaggttgtatatgatttaaaaaatatactccataaggtggactttgatgaagctaatcagataaaaaattgtaatgatgttatgttggcttcatatgttttggacagtacacgcagttcgtacgatttggaaacattgtttatttcttatctcaacactgatatagctgcaatcaaagagaatagatgggctggtgctacagttttattaagaaatctttgggatgaactttcaaaactcattgatttaaactcggcccaatacgtttatgagagcatagagatgcctcttgttcccattttatatgaaatggagaaaatcggttttaaggttgacaaaaacactttgcaggagtatacaaaagagattgagagcaagcttttaaagttggaatcacagatttatcaaatagccggtgaatggtttaacataaactcgccaaaacaactctcatatatattattcgaaaaactgaagcttccggttgttaaaaagaccaaaacaggatattcaacagatgccgaggtattagaagagctgtatgataaacatgacataataccgcttattctggattatagaatgtatacgaaaatactgacaacttactgtcagggactggttcaggcaataaatcctgcaactggaagaattcataccaactttattcagacaggtacggcaactggaagacttgcaagtgcacctcccaatctgcaaaatattcctgtaaaatatgatgagggaaagctaataagaaaggcatttgttccagatgaaggttatgtgttgatagatgctgattattctcagattgagcttagaatacttgcacatatctctgaggatgaacgactgataaatgcttttaaaaataaccttgatattcattcacagacggcggcagagatctttggtgtggatataagtcaggttacaccaattatgcgaagccaggcaaaagcagttaactttggaattgtatatggtatatctgattatggactttcacgggatataaagatttcaagaaaagaagcagccgagtttattaatcgttattttgaaaagtatcccagagtaaaagaatatttggacaatgtcgtcaagtttgcccgtgaaaacggatttgttttgacaatatttaacaggaaaaggtatatcaaggatataaagtctactaataaaaacctgagaaactatgcagagagaatagcaatgaattcacctatccagggaagtgctgcagatattatgaaaatagcaatgataagagtttataaaaagctaaaagaaaacaatttaaaatcaagaattattctgcaggtccatgacgaacttttgattgaatcaccctatgaagagaaagagatagtaaaggaaatagtaaaatcggagatggaaaatgcggttttattgaaagttcctttggtagttgaagtgaaagaaggttcaaattggtatgaaacaaagtaaaggatcc

SEQ ID NO: 1886 - DNA, 2623 bp, Artificial Sequence
  Description of Artificial Sequence: Synthetic DNA sequence of Caldicellulosiruptor TOK13B DNA Polymerase E616Q
atgaaatacctgctgccgaccgctgctgctggtctgctgctcctcgctgcccagccggcgatggccatggaatttgttatttttgatgggaatagtattctgtatagagctttttttgccttgccacagcttactacctcaacaggcatacctacaaatgctatatatggttttttgaatgtgctgttaaaatacttagattctgaaaaaccggattatgtagcagtagcttttgacaaaaaaggcagagctgtccgaaaaagtgaatatgaagaatacaaggctaacagaaaaccgatgccagattctcttcaggttcagataccttacgtaagagaaatacttgctgctctgaacattcctgtactgaaatgtgaagggtatgaagctgatgacgttataggcacacttgtaaatagatttaaagcccaggatttagagattgtgataataaccggagacagagatacacttcagttacttgataaaaatgtaattgtcaaaatagtcacaacaaggtttgacaggacaactgaagatttgtatgctgtagaaaatgtaaaagaaaaatatggtgtttttgcgcatcaggttgttgactataaagcattagtaggtgatgcgtcagacaatataccaggtgttaagggaattggagataaaactgccataaagctgttagaagagtaccagactctggagaatatatatcagaatctaaataacattaaaggagcgctaaaagagaagttggaatcaggaaaagacatggcatttttatcaaaaagactggctactatcatatgcgatttaccaattgaggtgaatcttgaagaattaaaaaccaaagaatgggacaaagaaagactttatcagattttacttcaacttgagtttaaaagctttattaaaagactgggcttttcagaagagattaactatgcaaggcagaactttcagctacctgaatttagtattaaagaacttcgtgatgtttcagcaatagggggcaaagaaatctatctattgtactcagatgaagaaggacttttttatatttatgaccatcaaacctcaaccatttttacaacttctgataaggaagctattaaagatcttttaacactccaaagcattcaaaaggttgtatatgatttaaaaaatatactccataaggtggactttgatgaagctaatcagataaaaaattgtaatgatgttatgttggcttcatatgttttggacagtacacgcagttcgtacgatttggaaacattgtttatttcttatctcaacactgatatagctgcaatcaaagagaatagatgggctggtgctacagttttattaagaaatctttgggatgaactttcaaaactcattgatttaaactcggcccaatacgtttatgagagcatagagatgcctcttgttcccattttatatgaaatggagaaaatcggttttaaggttgacaaaaacactttgcaggagtatacaaaagagattgagagcaagcttttaaagttggaatcacagatttatcaaatagccggtgaatggtttaacataaactcgccaaaacaactctcatatatattattcgaaaaactgaagcttccggttgttaaaaagaccaaaacaggatattcaacagatgccgaggtattagaagagctgtatgataaacatgacataataccgcttattctggattatagaatgtatacgaaaatactgacaacttactgtcagggactggttcaggcaataaatcctgcaactggaagaattcataccaactttattcagacaggtacggcaactggaagacttgcaagtgcacaacccaatctgcaaaatattcctgtaaaatatgatgagggaaagctaataagaaaggcatttgttccagatgaaggttatgtgttgatagatgctgattattctcagattgagcttagaatacttgcacatatctctgaggatgaacgactgataaatgcttttaaaaataaccttgatattcattcacagacggcggcagagatctttggtgtggatataagtcaggttacaccaattatgcgaagccaggcaaaagcagttaactttggaattgtatatggtatatctgattatggactttcacgggatataaagatttcaagaaaagaagcagccgagtttattaatcgttattttgaaaagtatcccagagtaaaagaatatttggacaatgtcgtcaagtttgcccgtgaaaacggatttgttttgacaatatttaacaggaaaaggtatatcaaggatataaagtctactaataaaaacctgagaaactatgcagagagaatagcaatgaattcacctatccagggaagtgctgcagatattatgaaaatagcaatgataagagtttataaaaagctaaaagaaaacaatttaaaatcaagaattattctgcaggtccatgacgaacttttgattgaatcaccctatgaagagaaagagatagtaaaggaaatagtaaaatcggagatggaaaatgcggttttattgaaagttcctttggtagttgaagtgaaagaaggttcaaattggtatgaaacaaagtaaaggatcc

SEQ ID NO: 1887 - DNA, 2623 bp, Artificial Sequence
  Description of Artificial Sequence: Synthetic DNA sequence of Caldicellulosiruptor TOK13B DNA Polymerase E616R
atgaaatacctgctgccgaccgctgctgctggtctgctgctcctcgctgcccagccggcgatggccatggaatttgttatttttgatgggaatagtattctgtatagagctttttttgccttgccacagcttactacctcaacaggcatacctacaaatgctatatatggttttttgaatgtgctgttaaaatacttagattctgaaaaaccggattatgtagcagtagcttttgacaaaaaaggcagagctgtccgaaaaagtgaatatgaagaatacaaggctaacagaaaaccgatgccagattctcttcaggttcagataccttacgtaagagaaatacttgctgctctgaacattcctgtactgaaatgtgaagggtatgaagctgatgacgttataggcacacttgtaaatagatttaaagcccaggatttagagattgtgataataaccggagacagagatacacttcagttacttgataaaaatgtaattgtcaaaatagtcacaacaaggtttgacaggacaactgaagatttgtatgctgtagaaaatgtaaaagaaaaatatggtgtttttgcgcatcaggttgttgactataaagcattagtaggtgatgcgtcagacaatataccaggtgttaagggaattggagataaaactgccataaagctgttagaagagtaccagactctggagaatatatatcagaatctaaataacattaaaggagcgctaaaagagaagttggaatcaggaaaagacatggcatttttatcaaaaagactggctactatcatatgcgatttaccaattgaggtgaatcttgaagaattaaaaaccaaagaatgggacaaagaaagactttatcagattttacttcaacttgagtttaaaagctttattaaaagactgggcttttcagaagagattaactatgcaaggcagaactttcagctacctgaatttagtattaaagaacttcgtgatgtttcagcaatagggggcaaagaaatctatctattgtactcagatgaagaaggacttttttatatttatgaccatcaaacctcaaccatttttacaacttctgataaggaagctattaaagatcttttaacactccaaagcattcaaaaggttgtatatgatttaaaaaatatactccataaggtggactttgatgaagctaatcagataaaaaattgtaatgatgttatgttggcttcatatgttttggacagtacacgcagttcgtacgatttggaaacattgtttatttcttatctcaacactgatatagctgcaatcaaagagaatagatgggctggtgctacagttttattaagaaatctttgggatgaactttcaaaactcattgatttaaactcggcccaatacgtttatgagagcatagagatgcctcttgttcccattttatatgaaatggagaaaatcggttttaaggttgacaaaaacactttgcaggagtatacaaaagagattgagagcaagcttttaaagttggaatcacagatttatcaaatagccggtgaatggtttaacataaactcgccaaaacaactctcatatatattattcgaaaaactgaagcttccggttgttaaaaagaccaaaacaggatattcaacagatgccgaggtattagaagagctgtatgataaacatgacataataccgcttattctggattatagaatgtatacgaaaatactgacaacttactgtcagggactggttcaggcaataaatcctgcaactggaagaattcataccaactttattcagacaggtacggcaactggaagacttgcaagtgcacgtcccaatctgcaaaatattcctgtaaaatatgatgagggaaagctaataagaaaggcatttgttccagatgaaggttatgtgttgatagatgctgattattctcagattgagcttagaatacttgcacatatctctgaggatgaacgactgataaatgcttttaaaaataaccttgatattcattcacagacggcggcagagatctttggtgtggatataagtcaggttacaccaattatgcgaagccaggcaaaagcagttaactttggaattgtatatggtatatctgattatggactttcacgggatataaagatttcaagaaaagaagcagccgagtttattaatcgttattttgaaaagtatcccagagtaaaagaatatttggacaatgtcgtcaagtttgcccgtgaaaacggatttgttttgacaatatttaacaggaaaaggtatatcaaggatataaagtctactaataaaaacctgagaaactatgcagagagaatagcaatgaattcacctatccagggaagtgctgcagatattatgaaaatagcaatgataagagtttataaaaagctaaaagaaaacaatttaaaatcaagaattattctgcaggtccatgacgaacttttgattgaatcaccctatgaagagaaagagatagtaaaggaaatagtaaaatcggagatggaaaatgcggttttattgaaagttcctttggtagttgaagtgaaagaaggttcaaattggtatgaaacaaagtaaaggatcc

SEQ ID NO: 1888 - DNA, 2623 bp, Artificial Sequence
  Description of Artificial Sequence: Synthetic DNA sequence of Caldicellulosiruptor TOK13B DNA Polymerase E616S
atgaaatacctgctgccgaccgctgctgctggtctgctgctcctcgctgcccagccggcgatggccatggaatttgttatttttgatgggaatagtattctgtatagagctttttttgccttgccacagcttactacctcaacaggcatacctacaaatgctatatatggttttttgaatgtgctgttaaaatacttagattctgaaaaaccggattatgtagcagtagcttttgacaaaaaaggcagagctgtccgaaaaagtgaatatgaagaatacaaggctaacagaaaaccgatgccagattctcttcaggttcagataccttacgtaagagaaatacttgctgctctgaacattcctgtactgaaatgtgaagggtatgaagctgatgacgttataggcacacttgtaaatagatttaaagcccaggatttagagattgtgataataaccggagacagagatacacttcagttacttgataaaaatgtaattgtcaaaatagtcacaacaaggtttgacaggacaactgaagatttgtatgctgtagaaaatgtaaaagaaaaatatggtgtttttgcgcatcaggttgttgactataaagcattagtaggtgatgcgtcagacaatataccaggtgttaagggaattggagataaaactgccataaagctgttagaagagtaccagactctggagaatatatatcagaatctaaataacattaaaggagcgctaaaagagaagttggaatcaggaaaagacatggcatttttatcaaaaagactggctactatcatatgcgatttaccaattgaggtgaatcttgaagaattaaaaaccaaagaatgggacaaagaaagactttatcagattttacttcaacttgagtttaaaagctttattaaaagactgggcttttcagaagagattaactatgcaaggcagaactttcagctacctgaatttagtattaaagaacttcgtgatgtttcagcaatagggggcaaagaaatctatctattgtactcagatgaagaaggacttttttatatttatgaccatcaaacctcaaccatttttacaacttctgataaggaagctattaaagatcttttaacactccaaagcattcaaaaggttgtatatgatttaaaaaatatactccataaggtggactttgatgaagctaatcagataaaaaattgtaatgatgttatgttggcttcatatgttttggacagtacacgcagttcgtacgatttggaaacattgtttatttcttatctcaacactgatatagctgcaatcaaagagaatagatgggctggtgctacagttttattaagaaatctttgggatgaactttcaaaactcattgatttaaactcggcccaatacgtttatgagagcatagagatgcctcttgttcccattttatatgaaatggagaaaatcggttttaaggttgacaaaaacactttgcaggagtatacaaaagagattgagagcaagcttttaaagttggaatcacagatttatcaaatagccggtgaatggtttaacataaactcgccaaaacaactctcatatatattattcgaaaaactgaagcttccggttgttaaaaagaccaaaacaggatattcaacagatgccgaggtattagaagagctgtatgataaacatgacataataccgcttattctggattatagaatgtatacgaaaatactgacaacttactgtcagggactggttcaggcaataaatcctgcaactggaagaattcataccaactttattcagacaggtacggcaactggaagacttgcaagtgcatctcccaatctgcaaaatattcctgtaaaatatgatgagggaaagctaataagaaaggcatttgttccagatgaaggttatgtgttgatagatgctgattattctcagattgagcttagaatacttgcacatatctctgaggatgaacgactgataaatgcttttaaaaataaccttgatattcattcacagacggcggcagagatctttggtgtggatataagtcaggttacaccaattatgcgaagccaggcaaaagcagttaactttggaattgtatatggtatatctgattatggactttcacgggatataaagatttcaagaaaagaagcagccgagtttattaatcgttattttgaaaagtatcccagagtaaaagaatatttggacaatgtcgtcaagtttgcccgtgaaaacggatttgttttgacaatatttaacaggaaaaggtatatcaaggatataaagtctactaataaaaacctgagaaactatgcagagagaatagcaatgaattcacctatccagggaagtgctgcagatattatgaaaatagcaatgataagagtttataaaaagctaaaagaaaacaatttaaaatcaagaattattctgcaggtccatgacgaacttttgattgaatcaccctatgaagagaaagagatagtaaaggaaatagtaaaatcggagatggaaaatgcggttttattgaaagttcctttggtagttgaagtgaaagaaggttcaaattggtatgaaacaaagtaaaggatcc

SEQ ID NO: 1889 - DNA, 2623 bp, Artificial Sequence
  Description of Artificial Sequence: Synthetic DNA sequence of Caldicellulosiruptor TOK13B DNA Polymerase E616T
atgaaatacctgctgccgaccgctgctgctggtctgctgctcctcgctgcccagccggcgatggccatggaatttgttatttttgatgggaatagtattctgtatagagctttttttgccttgccacagcttactacctcaacaggcatacctacaaatgctatatatggttttttgaatgtgctgttaaaatacttagattctgaaaaaccggattatgtagcagtagcttttgacaaaaaaggcagagctgtccgaaaaagtgaatatgaagaatacaaggctaacagaaaaccgatgccagattctcttcaggttcagataccttacgtaagagaaatacttgctgctctgaacattcctgtactgaaatgtgaagggtatgaagctgatgacgttataggcacacttgtaaatagatttaaagcccaggatttagagattgtgataataaccggagacagagatacacttcagttacttgataaaaatgtaattgtcaaaatagtcacaacaaggtttgacaggacaactgaagatttgtatgctgtagaaaatgtaaaagaaaaatatggtgtttttgcgcatcaggttgttgactataaagcattagtaggtgatgcgtcagacaatataccaggtgttaagggaattggagataaaactgccataaagctgttagaagagtaccagactctggagaatatatatcagaatctaaataacattaaaggagcgctaaaagagaagttggaatcaggaaaagacatggcatttttatcaaaaagactggctactatcatatgcgatttaccaattgaggtgaatcttgaagaattaaaaaccaaagaatgggacaaagaaagactttatcagattttacttcaacttgagtttaaaagctttattaaaagactgggcttttcagaagagattaactatgcaaggcagaactttcagctacctgaatttagtattaaagaacttcgtgatgtttcagcaatagggggcaaagaaatctatctattgtactcagatgaagaaggacttttttatatttatgaccatcaaacctcaaccatttttacaacttctgataaggaagctattaaagatcttttaacactccaaagcattcaaaaggttgtatatgatttaaaaaatatactccataaggtggactttgatgaagctaatcagataaaaaattgtaatgatgttatgttggcttcatatgttttggacagtacacgcagttcgtacgatttggaaacattgtttatttcttatctcaacactgatatagctgcaatcaaagagaatagatgggctggtgctacagttttattaagaaatctttgggatgaactttcaaaactcattgatttaaactcggcccaatacgtttatgagagcatagagatgcctcttgttcccattttatatgaaatggagaaaatcggttttaaggttgacaaaaacactttgcaggagtatacaaaagagattgagagcaagcttttaaagttggaatcacagatttatcaaatagccggtgaatggtttaacataaactcgccaaaacaactctcatatatattattcgaaaaactgaagcttccggttgttaaaaagaccaaaacaggatattcaacagatgccgaggtattagaagagctgtatgataaacatgacataataccgcttattctggattatagaatgtatacgaaaatactgacaacttactgtcagggactggttcaggcaataaatcctgcaactggaagaattcataccaactttattcagacaggtacggcaactggaagacttgcaagtgcaactcccaatctgcaaaatattcctgtaaaatatgatgagggaaagctaataagaaaggcatttgttccagatgaaggttatgtgttgatagatgctgattattctcagattgagcttagaatacttgcacatatctctgaggatgaacgactgataaatgcttttaaaaataaccttgatattcattcacagacggcggcagagatctttggtgtggatataagtcaggttacaccaattatgcgaagccaggcaaaagcagttaactttggaattgtatatggtatatctgattatggactttcacgggatataaagatttcaagaaaagaagcagccgagtttattaatcgttattttgaaaagtatcccagagtaaaagaatatttggacaatgtcgtcaagtttgcccgtgaaaacggatttgttttgacaatatttaacaggaaaaggtatatcaaggatataaagtctactaataaaaacctgagaaactatgcagagagaatagcaatgaattcacctatccagggaagtgctgcagatattatgaaaatagcaatgataagagtttataaaaagctaaaagaaaacaatttaaaatcaagaattattctgcaggtccatgacgaacttttgattgaatcaccctatgaagagaaagagatagtaaaggaaatagtaaaatcggagatggaaaatgcggttttattgaaagttcctttggtagttgaagtgaaagaaggttcaaattggtatgaaacaaagtaaaggatcc

SEQ ID NO: 1890 - DNA, 2623 bp, Artificial Sequence
  Description of Artificial Sequence: Synthetic DNA sequence of Caldicellulosiruptor TOK13B DNA Polymerase E616V
atgaaatacctgctgccgaccgctgctgctggtctgctgctcctcgctgcccagccggcgatggccatggaatttgttatttttgatgggaatagtattctgtatagagctttttttgccttgccacagcttactacctcaacaggcatacctacaaatgctatatatggttttttgaatgtgctgttaaaatacttagattctgaaaaaccggattatgtagcagtagcttttgacaaaaaaggcagagctgtccgaaaaagtgaatatgaagaatacaaggctaacagaaaaccgatgccagattctcttcaggttcagataccttacgtaagagaaatacttgctgctctgaacattcctgtactgaaatgtgaagggtatgaagctgatgacgttataggcacacttgtaaatagatttaaagcccaggatttagagattgtgataataaccggagacagagatacacttcagttacttgataaaaatgtaattgtcaaaatagtcacaacaaggtttgacaggacaactgaagatttgtatgctgtagaaaatgtaaaagaaaaatatggtgtttttgcgcatcaggttgttgactataaagcattagtaggtgatgcgtcagacaatataccaggtgttaagggaattggagataaaactgccataaagctgttagaagagtaccagactctggagaatatatatcagaatctaaataacattaaaggagcgctaaaagagaagttggaatcaggaaaagacatggcatttttatcaaaaagactggctactatcatatgcgatttaccaattgaggtgaatcttgaagaattaaaaaccaaagaatgggacaaagaaagactttatcagattttacttcaacttgagtttaaaagctttattaaaagactgggcttttcagaagagattaactatgcaaggcagaactttcagctacctgaatttagtattaaagaacttcgtgatgtttcagcaatagggggcaaagaaatctatctattgtactcagatgaagaaggacttttttatatttatgaccatcaaacctcaaccatttttacaacttctgataaggaagctattaaagatcttttaacactccaaagcattcaaaaggttgtatatgatttaaaaaatatactccataaggtggactttgatgaagctaatcagataaaaaattgtaatgatgttatgttggcttcatatgttttggacagtacacgcagttcgtacgatttggaaacattgtttatttcttatctcaacactgatatagctgcaatcaaagagaatagatgggctggtgctacagttttattaagaaatctttgggatgaactttcaaaactcattgatttaaactcggcccaatacgtttatgagagcatagagatgcctcttgttcccattttatatgaaatggagaaaatcggttttaaggttgacaaaaacactttgcaggagtatacaaaagagattgagagcaagcttttaaagttggaatcacagatttatcaaatagccggtgaatggtttaacataaactcgccaaaacaactctcatatatattattcgaaaaactgaagcttccggttgttaaaaagaccaaaacaggatattcaacagatgccgaggtattagaagagctgtatgataaacatgacataataccgcttattctggattatagaatgtatacgaaaatactgacaacttactgtcagggactggttcaggcaataaatcctgcaactggaagaattcataccaactttattcagacaggtacggcaactggaagacttgcaagtgcagttcccaatctgcaaaatattcctgtaaaatatgatgagggaaagctaataagaaaggcatttgttccagatgaaggttatgtgttgatagatgctgattattctcagattgagcttagaatacttgcacatatctctgaggatgaacgactgataaatgcttttaaaaataaccttgatattcattcacagacggcggcagagatctttggtgtggatataagtcaggttacaccaattatgcgaagccaggcaaaagcagttaactttggaattgtatatggtatatctgattatggactttcacgggatataaagatttcaagaaaagaagcagccgagtttattaatcgttattttgaaaagtatcccagagtaaaagaatatttggacaatgtcgtcaagtttgcccgtgaaaacggatttgttttgacaatatttaacaggaaaaggtatatcaaggatataaagtctactaataaaaacctgagaaactatgcagagagaatagcaatgaattcacctatccagggaagtgctgcagatattatgaaaatagcaatgataagagtttataaaaagctaaaagaaaacaatttaaaatcaagaattattctgcaggtccatgacgaacttttgattgaatcaccctatgaagagaaagagatagtaaaggaaatagtaaaatcggagatggaaaatgcggttttattgaaagttcctttggtagttgaagtgaaagaaggttcaaattggtatgaaacaaagtaaaggatcc

SEQ ID NO: 1891 - DNA, 2623 bp, Artificial Sequence
  Description of Artificial Sequence: Synthetic DNA sequence of Caldicellulosiruptor TOK13B DNA Polymerase E616W
atgaaatacctgctgccgaccgctgctgctggtctgctgctcctcgctgcccagccggcgatggccatggaatttgttatttttgatgggaatagtattctgtatagagctttttttgccttgccacagcttactacctcaacaggcatacctacaaatgctatatatggttttttgaatgtgctgttaaaatacttagattctgaaaaaccggattatgtagcagtagcttttgacaaaaaaggcagagctgtccgaaaaagtgaatatgaagaatacaaggctaacagaaaaccgatgccagattctcttcaggttcagataccttacgtaagagaaatacttgctgctctgaacattcctgtactgaaatgtgaagggtatgaagctgatgacgttataggcacacttgtaaatagatttaaagcccaggatttagagattgtgataataaccggagacagagatacacttcagttacttgataaaaatgtaattgtcaaaatagtcacaacaaggtttgacaggacaactgaagatttgtatgctgtagaaaatgtaaaagaaaaatatggtgtttttgcgcatcaggttgttgactataaagcattagtaggtgatgcgtcagacaatataccaggtgttaagggaattggagataaaactgccataaagctgttagaagagtaccagactctggagaatatatatcagaatctaaataacattaaaggagcgctaaaagagaagttggaatcaggaaaagacatggcatttttatcaaaaagactggctactatcatatgcgatttaccaattgaggtgaatcttgaagaattaaaaaccaaagaatgggacaaagaaagactttatcagattttacttcaacttgagtttaaaagctttattaaaagactgggcttttcagaagagattaactatgcaaggcagaactttcagctacctgaatttagtattaaagaacttcgtgatgtttcagcaatagggggcaaagaaatctatctattgtactcagatgaagaaggacttttttatatttatgaccatcaaacctcaaccatttttacaacttctgataaggaagctattaaagatcttttaacactccaaagcattcaaaaggttgtatatgatttaaaaaatatactccataaggtggactttgatgaagctaatcagataaaaaattgtaatgatgttatgttggcttcatatgttttggacagtacacgcagttcgtacgatttggaaacattgtttatttcttatctcaacactgatatagctgcaatcaaagagaatagatgggctggtgctacagttttattaagaaatctttgggatgaactttcaaaactcattgatttaaactcggcccaatacgtttatgagagcatagagatgcctcttgttcccattttatatgaaatggagaaaatcggttttaaggttgacaaaaacactttgcaggagtatacaaaagagattgagagcaagcttttaaagttggaatcacagatttatcaaatagccggtgaatggtttaacataaactcgccaaaacaactctcatatatattattcgaaaaactgaagcttccggttgttaaaaagaccaaaacaggatattcaacagatgccgaggtattagaagagctgtatgataaacatgacataataccgcttattctggattatagaatgtatacgaaaatactgacaacttactgtcagggactggttcaggcaataaatcctgcaactggaagaattcataccaactttattcagacaggtacggcaactggaagacttgcaagtgcatggcccaatctgcaaaatattcctgtaaaatatgatgagggaaagctaataagaaaggcatttgttccagatgaaggttatgtgttgatagatgctgattattctcagattgagcttagaatacttgcacatatctctgaggatgaacgactgataaatgcttttaaaaataaccttgatattcattcacagacggcggcagagatctttggtgtggatataagtcaggttacaccaattatgcgaagccaggcaaaagcagttaactttggaattgtatatggtatatctgattatggactttcacgggatataaagatttcaagaaaagaagcagccgagtttattaatcgttattttgaaaagtatcccagagtaaaagaatatttggacaatgtcgtcaagtttgcccgtgaaaacggatttgttttgacaatatttaacaggaaaaggtatatcaaggatataaagtctactaataaaaacctgagaaactatgcagagagaatagcaatgaattcacctatccagggaagtgctgcagatattatgaaaatagcaatgataagagtttataaaaagctaaaagaaaacaatttaaaatcaagaattattctgcaggtccatgacgaacttttgattgaatcaccctatgaagagaaagagatagtaaaggaaatagtaaaatcggagatggaaaatgcggttttattgaaagttcctttggtagttgaagtgaaagaaggttcaaattggtatgaaacaaagtaaaggatcc

SEQ ID NO: 1892 - DNA, 2623 bp, Artificial Sequence
  Description of Artificial Sequence: Synthetic DNA sequence of Caldicellulosiruptor TOK13B DNA Polymerase E616Y
atgaaatacctgctgccgaccgctgctgctggtctgctgctcctcgctgcccagccggcgatggccatggaatttgttatttttgatgggaatagtattctgtatagagctttttttgccttgccacagcttactacctcaacaggcatacctacaaatgctatatatggttttttgaatgtgctgttaaaatacttagattctgaaaaaccggattatgtagcagtagcttttgacaaaaaaggcagagctgtccgaaaaagtgaatatgaagaatacaaggctaacagaaaaccgatgccagattctcttcaggttcagataccttacgtaagagaaatacttgctgctctgaacattcctgtactgaaatgtgaagggtatgaagctgatgacgttataggcacacttgtaaatagatttaaagcccaggatttagagattgtgataataaccggagacagagatacacttcagttacttgataaaaatgtaattgtcaaaatagtcacaacaaggtttgacaggacaactgaagatttgtatgctgtagaaaatgtaaaagaaaaatatggtgtttttgcgcatcaggttgttgactataaagcattagtaggtgatgcgtcagacaatataccaggtgttaagggaattggagataaaactgccataaagctgttagaagagtaccagactctggagaatatatatcagaatctaaataacattaaaggagcgctaaaagagaagttggaatcaggaaaagacatggcatttttatcaaaaagactggctactatcatatgcgatttaccaattgaggtgaatcttgaagaattaaaaaccaaagaatgggacaaagaaagactttatcagattttacttcaacttgagtttaaaagctttattaaaagactgggcttttcagaagagattaactatgcaaggcagaactttcagctacctgaatttagtattaaagaacttcgtgatgtttcagcaatagggggcaaagaaatctatctattgtactcagatgaagaaggacttttttatatttatgaccatcaaacctcaaccatttttacaacttctgataaggaagctattaaagatcttttaacactccaaagcattcaaaaggttgtatatgatttaaaaaatatactccataaggtggactttgatgaagctaatcagataaaaaattgtaatgatgttatgttggcttcatatgttttggacagtacacgcagttcgtacgatttggaaacattgtttatttcttatctcaacactgatatagctgcaatcaaagagaatagatgggctggtgctacagttttattaagaaatctttgggatgaactttcaaaactcattgatttaaactcggcccaatacgtttatgagagcatagagatgcctcttgttcccattttatatgaaatggagaaaatcggttttaaggttgacaaaaacactttgcaggagtatacaaaagagattgagagcaagcttttaaagttggaatcacagatttatcaaatagccggtgaatggtttaacataaactcgccaaaacaactctcatatatattattcgaaaaactgaagcttccggttgttaaaaagaccaaaacaggatattcaacagatgccgaggtattagaagagctgtatgataaacatgacataataccgcttattctggattatagaatgtatacgaaaatactgacaacttactgtcagggactggttcaggcaataaatcctgcaactggaagaattcataccaactttattcagacaggtacggcaactggaagacttgcaagtgcatatcccaatctgcaaaatattcctgtaaaatatgatgagggaaagctaataagaaaggcatttgttccagatgaaggttatgtgttgatagatgctgattattctcagattgagcttagaatacttgcacatatctctgaggatgaacgactgataaatgcttttaaaaataaccttgatattcattcacagacggcggcagagatctttggtgtggatataagtcaggttacaccaattatgcgaagccaggcaaaagcagttaactttggaattgtatatggtatatctgattatggactttcacgggatataaagatttcaagaaaagaagcagccgagtttattaatcgttattttgaaaagtatcccagagtaaaagaatatttggacaatgtcgtcaagtttgcccgtgaaaacggatttgttttgacaatatttaacaggaaaaggtatatcaaggatataaagtctactaataaaaacctgagaaactatgcagagagaatagcaatgaattcacctatccagggaagtgctgcagatattatgaaaatagcaatgataagagtttataaaaagctaaaagaaaacaatttaaaatcaagaattattctgcaggtccatgacgaacttttgattgaatcaccctatgaagagaaagagatagtaaaggaaatagtaaaatcggagatggaaaatgcggttttattgaaagttcctttggtagttgaagtgaaagaaggttcaaattggtatgaaacaaagtaaaggatcc

SEQ ID NO: 1893 - DNA, 2623 bp, Artificial Sequence
  Description of Artificial Sequence: Synthetic DNA sequence of Caldicellulosiruptor TOK13B DNA Polymerase Q699A
atgaaatacctgctgccgaccgctgctgctggtctgctgctcctcgctgcccagccggcgatggccatggaatttgttatttttgatgggaatagtattctgtatagagctttttttgccttgccacagcttactacctcaacaggcatacctacaaatgctatatatggttttttgaatgtgctgttaaaatacttagattctgaaaaaccggattatgtagcagtagcttttgacaaaaaaggcagagctgtccgaaaaagtgaatatgaagaatacaaggctaacagaaaaccgatgccagattctcttcaggttcagataccttacgtaagagaaatacttgctgctctgaacattcctgtactgaaatgtgaagggtatgaagctgatgacgttataggcacacttgtaaatagatttaaagcccaggatttagagattgtgataataaccggagacagagatacacttcagttacttgataaaaatgtaattgtcaaaatagtcacaacaaggtttgacaggacaactgaagatttgtatgctgtagaaaatgtaaaagaaaaatatggtgtttttgcgcatcaggttgttgactataaagcattagtaggtgatgcgtcagacaatataccaggtgttaagggaattggagataaaactgccataaagctgttagaagagtaccagactctggagaatatatatcagaatctaaataacattaaaggagcgctaaaagagaagttggaatcaggaaaagacatggcatttttatcaaaaagactggctactatcatatgcgatttaccaattgaggtgaatcttgaagaattaaaaaccaaagaatgggacaaagaaagactttatcagattttacttcaacttgagtttaaaagctttattaaaagactgggcttttcagaagagattaactatgcaaggcagaactttcagctacctgaatttagtattaaagaacttcgtgatgtttcagcaatagggggcaaagaaatctatctattgtactcagatgaagaaggacttttttatatttatgaccatcaaacctcaaccatttttacaacttctgataaggaagctattaaagatcttttaacactccaaagcattcaaaaggttgtatatgatttaaaaaatatactccataaggtggactttgatgaagctaatcagataaaaaattgtaatgatgttatgttggcttcatatgttttggacagtacacgcagttcgtacgatttggaaacattgtttatttcttatctcaacactgatatagctgcaatcaaagagaatagatgggctggtgctacagttttattaagaaatctttgggatgaactttcaaaactcattgatttaaactcggcccaatacgtttatgagagcatagagatgcctcttgttcccattttatatgaaatggagaaaatcggttttaaggttgacaaaaacactttgcaggagtatacaaaagagattgagagcaagcttttaaagttggaatcacagatttatcaaatagccggtgaatggtttaacataaactcgccaaaacaactctcatatatattattcgaaaaactgaagcttccggttgttaaaaagaccaaaacaggatattcaacagatgccgaggtattagaagagctgtatgataaacatgacataataccgcttattctggattatagaatgtatacgaaaatactgacaacttactgtcagggactggttcaggcaataaatcctgcaactggaagaattcataccaactttattcagacaggtacggcaactggaagacttgcaagtgcagagcccaatctgcaaaatattcctgtaaaatatgatgagggaaagctaataagaaaggcatttgttccagatgaaggttatgtgttgatagatgctgattattctcagattgagcttagaatacttgcacatatctctgaggatgaacgactgataaatgcttttaaaaataaccttgatattcattcacagacggcggcagagatctttggtgtggatataagtcaggttacaccaattatgcgaagcgctgcaaaagcagttaactttggaattgtatatggtatatctgattatggactttcacgggatataaagatttcaagaaaagaagcagccgagtttattaatcgttattttgaaaagtatcccagagtaaaagaatatttggacaatgtcgtcaagtttgcccgtgaaaacggatttgttttgacaatatttaacaggaaaaggtatatcaaggatataaagtctactaataaaaacctgagaaactatgcagagagaatagcaatgaattcacctatccagggaagtgctgcagatattatgaaaatagcaatgataagagtttataaaaagctaaaagaaaacaatttaaaatcaagaattattctgcaggtccatgacgaacttttgattgaatcaccctatgaagagaaagagatagtaaaggaaatagtaaaatcggagatggaaaatgcggttttattgaaagttcctttggtagttgaagtgaaagaaggttcaaattggtatgaaacaaagtaaaggatcc

SEQ ID NO: 1894 - DNA, 2623 bp, Artificial Sequence
  Description of Artificial Sequence: Synthetic DNA sequence of Caldicellulosiruptor TOK13B DNA Polymerase Q699C
atgaaatacctgctgccgaccgctgctgctggtctgctgctcctcgctgcccagccggcgatggccatggaatttgttatttttgatgggaatagtattctgtatagagctttttttgccttgccacagcttactacctcaacaggcatacctacaaatgctatatatggttttttgaatgtgctgttaaaatacttagattctgaaaaaccggattatgtagcagtagcttttgacaaaaaaggcagagctgtccgaaaaagtgaatatgaagaatacaaggctaacagaaaaccgatgccagattctcttcaggttcagataccttacgtaagagaaatacttgctgctctgaacattcctgtactgaaatgtgaagggtatgaagctgatgacgttataggcacacttgtaaatagatttaaagcccaggatttagagattgtgataataaccggagacagagatacacttcagttacttgataaaaatgtaattgtcaaaatagtcacaacaaggtttgacaggacaactgaagatttgtatgctgtagaaaatgtaaaagaaaaatatggtgtttttgcgcatcaggttgttgactataaagcattagtaggtgatgcgtcagacaatataccaggtgttaagggaattggagataaaactgccataaagctgttagaagagtaccagactctggagaatatatatcagaatctaaataacattaaaggagcgctaaaagagaagttggaatcaggaaaagacatggcatttttatcaaaaagactggctactatcatatgcgatttaccaattgaggtgaatcttgaagaattaaaaaccaaagaatgggacaaagaaagactttatcagattttacttcaacttgagtttaaaagctttattaaaagactgggcttttcagaagagattaactatgcaaggcagaactttcagctacctgaatttagtattaaagaacttcgtgatgtttcagcaatagggggcaaagaaatctatctattgtactcagatgaagaaggacttttttatatttatgaccatcaaacctcaaccatttttacaacttctgataaggaagctattaaagatcttttaacactccaaagcattcaaaaggttgtatatgatttaaaaaatatactccataaggtggactttgatgaagctaatcagataaaaaattgtaatgatgttatgttggcttcatatgttttggacagtacacgcagttcgtacgatttggaaacattgtttatttcttatctcaacactgatatagctgcaatcaaagagaatagatgggctggtgctacagttttattaagaaatctttgggatgaactttcaaaactcattgatttaaactcggcccaatacgtttatgagagcatagagatgcctcttgttcccattttatatgaaatggagaaaatcggttttaaggttgacaaaaacactttgcaggagtatacaaaagagattgagagcaagcttttaaagttggaatcacagatttatcaaatagccggtgaatggtttaacataaactcgccaaaacaactctcatatatattattcgaaaaactgaagcttccggttgttaaaaagaccaaaacaggatattcaacagatgccgaggtattagaagagctgtatgataaacatgacataataccgcttattctggattatagaatgtatacgaaaatactgacaacttactgtcagggactggttcaggcaataaatcctgcaactggaagaattcataccaactttattcagacaggtacggcaactggaagacttgcaagtgcagagcccaatctgcaaaatattcctgtaaaatatgatgagggaaagctaataagaaaggcatttgttccagatgaaggttatgtgttgatagatgctgattattctcagattgagcttagaatacttgcacatatctctgaggatgaacgactgataaatgcttttaaaaataaccttgatattcattcacagacggcggcagagatctttggtgtggatataagtcaggttacaccaattatgcgaagctgtgcaaaagcagttaactttggaattgtatatggtatatctgattatggactttcacgggatataaagatttcaagaaaagaagcagccgagtttattaatcgttattttgaaaagtatcccagagtaaaagaatatttggacaatgtcgtcaagtttgcccgtgaaaacggatttgttttgacaatatttaacaggaaaaggtatatcaaggatataaagtctactaataaaaacctgagaaactatgcagagagaatagcaatgaattcacctatccagggaagtgctgcagatattatgaaaatagcaatgataagagtttataaaaagctaaaagaaaacaatttaaaatcaagaattattctgcaggtccatgacgaacttttgattgaatcaccctatgaagagaaagagatagtaaaggaaatagtaaaatcggagatggaaaatgcggttttattgaaagttcctttggtagttgaagtgaaagaaggttcaaattggtatgaaacaaagtaaaggatcc

SEQ ID NO: 1895 - DNA, 2623 bp, Artificial Sequence
  Description of Artificial Sequence: Synthetic DNA sequence of Caldicellulosiruptor TOK13B DNA Polymerase Q699D
atgaaatacctgctgccgaccgctgctgctggtctgctgctcctcgctgcccagccggcgatggccatggaatttgttatttttgatgggaatagtattctgtatagagctttttttgccttgccacagcttactacctcaacaggcatacctacaaatgctatatatggttttttgaatgtgctgttaaaatacttagattctgaaaaaccggattatgtagcagtagcttttgacaaaaaaggcagagctgtccgaaaaagtgaatatgaagaatacaaggctaacagaaaaccgatgccagattctcttcaggttcagataccttacgtaagagaaatacttgctgctctgaacattcctgtactgaaatgtgaagggtatgaagctgatgacgttataggcacacttgtaaatagatttaaagcccaggatttagagattgtgataataaccggagacagagatacacttcagttacttgataaaaatgtaattgtcaaaatagtcacaacaaggtttgacaggacaactgaagatttgtatgctgtagaaaatgtaaaagaaaaatatggtgtttttgcgcatcaggttgttgactataaagcattagtaggtgatgcgtcagacaatataccaggtgttaagggaattggagataaaactgccataaagctgttagaagagtaccagactctggagaatatatatcagaatctaaataacattaaaggagcgctaaaagagaagttggaatcaggaaaagacatggcatttttatcaaaaagactggctactatcatatgcgatttaccaattgaggtgaatcttgaagaattaaaaaccaaagaatgggacaaagaaagactttatcagattttacttcaacttgagtttaaaagctttattaaaagactgggcttttcagaagagattaactatgcaaggcagaactttcagctacctgaatttagtattaaagaacttcgtgatgtttcagcaatagggggcaaagaaatctatctattgtactcagatgaagaaggacttttttatatttatgaccatcaaacctcaaccatttttacaacttctgataaggaagctattaaagatcttttaacactccaaagcattcaaaaggttgtatatgatttaaaaaatatactccataaggtggactttgatgaagctaatcagataaaaaattgtaatgatgttatgttggcttcatatgttttggacagtacacgcagttcgtacgatttggaaacattgtttatttcttatctcaacactgatatagctgcaatcaaagagaatagatgggctggtgctacagttttattaagaaatctttgggatgaactttcaaaactcattgatttaaactcggcccaatacgtttatgagagcatagagatgcctcttgttcccattttatatgaaatggagaaaatcggttttaaggttgacaaaaacactttgcaggagtatacaaaagagattgagagcaagcttttaaagttggaatcacagatttatcaaatagccggtgaatggtttaacataaactcgccaaaacaactctcatatatattattcgaaaaactgaagcttccggttgttaaaaagaccaaaacaggatattcaacagatgccgaggtattagaagagctgtatgataaacatgacataataccgcttattctggattatagaatgtatacgaaaatactgacaacttactgtcagggactggttcaggcaataaatcctgcaactggaagaattcataccaactttattcagacaggtacggcaactggaagacttgcaagtgcagagcccaatctgcaaaatattcctgtaaaatatgatgagggaaagctaataagaaaggcatttgttccagatgaaggttatgtgttgatagatgctgattattctcagattgagcttagaatacttgcacatatctctgaggatgaacgactgataaatgcttttaaaaataaccttgatattcattcacagacggcggcagagatctttggtgtggatataagtcaggttacaccaattatgcgaagcgatgcaaaagcagttaactttggaattgtatatggtatatctgattatggactttcacgggatataaagatttcaagaaaagaagcagccgagtttattaatcgttattttgaaaagtatcccagagtaaaagaatatttggacaatgtcgtcaagtttgcccgtgaaaacggatttgttttgacaatatttaacaggaaaaggtatatcaaggatataaagtctactaataaaaacctgagaaactatgcagagagaatagcaatgaattcacctatccagggaagtgctgcagatattatgaaaatagcaatgataagagtttataaaaagctaaaagaaaacaatttaaaatcaagaattattctgcaggtccatgacgaacttttgattgaatcaccctatgaagagaaagagatagtaaaggaaatagtaaaatcggagatggaaaatgcggttttattgaaagttcctttggtagttgaagtgaaagaaggttcaaattggtatgaaacaaagtaaaggatcc

SEQ ID NO: 1896 - DNA, 2623 bp, Artificial Sequence
  Description of Artificial Sequence: Synthetic DNA sequence of Caldicellulosiruptor TOK13B DNA Polymerase Q699F
atgaaatacctgctgccgaccgctgctgctggtctgctgctcctcgctgcccagccggcgatggccatggaatttgttatttttgatgggaatagtattctgtatagagctttttttgccttgccacagcttactacctcaacaggcatacctacaaatgctatatatggttttttgaatgtgctgttaaaatacttagattctgaaaaaccggattatgtagcagtagcttttgacaaaaaaggcagagctgtccgaaaaagtgaatatgaagaatacaaggctaacagaaaaccgatgccagattctcttcaggttcagataccttacgtaagagaaatacttgctgctctgaacattcctgtactgaaatgtgaagggtatgaagctgatgacgttataggcacacttgtaaatagatttaaagcccaggatttagagattgtgataataaccggagacagagatacacttcagttacttgataaaaatgtaattgtcaaaatagtcacaacaaggtttgacaggacaactgaagatttgtatgctgtagaaaatgtaaaagaaaaatatggtgtttttgcgcatcaggttgttgactataaagcattagtaggtgatgcgtcagacaatataccaggtgttaagggaattggagataaaactgccataaagctgttagaagagtaccagactctggagaatatatatcagaatctaaataacattaaaggagcgctaaaagagaagttggaatcaggaaaagacatggcatttttatcaaaaagactggctactatcatatgcgatttaccaattgaggtgaatcttgaagaattaaaaaccaaagaatgggacaaagaaagactttatcagattttacttcaacttgagtttaaaagctttattaaaagactgggcttttcagaagagattaactatgcaaggcagaactttcagctacctgaatttagtattaaagaacttcgtgatgtttcagcaatagggggcaaagaaatctatctattgtactcagatgaagaaggacttttttatatttatgaccatcaaacctcaaccatttttacaacttctgataaggaagctattaaagatcttttaacactccaaagcattcaaaaggttgtatatgatttaaaaaatatactccataaggtggactttgatgaagctaatcagataaaaaattgtaatgatgttatgttggcttcatatgttttggacagtacacgcagttcgtacgatttggaaacattgtttatttcttatctcaacactgatatagctgcaatcaaagagaatagatgggctggtgctacagttttattaagaaatctttgggatgaactttcaaaactcattgatttaaactcggcccaatacgtttatgagagcatagagatgcctcttgttcccattttatatgaaatggagaaaatcggttttaaggttgacaaaaacactttgcaggagtatacaaaagagattgagagcaagcttttaaagttggaatcacagatttatcaaatagccggtgaatggtttaacataaactcgccaaaacaactctcatatatattattcgaaaaactgaagcttccggttgttaaaaagaccaaaacaggatattcaacagatgccgaggtattagaagagctgtatgataaacatgacataataccgcttattctggattatagaatgtatacgaaaatactgacaacttactgtcagggactggttcaggcaataaatcctgcaactggaagaattcataccaactttattcagacaggtacggcaactggaagacttgcaagtgcagagcccaatctgcaaaatattcctgtaaaatatgatgagggaaagctaataagaaaggcatttgttccagatgaaggttatgtgttgatagatgctgattattctcagattgagcttagaatacttgcacatatctctgaggatgaacgactgataaatgcttttaaaaataaccttgatattcattcacagacggcggcagagatctttggtgtggatataagtcaggttacaccaattatgcgaagctttgcaaaagcagttaactttggaattgtatatggtatatctgattatggactttcacgggatataaagatttcaagaaaagaagcagccgagtttattaatcgttattttgaaaagtatcccagagtaaaagaatatttggacaatgtcgtcaagtttgcccgtgaaaacggatttgttttgacaatatttaacaggaaaaggtatatcaaggatataaagtctactaataaaaacctgagaaactatgcagagagaatagcaatgaattcacctatccagggaagtgctgcagatattatgaaaatagcaatgataagagtttataaaaagctaaaagaaaacaatttaaaatcaagaattattctgcaggtccatgacgaacttttgattgaatcaccctatgaagagaaagagatagtaaaggaaatagtaaaatcggagatggaaaatgcggttttattgaaagttcctttggtagttgaagtgaaagaaggttcaaattggtatgaaacaaagtaaaggatcc

SEQ ID NO: 1897 - DNA, 2623 bp, Artificial Sequence
  Description of Artificial Sequence: Synthetic DNA sequence of Caldicellulosiruptor TOK13B DNA Polymerase Q699G
atgaaatacctgctgccgaccgctgctgctggtctgctgctcctcgctgcccagccggcgatggccatggaatttgttatttttgatgggaatagtattctgtatagagctttttttgccttgccacagcttactacctcaacaggcatacctacaaatgctatatatggttttttgaatgtgctgttaaaatacttagattctgaaaaaccggattatgtagcagtagcttttgacaaaaaaggcagagctgtccgaaaaagtgaatatgaagaatacaaggctaacagaaaaccgatgccagattctcttcaggttcagataccttacgtaagagaaatacttgctgctctgaacattcctgtactgaaatgtgaagggtatgaagctgatgacgttataggcacacttgtaaatagatttaaagcccaggatttagagattgtgataataaccggagacagagatacacttcagttacttgataaaaatgtaattgtcaaaatagtcacaacaaggtttgacaggacaactgaagatttgtatgctgtagaaaatgtaaaagaaaaatatggtgtttttgcgcatcaggttgttgactataaagcattagtaggtgatgcgtcagacaatataccaggtgttaagggaattggagataaaactgccataaagctgttagaagagtaccagactctggagaatatatatcagaatctaaataacattaaaggagcgctaaaagagaagttggaatcaggaaaagacatggcatttttatcaaaaagactggctactatcatatgcgatttaccaattgaggtgaatcttgaagaattaaaaaccaaagaatgggacaaagaaagactttatcagattttacttcaacttgagtttaaaagctttattaaaagactgggcttttcagaagagattaactatgcaaggcagaactttcagctacctgaatttagtattaaagaacttcgtgatgtttcagcaatagggggcaaagaaatctatctattgtactcagatgaagaaggacttttttatatttatgaccatcaaacctcaaccatttttacaacttctgataaggaagctattaaagatcttttaacactccaaagcattcaaaaggttgtatatgatttaaaaaatatactccataaggtggactttgatgaagctaatcagataaaaaattgtaatgatgttatgttggcttcatatgttttggacagtacacgcagttcgtacgatttggaaacattgtttatttcttatctcaacactgatatagctgcaatcaaagagaatagatgggctggtgctacagttttattaagaaatctttgggatgaactttcaaaactcattgatttaaactcggcccaatacgtttatgagagcatagagatgcctcttgttcccattttatatgaaatggagaaaatcggttttaaggttgacaaaaacactttgcaggagtatacaaaagagattgagagcaagcttttaaagttggaatcacagatttatcaaatagccggtgaatggtttaacataaactcgccaaaacaactctcatatatattattcgaaaaactgaagcttccggttgttaaaaagaccaaaacaggatattcaacagatgccgaggtattagaagagctgtatgataaacatgacataataccgcttattctggattatagaatgtatacgaaaatactgacaacttactgtcagggactggttcaggcaataaatcctgcaactggaagaattcataccaactttattcagacaggtacggcaactggaagacttgcaagtgcagagcccaatctgcaaaatattcctgtaaaatatgatgagggaaagctaataagaaaggcatttgttccagatgaaggttatgtgttgatagatgctgattattctcagattgagcttagaatacttgcacatatctctgaggatgaacgactgataaatgcttttaaaaataaccttgatattcattcacagacggcggcagagatctttggtgtggatataagtcaggttacaccaattatgcgaagcggtgcaaaagcagttaactttggaattgtatatggtatatctgattatggactttcacgggatataaagatttcaagaaaagaagcagccgagtttattaatcgttattttgaaaagtatcccagagtaaaagaatatttggacaatgtcgtcaagtttgcccgtgaaaacggatttgttttgacaatatttaacaggaaaaggtatatcaaggatataaagtctactaataaaaacctgagaaactatgcagagagaatagcaatgaattcacctatccagggaagtgctgcagatattatgaaaatagcaatgataagagtttataaaaagctaaaagaaaacaatttaaaatcaagaattattctgcaggtccatgacgaacttttgattgaatcaccctatgaagagaaagagatagtaaaggaaatagtaaaatcggagatggaaaatgcggttttattgaaagttcctttggtagttgaagtgaaagaaggttcaaattggtatgaaacaaagtaaaggatcc

SEQ ID NO: 1898 - DNA, 2623 bp, Artificial Sequence
  Description of Artificial Sequence: Synthetic DNA sequence of Caldicellulosiruptor TOK13B DNA Polymerase Q699H
atgaaatacctgctgccgaccgctgctgctggtctgctgctcctcgctgcccagccggcgatggccatggaatttgttatttttgatgggaatagtattctgtatagagctttttttgccttgccacagcttactacctcaacaggcatacctacaaatgctatatatggttttttgaatgtgctgttaaaatacttagattctgaaaaaccggattatgtagcagtagcttttgacaaaaaaggcagagctgtccgaaaaagtgaatatgaagaatacaaggctaacagaaaaccgatgccagattctcttcaggttcagataccttacgtaagagaaatacttgctgctctgaacattcctgtactgaaatgtgaagggtatgaagctgatgacgttataggcacacttgtaaatagatttaaagcccaggatttagagattgtgataataaccggagacagagatacacttcagttacttgataaaaatgtaattgtcaaaatagtcacaacaaggtttgacaggacaactgaagatttgtatgctgtagaaaatgtaaaagaaaaatatggtgtttttgcgcatcaggttgttgactataaagcattagtaggtgatgcgtcagacaatataccaggtgttaagggaattggagataaaactgccataaagctgttagaagagtaccagactctggagaatatatatcagaatctaaataacattaaaggagcgctaaaagagaagttggaatcaggaaaagacatggcatttttatcaaaaagactggctactatcatatgcgatttaccaattgaggtgaatcttgaagaattaaaaaccaaagaatgggacaaagaaagactttatcagattttacttcaacttgagtttaaaagctttattaaaagactgggcttttcagaagagattaactatgcaaggcagaactttcagctacctgaatttagtattaaagaacttcgtgatgtttcagcaatagggggcaaagaaatctatctattgtactcagatgaagaaggacttttttatatttatgaccatcaaacctcaaccatttttacaacttctgataaggaagctattaaagatcttttaacactccaaagcattcaaaaggttgtatatgatttaaaaaatatactccataaggtggactttgatgaagctaatcagataaaaaattgtaatgatgttatgttggcttcatatgttttggacagtacacgcagttcgtacgatttggaaacattgtttatttcttatctcaacactgatatagctgcaatcaaagagaatagatgggctggtgctacagttttattaagaaatctttgggatgaactttcaaaactcattgatttaaactcggcccaatacgtttatgagagcatagagatgcctcttgttcccattttatatgaaatggagaaaatcggttttaaggttgacaaaaacactttgcaggagtatacaaaagagattgagagcaagcttttaaagttggaatcacagatttatcaaatagccggtgaatggtttaacataaactcgccaaaacaactctcatatatattattcgaaaaactgaagcttccggttgttaaaaagaccaaaacaggatattcaacagatgccgaggtattagaagagctgtatgataaacatgacataataccgcttattctggattatagaatgtatacgaaaatactgacaacttactgtcagggactggttcaggcaataaatcctgcaactggaagaattcataccaactttattcagacaggtacggcaactggaagacttgcaagtgcagagcccaatctgcaaaatattcctgtaaaatatgatgagggaaagctaataagaaaggcatttgttccagatgaaggttatgtgttgatagatgctgattattctcagattgagcttagaatacttgcacatatctctgaggatgaacgactgataaatgcttttaaaaataaccttgatattcattcacagacggcggcagagatctttggtgtggatataagtcaggttacaccaattatgcgaagccatgcaaaagcagttaactttggaattgtatatggtatatctgattatggactttcacgggatataaagatttcaagaaaagaagcagccgagtttattaatcgttattttgaaaagtatcccagagtaaaagaatatttggacaatgtcgtcaagtttgcccgtgaaaacggatttgttttgacaatatttaacaggaaaaggtatatcaaggatataaagtctactaataaaaacctgagaaactatgcagagagaatagcaatgaattcacctatccagggaagtgctgcagatattatgaaaatagcaatgataagagtttataaaaagctaaaagaaaacaatttaaaatcaagaattattctgcaggtccatgacgaacttttgattgaatcaccctatgaagagaaagagatagtaaaggaaatagtaaaatcggagatggaaaatgcggttttattgaaagttcctttggtagttgaagtgaaagaaggttcaaattggtatgaaacaaagtaaaggatcc

SEQ ID NO: 1899 - DNA, 2623 bp, Artificial Sequence
  Description of Artificial Sequence: Synthetic DNA sequence of Caldicellulosiruptor TOK13B DNA Polymerase Q699I
atgaaatacctgctgccgaccgctgctgctggtctgctgctcctcgctgcccagccggcgatggccatggaatttgttatttttgatgggaatagtattctgtatagagctttttttgccttgccacagcttactacctcaacaggcatacctacaaatgctatatatggttttttgaatgtgctgttaaaatacttagattctgaaaaaccggattatgtagcagtagcttttgacaaaaaaggcagagctgtccgaaaaagtgaatatgaagaatacaaggctaacagaaaaccgatgccagattctcttcaggttcagataccttacgtaagagaaatacttgctgctctgaacattcctgtactgaaatgtgaagggtatgaagctgatgacgttataggcacacttgtaaatagatttaaagcccaggatttagagattgtgataataaccggagacagagatacacttcagttacttgataaaaatgtaattgtcaaaatagtcacaacaaggtttgacaggacaactgaagatttgtatgctgtagaaaatgtaaaagaaaaatatggtgtttttgcgcatcaggttgttgactataaagcattagtaggtgatgcgtcagacaatataccaggtgttaagggaattggagataaaactgccataaagctgttagaagagtaccagactctggagaatatatatcagaatctaaataacattaaaggagcgctaaaagagaagttggaatcaggaaaagacatggcatttttatcaaaaagactggctactatcatatgcgatttaccaattgaggtgaatcttgaagaattaaaaaccaaagaatgggacaaagaaagactttatcagattttacttcaacttgagtttaaaagctttattaaaagactgggcttttcagaagagattaactatgcaaggcagaactttcagctacctgaatttagtattaaagaacttcgtgatgtttcagcaatagggggcaaagaaatctatctattgtactcagatgaagaaggacttttttatatttatgaccatcaaacctcaaccatttttacaacttctgataaggaagctattaaagatcttttaacactccaaagcattcaaaaggttgtatatgatttaaaaaatatactccataaggtggactttgatgaagctaatcagataaaaaattgtaatgatgttatgttggcttcatatgttttggacagtacacgcagttcgtacgatttggaaacattgtttatttcttatctcaacactgatatagctgcaatcaaagagaatagatgggctggtgctacagttttattaagaaatctttgggatgaactttcaaaactcattgatttaaactcggcccaatacgtttatgagagcatagagatgcctcttgttcccattttatatgaaatggagaaaatcggttttaaggttgacaaaaacactttgcaggagtatacaaaagagattgagagcaagcttttaaagttggaatcacagatttatcaaatagccggtgaatggtttaacataaactcgccaaaacaactctcatatatattattcgaaaaactgaagcttccggttgttaaaaagaccaaaacaggatattcaacagatgccgaggtattagaagagctgtatgataaacatgacataataccgcttattctggattatagaatgtatacgaaaatactgacaacttactgtcagggactggttcaggcaataaatcctgcaactggaagaattcataccaactttattcagacaggtacggcaactggaagacttgcaagtgcagagcccaatctgcaaaatattcctgtaaaatatgatgagggaaagctaataagaaaggcatttgttccagatgaaggttatgtgttgatagatgctgattattctcagattgagcttagaatacttgcacatatctctgaggatgaacgactgataaatgcttttaaaaataaccttgatattcattcacagacggcggcagagatctttggtgtggatataagtcaggttacaccaattatgcgaagcattgcaaaagcagttaactttggaattgtatatggtatatctgattatggactttcacgggatataaagatttcaagaaaagaagcagccgagtttattaatcgttattttgaaaagtatcccagagtaaaagaatatttggacaatgtcgtcaagtttgcccgtgaaaacggatttgttttgacaatatttaacaggaaaaggtatatcaaggatataaagtctactaataaaaacctgagaaactatgcagagagaatagcaatgaattcacctatccagggaagtgctgcagatattatgaaaatagcaatgataagagtttataaaaagctaaaagaaaacaatttaaaatcaagaattattctgcaggtccatgacgaacttttgattgaatcaccctatgaagagaaagagatagtaaaggaaatagtaaaatcggagatggaaaatgcggttttattgaaagttcctttggtagttgaagtgaaagaaggttcaaattggtatgaaacaaagtaaaggatcc

SEQ ID NO: 1900 - DNA, 2623 bp, Artificial Sequence
  Description of Artificial Sequence: Synthetic DNA sequence of Caldicellulosiruptor TOK13B DNA Polymerase Q699L
atgaaatacctgctgccgaccgctgctgctggtctgctgctcctcgctgcccagccggcgatggccatggaatttgttatttttgatgggaatagtattctgtatagagctttttttgccttgccacagcttactacctcaacaggcatacctacaaatgctatatatggttttttgaatgtgctgttaaaatacttagattctgaaaaaccggattatgtagcagtagcttttgacaaaaaaggcagagctgtccgaaaaagtgaatatgaagaatacaaggctaacagaaaaccgatgccagattctcttcaggttcagataccttacgtaagagaaatacttgctgctctgaacattcctgtactgaaatgtgaagggtatgaagctgatgacgttataggcacacttgtaaatagatttaaagcccaggatttagagattgtgataataaccggagacagagatacacttcagttacttgataaaaatgtaattgtcaaaatagtcacaacaaggtttgacaggacaactgaagatttgtatgctgtagaaaatgtaaaagaaaaatatggtgtttttgcgcatcaggttgttgactataaagcattagtaggtgatgcgtcagacaatataccaggtgttaagggaattggagataaaactgccataaagctgttagaagagtaccagactctggagaatatatatcagaatctaaataacattaaaggagcgctaaaagagaagttggaatcaggaaaagacatggcatttttatcaaaaagactggctactatcatatgcgatttaccaattgaggtgaatcttgaagaattaaaaaccaaagaatgggacaaagaaagactttatcagattttacttcaacttgagtttaaaagctttattaaaagactgggcttttcagaagagattaactatgcaaggcagaactttcagctacctgaatttagtattaaagaacttcgtgatgtttcagcaatagggggcaaagaaatctatctattgtactcagatgaagaaggacttttttatatttatgaccatcaaacctcaaccatttttacaacttctgataaggaagctattaaagatcttttaacactccaaagcattcaaaaggttgtatatgatttaaaaaatatactccataaggtggactttgatgaagctaatcagataaaaaattgtaatgatgttatgttggcttcatatgttttggacagtacacgcagttcgtacgatttggaaacattgtttatttcttatctcaacactgatatagctgcaatcaaagagaatagatgggctggtgctacagttttattaagaaatctttgggatgaactttcaaaactcattgatttaaactcggcccaatacgtttatgagagcatagagatgcctcttgttcccattttatatgaaatggagaaaatcggttttaaggttgacaaaaacactttgcaggagtatacaaaagagattgagagcaagcttttaaagttggaatcacagatttatcaaatagccggtgaatggtttaacataaactcgccaaaacaactctcatatatattattcgaaaaactgaagcttccggttgttaaaaagaccaaaacaggatattcaacagatgccgaggtattagaagagctgtatgataaacatgacataataccgcttattctggattatagaatgtatacgaaaatactgacaacttactgtcagggactggttcaggcaataaatcctgcaactggaagaattcataccaactttattcagacaggtacggcaactggaagacttgcaagtgcagagcccaatctgcaaaatattcctgtaaaatatgatgagggaaagctaataagaaaggcatttgttccagatgaaggttatgtgttgatagatgctgattattctcagattgagcttagaatacttgcacatatctctgaggatgaacgactgataaatgcttttaaaaataaccttgatattcattcacagacggcggcagagatctttggtgtggatataagtcaggttacaccaattatgcgaagccttgcaaaagcagttaactttggaattgtatatggtatatctgattatggactttcacgggatataaagatttcaagaaaagaagcagccgagtttattaatcgttattttgaaaagtatcccagagtaaaagaatatttggacaatgtcgtcaagtttgcccgtgaaaacggatttgttttgacaatatttaacaggaaaaggtatatcaaggatataaagtctactaataaaaacctgagaaactatgcagagagaatagcaatgaattcacctatccagggaagtgctgcagatattatgaaaatagcaatgataagagtttataaaaagctaaaagaaaacaatttaaaatcaagaattattctgcaggtccatgacgaacttttgattgaatcaccctatgaagagaaagagatagtaaaggaaatagtaaaatcggagatggaaaatgcggttttattgaaagttcctttggtagttgaagtgaaagaaggttcaaattggtatgaaacaaagtaaaggatcc

SEQ ID NO: 1901 - DNA, 2623 bp, Artificial Sequence
  Description of Artificial Sequence: Synthetic DNA sequence of Caldicellulosiruptor TOK13B DNA Polymerase Q699M
atgaaatacctgctgccgaccgctgctgctggtctgctgctcctcgctgcccagccggcgatggccatggaatttgttatttttgatgggaatagtattctgtatagagctttttttgccttgccacagcttactacctcaacaggcatacctacaaatgctatatatggttttttgaatgtgctgttaaaatacttagattctgaaaaaccggattatgtagcagtagcttttgacaaaaaaggcagagctgtccgaaaaagtgaatatgaagaatacaaggctaacagaaaaccgatgccagattctcttcaggttcagataccttacgtaagagaaatacttgctgctctgaacattcctgtactgaaatgtgaagggtatgaagctgatgacgttataggcacacttgtaaatagatttaaagcccaggatttagagattgtgataataaccggagacagagatacacttcagttacttgataaaaatgtaattgtcaaaatagtcacaacaaggtttgacaggacaactgaagatttgtatgctgtagaaaatgtaaaagaaaaatatggtgtttttgcgcatcaggttgttgactataaagcattagtaggtgatgcgtcagacaatataccaggtgttaagggaattggagataaaactgccataaagctgttagaagagtaccagactctggagaatatatatcagaatctaaataacattaaaggagcgctaaaagagaagttggaatcaggaaaagacatggcatttttatcaaaaagactggctactatcatatgcgatttaccaattgaggtgaatcttgaagaattaaaaaccaaagaatgggacaaagaaagactttatcagattttacttcaacttgagtttaaaagctttattaaaagactgggcttttcagaagagattaactatgcaaggcagaactttcagctacctgaatttagtattaaagaacttcgtgatgtttcagcaatagggggcaaagaaatctatctattgtactcagatgaagaaggacttttttatatttatgaccatcaaacctcaaccatttttacaacttctgataaggaagctattaaagatcttttaacactccaaagcattcaaaaggttgtatatgatttaaaaaatatactccataaggtggactttgatgaagctaatcagataaaaaattgtaatgatgttatgttggcttcatatgttttggacagtacacgcagttcgtacgatttggaaacattgtttatttcttatctcaacactgatatagctgcaatcaaagagaatagatgggctggtgctacagttttattaagaaatctttgggatgaactttcaaaactcattgatttaaactcggcccaatacgtttatgagagcatagagatgcctcttgttcccattttatatgaaatggagaaaatcggttttaaggttgacaaaaacactttgcaggagtatacaaaagagattgagagcaagcttttaaagttggaatcacagatttatcaaatagccggtgaatggtttaacataaactcgccaaaacaactctcatatatattattcgaaaaactgaagcttccggttgttaaaaagaccaaaacaggatattcaacagatgccgaggtattagaagagctgtatgataaacatgacataataccgcttattctggattatagaatgtatacgaaaatactgacaacttactgtcagggactggttcaggcaataaatcctgcaactggaagaattcataccaactttattcagacaggtacggcaactggaagacttgcaagtgcagagcccaatctgcaaaatattcctgtaaaatatgatgagggaaagctaataagaaaggcatttgttccagatgaaggttatgtgttgatagatgctgattattctcagattgagcttagaatacttgcacatatctctgaggatgaacgactgataaatgcttttaaaaataaccttgatattcattcacagacggcggcagagatctttggtgtggatataagtcaggttacaccaattatgcgaagcatggcaaaagcagttaactttggaattgtatatggtatatctgattatggactttcacgggatataaagatttcaagaaaagaagcagccgagtttattaatcgttattttgaaaagtatcccagagtaaaagaatatttggacaatgtcgtcaagtttgcccgtgaaaacggatttgttttgacaatatttaacaggaaaaggtatatcaaggatataaagtctactaataaaaacctgagaaactatgcagagagaatagcaatgaattcacctatccagggaagtgctgcagatattatgaaaatagcaatgataagagtttataaaaagctaaaagaaaacaatttaaaatcaagaattattctgcaggtccatgacgaacttttgattgaatcaccctatgaagagaaagagatagtaaaggaaatagtaaaatcggagatggaaaatgcggttttattgaaagttcctttggtagttgaagtgaaagaaggttcaaattggtatgaaacaaagtaaaggatcc

SEQ ID NO: 1902 - DNA, 2623 bp, Artificial Sequence
  Description of Artificial Sequence: Synthetic DNA sequence of Caldicellulosiruptor TOK13B DNA Polymerase Q699N
atgaaatacctgctgccgaccgctgctgctggtctgctgctcctcgctgcccagccggcgatggccatggaatttgttatttttgatgggaatagtattctgtatagagctttttttgccttgccacagcttactacctcaacaggcatacctacaaatgctatatatggttttttgaatgtgctgttaaaatacttagattctgaaaaaccggattatgtagcagtagcttttgacaaaaaaggcagagctgtccgaaaaagtgaatatgaagaatacaaggctaacagaaaaccgatgccagattctcttcaggttcagataccttacgtaagagaaatacttgctgctctgaacattcctgtactgaaatgtgaagggtatgaagctgatgacgttataggcacacttgtaaatagatttaaagcccaggatttagagattgtgataataaccggagacagagatacacttcagttacttgataaaaatgtaattgtcaaaatagtcacaacaaggtttgacaggacaactgaagatttgtatgctgtagaaaatgtaaaagaaaaatatggtgtttttgcgcatcaggttgttgactataaagcattagtaggtgatgcgtcagacaatataccaggtgttaagggaattggagataaaactgccataaagctgttagaagagtaccagactctggagaatatatatcagaatctaaataacattaaaggagcgctaaaagagaagttggaatcaggaaaagacatggcatttttatcaaaaagactggctactatcatatgcgatttaccaattgaggtgaatcttgaagaattaaaaaccaaagaatgggacaaagaaagactttatcagattttacttcaacttgagtttaaaagctttattaaaagactgggcttttcagaagagattaactatgcaaggcagaactttcagctacctgaatttagtattaaagaacttcgtgatgtttcagcaatagggggcaaagaaatctatctattgtactcagatgaagaaggacttttttatatttatgaccatcaaacctcaaccatttttacaacttctgataaggaagctattaaagatcttttaacactccaaagcattcaaaaggttgtatatgatttaaaaaatatactccataaggtggactttgatgaagctaatcagataaaaaattgtaatgatgttatgttggcttcatatgttttggacagtacacgcagttcgtacgatttggaaacattgtttatttcttatctcaacactgatatagctgcaatcaaagagaatagatgggctggtgctacagttttattaagaaatctttgggatgaactttcaaaactcattgatttaaactcggcccaatacgtttatgagagcatagagatgcctcttgttcccattttatatgaaatggagaaaatcggttttaaggttgacaaaaacactttgcaggagtatacaaaagagattgagagcaagcttttaaagttggaatcacagatttatcaaatagccggtgaatggtttaacataaactcgccaaaacaactctcatatatattattcgaaaaactgaagcttccggttgttaaaaagaccaaaacaggatattcaacagatgccgaggtattagaagagctgtatgataaacatgacataataccgcttattctggattatagaatgtatacgaaaatactgacaacttactgtcagggactggttcaggcaataaatcctgcaactggaagaattcataccaactttattcagacaggtacggcaactggaagacttgcaagtgcagagcccaatctgcaaaatattcctgtaaaatatgatgagggaaagctaataagaaaggcatttgttccagatgaaggttatgtgttgatagatgctgattattctcagattgagcttagaatacttgcacatatctctgaggatgaacgactgataaatgcttttaaaaataaccttgatattcattcacagacggcggcagagatctttggtgtggatataagtcaggttacaccaattatgcgaagcaatgcaaaagcagttaactttggaattgtatatggtatatctgattatggactttcacgggatataaagatttcaagaaaagaagcagccgagtttattaatcgttattttgaaaagtatcccagagtaaaagaatatttggacaatgtcgtcaagtttgcccgtgaaaacggatttgttttgacaatatttaacaggaaaaggtatatcaaggatataaagtctactaataaaaacctgagaaactatgcagagagaatagcaatgaattcacctatccagggaagtgctgcagatattatgaaaatagcaatgataagagtttataaaaagctaaaagaaaacaatttaaaatcaagaattattctgcaggtccatgacgaacttttgattgaatcaccctatgaagagaaagagatagtaaaggaaatagtaaaatcggagatggaaaatgcggttttattgaaagttcctttggtagttgaagtgaaagaaggttcaaattggtatgaaacaaagtaaaggatcc

SEQ ID NO: 1903 - DNA, 2623 bp, Artificial Sequence
  Description of Artificial Sequence: Synthetic DNA sequence of Caldicellulosiruptor TOK13B DNA Polymerase Q699P
atgaaatacctgctgccgaccgctgctgctggtctgctgctcctcgctgcccagccggcgatggccatggaatttgttatttttgatgggaatagtattctgtatagagctttttttgccttgccacagcttactacctcaacaggcatacctacaaatgctatatatggttttttgaatgtgctgttaaaatacttagattctgaaaaaccggattatgtagcagtagcttttgacaaaaaaggcagagctgtccgaaaaagtgaatatgaagaatacaaggctaacagaaaaccgatgccagattctcttcaggttcagataccttacgtaagagaaatacttgctgctctgaacattcctgtactgaaatgtgaagggtatgaagctgatgacgttataggcacacttgtaaatagatttaaagcccaggatttagagattgtgataataaccggagacagagatacacttcagttacttgataaaaatgtaattgtcaaaatagtcacaacaaggtttgacaggacaactgaagatttgtatgctgtagaaaatgtaaaagaaaaatatggtgtttttgcgcatcaggttgttgactataaagcattagtaggtgatgcgtcagacaatataccaggtgttaagggaattggagataaaactgccataaagctgttagaagagtaccagactctggagaatatatatcagaatctaaataacattaaaggagcgctaaaagagaagttggaatcaggaaaagacatggcatttttatcaaaaagactggctactatcatatgcgatttaccaattgaggtgaatcttgaagaattaaaaaccaaagaatgggacaaagaaagactttatcagattttacttcaacttgagtttaaaagctttattaaaagactgggcttttcagaagagattaactatgcaaggcagaactttcagctacctgaatttagtattaaagaacttcgtgatgtttcagcaatagggggcaaagaaatctatctattgtactcagatgaagaaggacttttttatatttatgaccatcaaacctcaaccatttttacaacttctgataaggaagctattaaagatcttttaacactccaaagcattcaaaaggttgtatatgatttaaaaaatatactccataaggtggactttgatgaagctaatcagataaaaaattgtaatgatgttatgttggcttcatatgttttggacagtacacgcagttcgtacgatttggaaacattgtttatttcttatctcaacactgatatagctgcaatcaaagagaatagatgggctggtgctacagttttattaagaaatctttgggatgaactttcaaaactcattgatttaaactcggcccaatacgtttatgagagcatagagatgcctcttgttcccattttatatgaaatggagaaaatcggttttaaggttgacaaaaacactttgcaggagtatacaaaagagattgagagcaagcttttaaagttggaatcacagatttatcaaatagccggtgaatggtttaacataaactcgccaaaacaactctcatatatattattcgaaaaactgaagcttccggttgttaaaaagaccaaaacaggatattcaacagatgccgaggtattagaagagctgtatgataaacatgacataataccgcttattctggattatagaatgtatacgaaaatactgacaacttactgtcagggactggttcaggcaataaatcctgcaactggaagaattcataccaactttattcagacaggtacggcaactggaagacttgcaagtgcagagcccaatctgcaaaatattcctgtaaaatatgatgagggaaagctaataagaaaggcatttgttccagatgaaggttatgtgttgatagatgctgattattctcagattgagcttagaatacttgcacatatctctgaggatgaacgactgataaatgcttttaaaaataaccttgatattcattcacagacggcggcagagatctttggtgtggatataagtcaggttacaccaattatgcgaagccctgcaaaagcagttaactttggaattgtatatggtatatctgattatggactttcacgggatataaagatttcaagaaaagaagcagccgagtttattaatcgttattttgaaaagtatcccagagtaaaagaatatttggacaatgtcgtcaagtttgcccgtgaaaacggatttgttttgacaatatttaacaggaaaaggtatatcaaggatataaagtctactaataaaaacctgagaaactatgcagagagaatagcaatgaattcacctatccagggaagtgctgcagatattatgaaaatagcaatgataagagtttataaaaagctaaaagaaaacaatttaaaatcaagaattattctgcaggtccatgacgaacttttgattgaatcaccctatgaagagaaagagatagtaaaggaaatagtaaaatcggagatggaaaatgcggttttattgaaagttcctttggtagttgaagtgaaagaaggttcaaattggtatgaaacaaagtaaaggatcc

SEQ ID NO: 1904 - DNA, 2623 bp, Artificial Sequence
  Description of Artificial Sequence: Synthetic DNA sequence of Caldicellulosiruptor TOK13B DNA Polymerase Q699R
atgaaatacctgctgccgaccgctgctgctggtctgctgctcctcgctgcccagccggcgatggccatggaatttgttatttttgatgggaatagtattctgtatagagctttttttgccttgccacagcttactacctcaacaggcatacctacaaatgctatatatggttttttgaatgtgctgttaaaatacttagattctgaaaaaccggattatgtagcagtagcttttgacaaaaaaggcagagctgtccgaaaaagtgaatatgaagaatacaaggctaacagaaaaccgatgccagattctcttcaggttcagataccttacgtaagagaaatacttgctgctctgaacattcctgtactgaaatgtgaagggtatgaagctgatgacgttataggcacacttgtaaatagatttaaagcccaggatttagagattgtgataataaccggagacagagatacacttcagttacttgataaaaatgtaattgtcaaaatagtcacaacaaggtttgacaggacaactgaagatttgtatgctgtagaaaatgtaaaagaaaaatatggtgtttttgcgcatcaggttgttgactataaagcattagtaggtgatgcgtcagacaatataccaggtgttaagggaattggagataaaactgccataaagctgttagaagagtaccagactctggagaatatatatcagaatctaaataacattaaaggagcgctaaaagagaagttggaatcaggaaaagacatggcatttttatcaaaaagactggctactatcatatgcgatttaccaattgaggtgaatcttgaagaattaaaaaccaaagaatgggacaaagaaagactttatcagattttacttcaacttgagtttaaaagctttattaaaagactgggcttttcagaagagattaactatgcaaggcagaactttcagctacctgaatttagtattaaagaacttcgtgatgtttcagcaatagggggcaaagaaatctatctattgtactcagatgaagaaggacttttttatatttatgaccatcaaacctcaaccatttttacaacttctgataaggaagctattaaagatcttttaacactccaaagcattcaaaaggttgtatatgatttaaaaaatatactccataaggtggactttgatgaagctaatcagataaaaaattgtaatgatgttatgttggcttcatatgttttggacagtacacgcagttcgtacgatttggaaacattgtttatttcttatctcaacactgatatagctgcaatcaaagagaatagatgggctggtgctacagttttattaagaaatctttgggatgaactttcaaaactcattgatttaaactcggcccaatacgtttatgagagcatagagatgcctcttgttcccattttatatgaaatggagaaaatcggttttaaggttgacaaaaacactttgcaggagtatacaaaagagattgagagcaagcttttaaagttggaatcacagatttatcaaatagccggtgaatggtttaacataaactcgccaaaacaactctcatatatattattcgaaaaactgaagcttccggttgttaaaaagaccaaaacaggatattcaacagatgccgaggtattagaagagctgtatgataaacatgacataataccgcttattctggattatagaatgtatacgaaaatactgacaacttactgtcagggactggttcaggcaataaatcctgcaactggaagaattcataccaactttattcagacaggtacggcaactggaagacttgcaagtgcagagcccaatctgcaaaatattcctgtaaaatatgatgagggaaagctaataagaaaggcatttgttccagatgaaggttatgtgttgatagatgctgattattctcagattgagcttagaatacttgcacatatctctgaggatgaacgactgataaatgcttttaaaaataaccttgatattcattcacagacggcggcagagatctttggtgtggatataagtcaggttacaccaattatgcgaagccgtgcaaaagcagttaactttggaattgtatatggtatatctgattatggactttcacgggatataaagatttcaagaaaagaagcagccgagtttattaatcgttattttgaaaagtatcccagagtaaaagaatatttggacaatgtcgtcaagtttgcccgtgaaaacggatttgttttgacaatatttaacaggaaaaggtatatcaaggatataaagtctactaataaaaacctgagaaactatgcagagagaatagcaatgaattcacctatccagggaagtgctgcagatattatgaaaatagcaatgataagagtttataaaaagctaaaagaaaacaatttaaaatcaagaattattctgcaggtccatgacgaacttttgattgaatcaccctatgaagagaaagagatagtaaaggaaatagtaaaatcggagatggaaaatgcggttttattgaaagttcctttggtagttgaagtgaaagaaggttcaaattggtatgaaacaaagtaaaggatcc

SEQ ID NO: 1905 - DNA, 2623 bp, Artificial Sequence
  Description of Artificial Sequence: Synthetic DNA sequence of Caldicellulosiruptor TOK13B DNA Polymerase Q699S
atgaaatacctgctgccgaccgctgctgctggtctgctgctcctcgctgcccagccggcgatggccatggaatttgttatttttgatgggaatagtattctgtatagagctttttttgccttgccacagcttactacctcaacaggcatacctacaaatgctatatatggttttttgaatgtgctgttaaaatacttagattctgaaaaaccggattatgtagcagtagcttttgacaaaaaaggcagagctgtccgaaaaagtgaatatgaagaatacaaggctaacagaaaaccgatgccagattctcttcaggttcagataccttacgtaagagaaatacttgctgctctgaacattcctgtactgaaatgtgaagggtatgaagctgatgacgttataggcacacttgtaaatagatttaaagcccaggatttagagattgtgataataaccggagacagagatacacttcagttacttgataaaaatgtaattgtcaaaatagtcacaacaaggtttgacaggacaactgaagatttgtatgctgtagaaaatgtaaaagaaaaatatggtgtttttgcgcatcaggttgttgactataaagcattagtaggtgatgcgtcagacaatataccaggtgttaagggaattggagataaaactgccataaagctgttagaagagtaccagactctggagaatatatatcagaatctaaataacattaaaggagcgctaaaagagaagttggaatcaggaaaagacatggcatttttatcaaaaagactggctactatcatatgcgatttaccaattgaggtgaatcttgaagaattaaaaaccaaagaatgggacaaagaaagactttatcagattttacttcaacttgagtttaaaagctttattaaaagactgggcttttcagaagagattaactatgcaaggcagaactttcagctacctgaatttagtattaaagaacttcgtgatgtttcagcaatagggggcaaagaaatctatctattgtactcagatgaagaaggacttttttatatttatgaccatcaaacctcaaccatttttacaacttctgataaggaagctattaaagatcttttaacactccaaagcattcaaaaggttgtatatgatttaaaaaatatactccataaggtggactttgatgaagctaatcagataaaaaattgtaatgatgttatgttggcttcatatgttttggacagtacacgcagttcgtacgatttggaaacattgtttatttcttatctcaacactgatatagctgcaatcaaagagaatagatgggctggtgctacagttttattaagaaatctttgggatgaactttcaaaactcattgatttaaactcggcccaatacgtttatgagagcatagagatgcctcttgttcccattttatatgaaatggagaaaatcggttttaaggttgacaaaaacactttgcaggagtatacaaaagagattgagagcaagcttttaaagttggaatcacagatttatcaaatagccggtgaatggtttaacataaactcgccaaaacaactctcatatatattattcgaaaaactgaagcttccggttgttaaaaagaccaaaacaggatattcaacagatgccgaggtattagaagagctgtatgataaacatgacataataccgcttattctggattatagaatgtatacgaaaatactgacaacttactgtcagggactggttcaggcaataaatcctgcaactggaagaattcataccaactttattcagacaggtacggcaactggaagacttgcaagtgcagagcccaatctgcaaaatattcctgtaaaatatgatgagggaaagctaataagaaaggcatttgttccagatgaaggttatgtgttgatagatgctgattattctcagattgagcttagaatacttgcacatatctctgaggatgaacgactgataaatgcttttaaaaataaccttgatattcattcacagacggcggcagagatctttggtgtggatataagtcaggttacaccaattatgcgaagctctgcaaaagcagttaactttggaattgtatatggtatatctgattatggactttcacgggatataaagatttcaagaaaagaagcagccgagtttattaatcgttattttgaaaagtatcccagagtaaaagaatatttggacaatgtcgtcaagtttgcccgtgaaaacggatttgttttgacaatatttaacaggaaaaggtatatcaaggatataaagtctactaataaaaacctgagaaactatgcagagagaatagcaatgaattcacctatccagggaagtgctgcagatattatgaaaatagcaatgataagagtttataaaaagctaaaagaaaacaatttaaaatcaagaattattctgcaggtccatgacgaacttttgattgaatcaccctatgaagagaaagagatagtaaaggaaatagtaaaatcggagatggaaaatgcggttttattgaaagttcctttggtagttgaagtgaaagaaggttcaaattggtatgaaacaaagtaaaggatcc

SEQ ID NO: 1906 - DNA, 2623 bp, Artificial Sequence
  Description of Artificial Sequence: Synthetic DNA sequence of Caldicellulosiruptor TOK13B DNA Polymerase Q699T
atgaaatacctgctgccgaccgctgctgctggtctgctgctcctcgctgcccagccggcgatggccatggaatttgttatttttgatgggaatagtattctgtatagagctttttttgccttgccacagcttactacctcaacaggcatacctacaaatgctatatatggttttttgaatgtgctgttaaaatacttagattctgaaaaaccggattatgtagcagtagcttttgacaaaaaaggcagagctgtccgaaaaagtgaatatgaagaatacaaggctaacagaaaaccgatgccagattctcttcaggttcagataccttacgtaagagaaatacttgctgctctgaacattcctgtactgaaatgtgaagggtatgaagctgatgacgttataggcacacttgtaaatagatttaaagcccaggatttagagattgtgataataaccggagacagagatacacttcagttacttgataaaaatgtaattgtcaaaatagtcacaacaaggtttgacaggacaactgaagatttgtatgctgtagaaaatgtaaaagaaaaatatggtgtttttgcgcatcaggttgttgactataaagcattagtaggtgatgcgtcagacaatataccaggtgttaagggaattggagataaaactgccataaagctgttagaagagtaccagactctggagaatatatatcagaatctaaataacattaaaggagcgctaaaagagaagttggaatcaggaaaagacatggcatttttatcaaaaagactggctactatcatatgcgatttaccaattgaggtgaatcttgaagaattaaaaaccaaagaatgggacaaagaaagactttatcagattttacttcaacttgagtttaaaagctttattaaaagactgggcttttcagaagagattaactatgcaaggcagaactttcagctacctgaatttagtattaaagaacttcgtgatgtttcagcaatagggggcaaagaaatctatctattgtactcagatgaagaaggacttttttatatttatgaccatcaaacctcaaccatttttacaacttctgataaggaagctattaaagatcttttaacactccaaagcattcaaaaggttgtatatgatttaaaaaatatactccataaggtggactttgatgaagctaatcagataaaaaattgtaatgatgttatgttggcttcatatgttttggacagtacacgcagttcgtacgatttggaaacattgtttatttcttatctcaacactgatatagctgcaatcaaagagaatagatgggctggtgctacagttttattaagaaatctttgggatgaactttcaaaactcattgatttaaactcggcccaatacgtttatgagagcatagagatgcctcttgttcccattttatatgaaatggagaaaatcggttttaaggttgacaaaaacactttgcaggagtatacaaaagagattgagagcaagcttttaaagttggaatcacagatttatcaaatagccggtgaatggtttaacataaactcgccaaaacaactctcatatatattattcgaaaaactgaagcttccggttgttaaaaagaccaaaacaggatattcaacagatgccgaggtattagaagagctgtatgataaacatgacataataccgcttattctggattatagaatgtatacgaaaatactgacaacttactgtcagggactggttcaggcaataaatcctgcaactggaagaattcataccaactttattcagacaggtacggcaactggaagacttgcaagtgcagagcccaatctgcaaaatattcctgtaaaatatgatgagggaaagctaataagaaaggcatttgttccagatgaaggttatgtgttgatagatgctgattattctcagattgagcttagaatacttgcacatatctctgaggatgaacgactgataaatgcttttaaaaataaccttgatattcattcacagacggcggcagagatctttggtgtggatataagtcaggttacaccaattatgcgaagcactgcaaaagcagttaactttggaattgtatatggtatatctgattatggactttcacgggatataaagatttcaagaaaagaagcagccgagtttattaatcgttattttgaaaagtatcccagagtaaaagaatatttggacaatgtcgtcaagtttgcccgtgaaaacggatttgttttgacaatatttaacaggaaaaggtatatcaaggatataaagtctactaataaaaacctgagaaactatgcagagagaatagcaatgaattcacctatccagggaagtgctgcagatattatgaaaatagcaatgataagagtttataaaaagctaaaagaaaacaatttaaaatcaagaattattctgcaggtccatgacgaacttttgattgaatcaccctatgaagagaaagagatagtaaaggaaatagtaaaatcggagatggaaaatgcggttttattgaaagttcctttggtagttgaagtgaaagaaggttcaaattggtatgaaacaaagtaaaggatcc

SEQ ID NO: 1907 - DNA, 2623 bp, Artificial Sequence
  Description of Artificial Sequence: Synthetic DNA sequence of Caldicellulosiruptor TOK13B DNA Polymerase Q699V
atgaaatacctgctgccgaccgctgctgctggtctgctgctcctcgctgcccagccggcgatggccatggaatttgttatttttgatgggaatagtattctgtatagagctttttttgccttgccacagcttactacctcaacaggcatacctacaaatgctatatatggttttttgaatgtgctgttaaaatacttagattctgaaaaaccggattatgtagcagtagcttttgacaaaaaaggcagagctgtccgaaaaagtgaatatgaagaatacaaggctaacagaaaaccgatgccagattctcttcaggttcagataccttacgtaagagaaatacttgctgctctgaacattcctgtactgaaatgtgaagggtatgaagctgatgacgttataggcacacttgtaaatagatttaaagcccaggatttagagattgtgataataaccggagacagagatacacttcagttacttgataaaaatgtaattgtcaaaatagtcacaacaaggtttgacaggacaactgaagatttgtatgctgtagaaaatgtaaaagaaaaatatggtgtttttgcgcatcaggttgttgactataaagcattagtaggtgatgcgtcagacaatataccaggtgttaagggaattggagataaaactgccataaagctgttagaagagtaccagactctggagaatatatatcagaatctaaataacattaaaggagcgctaaaagagaagttggaatcaggaaaagacatggcatttttatcaaaaagactggctactatcatatgcgatttaccaattgaggtgaatcttgaagaattaaaaaccaaagaatgggacaaagaaagactttatcagattttacttcaacttgagtttaaaagctttattaaaagactgggcttttcagaagagattaactatgcaaggcagaactttcagctacctgaatttagtattaaagaacttcgtgatgtttcagcaatagggggcaaagaaatctatctattgtactcagatgaagaaggacttttttatatttatgaccatcaaacctcaaccatttttacaacttctgataaggaagctattaaagatcttttaacactccaaagcattcaaaaggttgtatatgatttaaaaaatatactccataaggtggactttgatgaagctaatcagataaaaaattgtaatgatgttatgttggcttcatatgttttggacagtacacgcagttcgtacgatttggaaacattgtttatttcttatctcaacactgatatagctgcaatcaaagagaatagatgggctggtgctacagttttattaagaaatctttgggatgaactttcaaaactcattgatttaaactcggcccaatacgtttatgagagcatagagatgcctcttgttcccattttatatgaaatggagaaaatcggttttaaggttgacaaaaacactttgcaggagtatacaaaagagattgagagcaagcttttaaagttggaatcacagatttatcaaatagccggtgaatggtttaacataaactcgccaaaacaactctcatatatattattcgaaaaactgaagcttccggttgttaaaaagaccaaaacaggatattcaacagatgccgaggtattagaagagctgtatgataaacatgacataataccgcttattctggattatagaatgtatacgaaaatactgacaacttactgtcagggactggttcaggcaataaatcctgcaactggaagaattcataccaactttattcagacaggtacggcaactggaagacttgcaagtgcagagcccaatctgcaaaatattcctgtaaaatatgatgagggaaagctaataagaaaggcatttgttccagatgaaggttatgtgttgatagatgctgattattctcagattgagcttagaatacttgcacatatctctgaggatgaacgactgataaatgcttttaaaaataaccttgatattcattcacagacggcggcagagatctttggtgtggatataagtcaggttacaccaattatgcgaagcgttgcaaaagcagttaactttggaattgtatatggtatatctgattatggactttcacgggatataaagatttcaagaaaagaagcagccgagtttattaatcgttattttgaaaagtatcccagagtaaaagaatatttggacaatgtcgtcaagtttgcccgtgaaaacggatttgttttgacaatatttaacaggaaaaggtatatcaaggatataaagtctactaataaaaacctgagaaactatgcagagagaatagcaatgaattcacctatccagggaagtgctgcagatattatgaaaatagcaatgataagagtttataaaaagctaaaagaaaacaatttaaaatcaagaattattctgcaggtccatgacgaacttttgattgaatcaccctatgaagagaaagagatagtaaaggaaatagtaaaatcggagatggaaaatgcggttttattgaaagttcctttggtagttgaagtgaaagaaggttcaaattggtatgaaacaaagtaaaggatcc

SEQ ID NO: 1908 - DNA, 2623 bp, Artificial Sequence
  Description of Artificial Sequence: Synthetic DNA sequence of Caldicellulosiruptor TOK13B DNA Polymerase Q699W
atgaaatacctgctgccgaccgctgctgctggtctgctgctcctcgctgcccagccggcgatggccatggaatttgttatttttgatgggaatagtattctgtatagagctttttttgccttgccacagcttactacctcaacaggcatacctacaaatgctatatatggttttttgaatgtgctgttaaaatacttagattctgaaaaaccggattatgtagcagtagcttttgacaaaaaaggcagagctgtccgaaaaagtgaatatgaagaatacaaggctaacagaaaaccgatgccagattctcttcaggttcagataccttacgtaagagaaatacttgctgctctgaacattcctgtactgaaatgtgaagggtatgaagctgatgacgttataggcacacttgtaaatagatttaaagcccaggatttagagattgtgataataaccggagacagagatacacttcagttacttgataaaaatgtaattgtcaaaatagtcacaacaaggtttgacaggacaactgaagatttgtatgctgtagaaaatgtaaaagaaaaatatggtgtttttgcgcatcaggttgttgactataaagcattagtaggtgatgcgtcagacaatataccaggtgttaagggaattggagataaaactgccataaagctgttagaagagtaccagactctggagaatatatatcagaatctaaataacattaaaggagcgctaaaagagaagttggaatcaggaaaagacatggcatttttatcaaaaagactggctactatcatatgcgatttaccaattgaggtgaatcttgaagaattaaaaaccaaagaatgggacaaagaaagactttatcagattttacttcaacttgagtttaaaagctttattaaaagactgggcttttcagaagagattaactatgcaaggcagaactttcagctacctgaatttagtattaaagaacttcgtgatgtttcagcaatagggggcaaagaaatctatctattgtactcagatgaagaaggacttttttatatttatgaccatcaaacctcaaccatttttacaacttctgataaggaagctattaaagatcttttaacactccaaagcattcaaaaggttgtatatgatttaaaaaatatactccataaggtggactttgatgaagctaatcagataaaaaattgtaatgatgttatgttggcttcatatgttttggacagtacacgcagttcgtacgatttggaaacattgtttatttcttatctcaacactgatatagctgcaatcaaagagaatagatgggctggtgctacagttttattaagaaatctttgggatgaactttcaaaactcattgatttaaactcggcccaatacgtttatgagagcatagagatgcctcttgttcccattttatatgaaatggagaaaatcggttttaaggttgacaaaaacactttgcaggagtatacaaaagagattgagagcaagcttttaaagttggaatcacagatttatcaaatagccggtgaatggtttaacataaactcgccaaaacaactctcatatatattattcgaaaaactgaagcttccggttgttaaaaagaccaaaacaggatattcaacagatgccgaggtattagaagagctgtatgataaacatgacataataccgcttattctggattatagaatgtatacgaaaatactgacaacttactgtcagggactggttcaggcaataaatcctgcaactggaagaattcataccaactttattcagacaggtacggcaactggaagacttgcaagtgcagagcccaatctgcaaaatattcctgtaaaatatgatgagggaaagctaataagaaaggcatttgttccagatgaaggttatgtgttgatagatgctgattattctcagattgagcttagaatacttgcacatatctctgaggatgaacgactgataaatgcttttaaaaataaccttgatattcattcacagacggcggcagagatctttggtgtggatataagtcaggttacaccaattatgcgaagctgggcaaaagcagttaactttggaattgtatatggtatatctgattatggactttcacgggatataaagatttcaagaaaagaagcagccgagtttattaatcgttattttgaaaagtatcccagagtaaaagaatatttggacaatgtcgtcaagtttgcccgtgaaaacggatttgttttgacaatatttaacaggaaaaggtatatcaaggatataaagtctactaataaaaacctgagaaactatgcagagagaatagcaatgaattcacctatccagggaagtgctgcagatattatgaaaatagcaatgataagagtttataaaaagctaaaagaaaacaatttaaaatcaagaattattctgcaggtccatgacgaacttttgattgaatcaccctatgaagagaaagagatagtaaaggaaatagtaaaatcggagatggaaaatgcggttttattgaaagttcctttggtagttgaagtgaaagaaggttcaaattggtatgaaacaaagtaaaggatcc

SEQ ID NO: 1909 - DNA, 2623 bp, Artificial Sequence
  Description of Artificial Sequence: Synthetic DNA sequence of Caldicellulosiruptor TOK13B DNA Polymerase Q699Y
atgaaatacctgctgccgaccgctgctgctggtctgctgctcctcgctgcccagccggcgatggccatggaatttgttatttttgatgggaatagtattctgtatagagctttttttgccttgccacagcttactacctcaacaggcatacctacaaatgctatatatggttttttgaatgtgctgttaaaatacttagattctgaaaaaccggattatgtagcagtagcttttgacaaaaaaggcagagctgtccgaaaaagtgaatatgaagaatacaaggctaacagaaaaccgatgccagattctcttcaggttcagataccttacgtaagagaaatacttgctgctctgaacattcctgtactgaaatgtgaagggtatgaagctgatgacgttataggcacacttgtaaatagatttaaagcccaggatttagagattgtgataataaccggagacagagatacacttcagttacttgataaaaatgtaattgtcaaaatagtcacaacaaggtttgacaggacaactgaagatttgtatgctgtagaaaatgtaaaagaaaaatatggtgtttttgcgcatcaggttgttgactataaagcattagtaggtgatgcgtcagacaatataccaggtgttaagggaattggagataaaactgccataaagctgttagaagagtaccagactctggagaatatatatcagaatctaaataacattaaaggagcgctaaaagagaagttggaatcaggaaaagacatggcatttttatcaaaaagactggctactatcatatgcgatttaccaattgaggtgaatcttgaagaattaaaaaccaaagaatgggacaaagaaagactttatcagattttacttcaacttgagtttaaaagctttattaaaagactgggcttttcagaagagattaactatgcaaggcagaactttcagctacctgaatttagtattaaagaacttcgtgatgtttcagcaatagggggcaaagaaatctatctattgtactcagatgaagaaggacttttttatatttatgaccatcaaacctcaaccatttttacaacttctgataaggaagctattaaagatcttttaacactccaaagcattcaaaaggttgtatatgatttaaaaaatatactccataaggtggactttgatgaagctaatcagataaaaaattgtaatgatgttatgttggcttcatatgttttggacagtacacgcagttcgtacgatttggaaacattgtttatttcttatctcaacactgatatagctgcaatcaaagagaatagatgggctggtgctacagttttattaagaaatctttgggatgaactttcaaaactcattgatttaaactcggcccaatacgtttatgagagcatagagatgcctcttgttcccattttatatgaaatggagaaaatcggttttaaggttgacaaaaacactttgcaggagtatacaaaagagattgagagcaagcttttaaagttggaatcacagatttatcaaatagccggtgaatggtttaacataaactcgccaaaacaactctcatatatattattcgaaaaactgaagcttccggttgttaaaaagaccaaaacaggatattcaacagatgccgaggtattagaagagctgtatgataaacatgacataataccgcttattctggattatagaatgtatacgaaaatactgacaacttactgtcagggactggttcaggcaataaatcctgcaactggaagaattcataccaactttattcagacaggtacggcaactggaagacttgcaagtgcagagcccaatctgcaaaatattcctgtaaaatatgatgagggaaagctaataagaaaggcatttgttccagatgaaggttatgtgttgatagatgctgattattctcagattgagcttagaatacttgcacatatctctgaggatgaacgactgataaatgcttttaaaaataaccttgatattcattcacagacggcggcagagatctttggtgtggatataagtcaggttacaccaattatgcgaagctatgcaaaagcagttaactttggaattgtatatggtatatctgattatggactttcacgggatataaagatttcaagaaaagaagcagccgagtttattaatcgttattttgaaaagtatcccagagtaaaagaatatttggacaatgtcgtcaagtttgcccgtgaaaacggatttgttttgacaatatttaacaggaaaaggtatatcaaggatataaagtctactaataaaaacctgagaaactatgcagagagaatagcaatgaattcacctatccagggaagtgctgcagatattatgaaaatagcaatgataagagtttataaaaagctaaaagaaaacaatttaaaatcaagaattattctgcaggtccatgacgaacttttgattgaatcaccctatgaagagaaagagatagtaaaggaaatagtaaaatcggagatggaaaatgcggttttattgaaagttcctttggtagttgaagtgaaagaaggttcaaattggtatgaaacaaagtaaaggatcc

SEQ ID NO: 1910 - DNA, 2673 bp, Artificial Sequence
  Description of Artificial Sequence: Synthetic DNA sequence of Dictyoglomus thermophilum DNA R779A
atgaaatacctgctgccgaccgctgctgctggtctgctgctcctcgctgcccagccggcgatggccatggatatcggaattaattcggatccgaaatctctgtgggatctttttcaagaaaataccgagaaagagtccaaaaggaagattctgattattgatggctcaagcctcatatacagggtttattacgcccttccccctttaaagacaaaaaatggtgaattaactaatgctctttatggcttcataagaatacttttaaaggccgtagaagattttaatcctgatcttgtaggcgttgcctttgatagacctgaacctacttttaggcatgtgatttataaagagtataaggctaagagaccacctatgaaggatgatttgaaagcgcagataccatggataagagaatttctaaggttaaatgatatacctctattggaagagcctggctatgaagcggatgatataatagctactatagtgaataaatataaggatgatttaaaatatattctctctggagatttagatcttttgcaattagtctcggacaaaacctttctaatacatcctcaaaagggaattactgagtttactatttatgatccaaaagctgtaaaggataggtttggagtagagccctataagattcccttatacaaagtattagtaggggacgaatctgataatattccaggagtaaatggaataggtcctaaaaaggcctcaaagattcttgagaaaatttcaagtgtagatgaatttaaaagtaaaataaaagttttggatagtgatttaagggagcttattgagaaaaattggaatattattgaaagaaatttagaacttgttactttaaaaaatatagataaggatcttattcttaaacccttcgagattaaaagagatgaaaaagtaatagattttttgaagagatatgaacttaagagtattcttcaaaagttatttcctgatcttcaagaggaagaaaatatagagattaaagatgtcgaagagatcaattttaatgaggtagaaaaagaaggctactttgcctttaaatgtcttggagatagggcttttgagggtatttctctttccttcaaggagggggaaggatattttatatctccttttgatttcaataatgagataagaaagaagattgaaaatataatttcttcagagaatgttaaaaaaattggctcttatattcaaagagatttacattttttaaactgtaaaataaagggcgatgtatttgatgttagtctcgcatcttatcttttgaaccctgaaagacaaaatcactctcttgatattttgataggagagtatctaaataaaacctcttttattcctcaaaaatacgctggttatctttttccgttaaagtctattcttgaggagaggataaagaatgaagggttagaatttgtactttataacatagagattccattaatccctgtactttactccatggagaagtgggggataaaggtagataaggaatatttaaaacagctttctgatgaattctgcgagagaattaaaaaattggaagaagagatatatgaacttgcaggaaccagatttaatctcaattctccaaaacaactttctgaagttttatttgagaggttaaaacttccttctggtaagaaaggaaaaacaggatattctacgtcgtcttctgtgcttcaaaacttaataaatgctcatcctatagtgagaaaaatcctccaatatagagaactctataaattgaagagtacttatgtggatgctattcctaatctggttaatccacaaacaggtagagttcatacaaaatttaatcctacaggtacagctacaggaagaataagtagtagtgaacctaatcttcagaatattcctataaaaagtgaagaaggtagaaagataagaagagccttcgtgtcagaagatggatattttcttgtatctcttgattattctcagatagagctaaggattatggctcatctttctcaggagcctaaattaatatctgccttccaaaaaggagaggatattcatagaagaacagcatcggagatttttggagtgccagaggaagaagttgatgatcttttaaggtcaagggcaaaggccgttaattttggaattatttatggtatctcttcttttggactttctgagactgtaagtattacaccagaagaggcagagaaatttatagactcgtattttaagcactatccaagagtgaagctttttatagataagactattcatgaggcaagagaaaaactgtacgttaaaaccttatttggcagaaaagcttatattcctgagattaagagcataaataaacaggtaaggaatgcctatgaaaggatagcaataaatgcgccaattcagggaacagctgctgatattataaaacttgccatgatagaaatttacaaggagattgaaaataaaaatctcaagtcaagaatactccttcaaattcatgatgagcttattcttgaagtgccagaggaggagatggaatttactcctttaatggcaaaggaaaaaatggaaaaggtggtagaactttcggttcctcttgtagttgaaatctcggtaggtaaaaatcttgctgaattaaaatgagctataagattggtcgac

SEQ ID NO: 1911 - DNA, 2673 bp, Artificial Sequence
  Description of Artificial Sequence: Synthetic DNA sequence of Dictyoglomus thermophilum DNA R779N
atgaaatacctgctgccgaccgctgctgctggtctgctgctcctcgctgcccagccggcgatggccatggatatcggaattaattcggatccgaaatctctgtgggatctttttcaagaaaataccgagaaagagtccaaaaggaagattctgattattgatggctcaagcctcatatacagggtttattacgcccttccccctttaaagacaaaaaatggtgaattaactaatgctctttatggcttcataagaatacttttaaaggccgtagaagattttaatcctgatcttgtaggcgttgcctttgatagacctgaacctacttttaggcatgtgatttataaagagtataaggctaagagaccacctatgaaggatgatttgaaagcgcagataccatggataagagaatttctaaggttaaatgatatacctctattggaagagcctggctatgaagcggatgatataatagctactatagtgaataaatataaggatgatttaaaatatattctctctggagatttagatcttttgcaattagtctcggacaaaacctttctaatacatcctcaaaagggaattactgagtttactatttatgatccaaaagctgtaaaggataggtttggagtagagccctataagattcccttatacaaagtattagtaggggacgaatctgataatattccaggagtaaatggaataggtcctaaaaaggcctcaaagattcttgagaaaatttcaagtgtagatgaatttaaaagtaaaataaaagttttggatagtgatttaagggagcttattgagaaaaattggaatattattgaaagaaatttagaacttgttactttaaaaaatatagataaggatcttattcttaaacccttcgagattaaaagagatgaaaaagtaatagattttttgaagagatatgaacttaagagtattcttcaaaagttatttcctgatcttcaagaggaagaaaatatagagattaaagatgtcgaagagatcaattttaatgaggtagaaaaagaaggctactttgcctttaaatgtcttggagatagggcttttgagggtatttctctttccttcaaggagggggaaggatattttatatctccttttgatttcaataatgagataagaaagaagattgaaaatataatttcttcagagaatgttaaaaaaattggctcttatattcaaagagatttacattttttaaactgtaaaataaagggcgatgtatttgatgttagtctcgcatcttatcttttgaaccctgaaagacaaaatcactctcttgatattttgataggagagtatctaaataaaacctcttttattcctcaaaaatacgctggttatctttttccgttaaagtctattcttgaggagaggataaagaatgaagggttagaatttgtactttataacatagagattccattaatccctgtactttactccatggagaagtgggggataaaggtagataaggaatatttaaaacagctttctgatgaattctgcgagagaattaaaaaattggaagaagagatatatgaacttgcaggaaccagatttaatctcaattctccaaaacaactttctgaagttttatttgagaggttaaaacttccttctggtaagaaaggaaaaacaggatattctacgtcgtcttctgtgcttcaaaacttaataaatgctcatcctatagtgagaaaaatcctccaatatagagaactctataaattgaagagtacttatgtggatgctattcctaatctggttaatccacaaacaggtagagttcatacaaaatttaatcctacaggtacagctacaggaagaataagtagtagtgaacctaatcttcagaatattcctataaaaagtgaagaaggtagaaagataagaagagccttcgtgtcagaagatggatattttcttgtatctcttgattattctcagatagagctaaggattatggctcatctttctcaggagcctaaattaatatctgccttccaaaaaggagaggatattcatagaagaacagcatcggagatttttggagtgccagaggaagaagttgatgatcttttaaggtcaagggcaaaggccgttaattttggaattatttatggtatctcttcttttggactttctgagactgtaagtattacaccagaagaggcagagaaatttatagactcgtattttaagcactatccaagagtgaagctttttatagataagactattcatgaggcaagagaaaaactgtacgttaaaaccttatttggcagaaaaaattatattcctgagattaagagcataaataaacaggtaaggaatgcctatgaaaggatagcaataaatgcgccaattcagggaacagctgctgatattataaaacttgccatgatagaaatttacaaggagattgaaaataaaaatctcaagtcaagaatactccttcaaattcatgatgagcttattcttgaagtgccagaggaggagatggaatttactcctttaatggcaaaggaaaaaatggaaaaggtggtagaactttcggttcctcttgtagttgaaatctcggtaggtaaaaatcttgctgaattaaaatgagctataagattggtcgac

SEQ ID NO: 1912 - DNA, 2673 bp, Artificial Sequence
  Description of Artificial Sequence: Synthetic DNA sequence of Dictyoglomus thermophilum DNA R779D
atgaaatacctgctgccgaccgctgctgctggtctgctgctcctcgctgcccagccggcgatggccatggatatcggaattaattcggatccgaaatctctgtgggatctttttcaagaaaataccgagaaagagtccaaaaggaagattctgattattgatggctcaagcctcatatacagggtttattacgcccttccccctttaaagacaaaaaatggtgaattaactaatgctctttatggcttcataagaatacttttaaaggccgtagaagattttaatcctgatcttgtaggcgttgcctttgatagacctgaacctacttttaggcatgtgatttataaagagtataaggctaagagaccacctatgaaggatgatttgaaagcgcagataccatggataagagaatttctaaggttaaatgatatacctctattggaagagcctggctatgaagcggatgatataatagctactatagtgaataaatataaggatgatttaaaatatattctctctggagatttagatcttttgcaattagtctcggacaaaacctttctaatacatcctcaaaagggaattactgagtttactatttatgatccaaaagctgtaaaggataggtttggagtagagccctataagattcccttatacaaagtattagtaggggacgaatctgataatattccaggagtaaatggaataggtcctaaaaaggcctcaaagattcttgagaaaatttcaagtgtagatgaatttaaaagtaaaataaaagttttggatagtgatttaagggagcttattgagaaaaattggaatattattgaaagaaatttagaacttgttactttaaaaaatatagataaggatcttattcttaaacccttcgagattaaaagagatgaaaaagtaatagattttttgaagagatatgaacttaagagtattcttcaaaagttatttcctgatcttcaagaggaagaaaatatagagattaaagatgtcgaagagatcaattttaatgaggtagaaaaagaaggctactttgcctttaaatgtcttggagatagggcttttgagggtatttctctttccttcaaggagggggaaggatattttatatctccttttgatttcaataatgagataagaaagaagattgaaaatataatttcttcagagaatgttaaaaaaattggctcttatattcaaagagatttacattttttaaactgtaaaataaagggcgatgtatttgatgttagtctcgcatcttatcttttgaaccctgaaagacaaaatcactctcttgatattttgataggagagtatctaaataaaacctcttttattcctcaaaaatacgctggttatctttttccgttaaagtctattcttgaggagaggataaagaatgaagggttagaatttgtactttataacatagagattccattaatccctgtactttactccatggagaagtgggggataaaggtagataaggaatatttaaaacagctttctgatgaattctgcgagagaattaaaaaattggaagaagagatatatgaacttgcaggaaccagatttaatctcaattctccaaaacaactttctgaagttttatttgagaggttaaaacttccttctggtaagaaaggaaaaacaggatattctacgtcgtcttctgtgcttcaaaacttaataaatgctcatcctatagtgagaaaaatcctccaatatagagaactctataaattgaagagtacttatgtggatgctattcctaatctggttaatccacaaacaggtagagttcatacaaaatttaatcctacaggtacagctacaggaagaataagtagtagtgaacctaatcttcagaatattcctataaaaagtgaagaaggtagaaagataagaagagccttcgtgtcagaagatggatattttcttgtatctcttgattattctcagatagagctaaggattatggctcatctttctcaggagcctaaattaatatctgccttccaaaaaggagaggatattcatagaagaacagcatcggagatttttggagtgccagaggaagaagttgatgatcttttaaggtcaagggcaaaggccgttaattttggaattatttatggtatctcttcttttggactttctgagactgtaagtattacaccagaagaggcagagaaatttatagactcgtattttaagcactatccaagagtgaagctttttatagataagactattcatgaggcaagagaaaaactgtacgttaaaaccttatttggcagaaaagattatattcctgagattaagagcataaataaacaggtaaggaatgcctatgaaaggatagcaataaatgcgccaattcagggaacagctgctgatattataaaacttgccatgatagaaatttacaaggagattgaaaataaaaatctcaagtcaagaatactccttcaaattcatgatgagcttattcttgaagtgccagaggaggagatggaatttactcctttaatggcaaaggaaaaaatggaaaaggtggtagaactttcggttcctcttgtagttgaaatctcggtaggtaaaaatcttgctgaattaaaatgagctataagattggtcgac

SEQ ID NO: 1913 - DNA, 2673 bp, Artificial Sequence
  Description of Artificial Sequence: Synthetic DNA sequence of Dictyoglomus thermophilum DNA R779C
atgaaatacctgctgccgaccgctgctgctggtctgctgctcctcgctgcccagccggcgatggccatggatatcggaattaattcggatccgaaatctctgtgggatctttttcaagaaaataccgagaaagagtccaaaaggaagattctgattattgatggctcaagcctcatatacagggtttattacgcccttccccctttaaagacaaaaaatggtgaattaactaatgctctttatggcttcataagaatacttttaaaggccgtagaagattttaatcctgatcttgtaggcgttgcctttgatagacctgaacctacttttaggcatgtgatttataaagagtataaggctaagagaccacctatgaaggatgatttgaaagcgcagataccatggataagagaatttctaaggttaaatgatatacctctattggaagagcctggctatgaagcggatgatataatagctactatagtgaataaatataaggatgatttaaaatatattctctctggagatttagatcttttgcaattagtctcggacaaaacctttctaatacatcctcaaaagggaattactgagtttactatttatgatccaaaagctgtaaaggataggtttggagtagagccctataagattcccttatacaaagtattagtaggggacgaatctgataatattccaggagtaaatggaataggtcctaaaaaggcctcaaagattcttgagaaaatttcaagtgtagatgaatttaaaagtaaaataaaagttttggatagtgatttaagggagcttattgagaaaaattggaatattattgaaagaaatttagaacttgttactttaaaaaatatagataaggatcttattcttaaacccttcgagattaaaagagatgaaaaagtaatagattttttgaagagatatgaacttaagagtattcttcaaaagttatttcctgatcttcaagaggaagaaaatatagagattaaagatgtcgaagagatcaattttaatgaggtagaaaaagaaggctactttgcctttaaatgtcttggagatagggcttttgagggtatttctctttccttcaaggagggggaaggatattttatatctccttttgatttcaataatgagataagaaagaagattgaaaatataatttcttcagagaatgttaaaaaaattggctcttatattcaaagagatttacattttttaaactgtaaaataaagggcgatgtatttgatgttagtctcgcatcttatcttttgaaccctgaaagacaaaatcactctcttgatattttgataggagagtatctaaataaaacctcttttattcctcaaaaatacgctggttatctttttccgttaaagtctattcttgaggagaggataaagaatgaagggttagaatttgtactttataacatagagattccattaatccctgtactttactccatggagaagtgggggataaaggtagataaggaatatttaaaacagctttctgatgaattctgcgagagaattaaaaaattggaagaagagatatatgaacttgcaggaaccagatttaatctcaattctccaaaacaactttctgaagttttatttgagaggttaaaacttccttctggtaagaaaggaaaaacaggatattctacgtcgtcttctgtgcttcaaaacttaataaatgctcatcctatagtgagaaaaatcctccaatatagagaactctataaattgaagagtacttatgtggatgctattcctaatctggttaatccacaaacaggtagagttcatacaaaatttaatcctacaggtacagctacaggaagaataagtagtagtgaacctaatcttcagaatattcctataaaaagtgaagaaggtagaaagataagaagagccttcgtgtcagaagatggatattttcttgtatctcttgattattctcagatagagctaaggattatggctcatctttctcaggagcctaaattaatatctgccttccaaaaaggagaggatattcatagaagaacagcatcggagatttttggagtgccagaggaagaagttgatgatcttttaaggtcaagggcaaaggccgttaattttggaattatttatggtatctcttcttttggactttctgagactgtaagtattacaccagaagaggcagagaaatttatagactcgtattttaagcactatccaagagtgaagctttttatagataagactattcatgaggcaagagaaaaactgtacgttaaaaccttatttggcagaaaatgttatattcctgagattaagagcataaataaacaggtaaggaatgcctatgaaaggatagcaataaatgcgccaattcagggaacagctgctgatattataaaacttgccatgatagaaatttacaaggagattgaaaataaaaatctcaagtcaagaatactccttcaaattcatgatgagcttattcttgaagtgccagaggaggagatggaatttactcctttaatggcaaaggaaaaaatggaaaaggtggtagaactttcggttcctcttgtagttgaaatctcggtaggtaaaaatcttgctgaattaaaatgagctataagattggtcgac

SEQ ID NO: 1914 - DNA, 2673 bp, Artificial Sequence
  Description of Artificial Sequence: Synthetic DNA sequence of Dictyoglomus thermophilum DNA R779E
atgaaatacctgctgccgaccgctgctgctggtctgctgctcctcgctgcccagccggcgatggccatggatatcggaattaattcggatccgaaatctctgtgggatctttttcaagaaaataccgagaaagagtccaaaaggaagattctgattattgatggctcaagcctcatatacagggtttattacgcccttccccctttaaagacaaaaaatggtgaattaactaatgctctttatggcttcataagaatacttttaaaggccgtagaagattttaatcctgatcttgtaggcgttgcctttgatagacctgaacctacttttaggcatgtgatttataaagagtataaggctaagagaccacctatgaaggatgatttgaaagcgcagataccatggataagagaatttctaaggttaaatgatatacctctattggaagagcctggctatgaagcggatgatataatagctactatagtgaataaatataaggatgatttaaaatatattctctctggagatttagatcttttgcaattagtctcggacaaaacctttctaatacatcctcaaaagggaattactgagtttactatttatgatccaaaagctgtaaaggataggtttggagtagagccctataagattcccttatacaaagtattagtaggggacgaatctgataatattccaggagtaaatggaataggtcctaaaaaggcctcaaagattcttgagaaaatttcaagtgtagatgaatttaaaagtaaaataaaagttttggatagtgatttaagggagcttattgagaaaaattggaatattattgaaagaaatttagaacttgttactttaaaaaatatagataaggatcttattcttaaacccttcgagattaaaagagatgaaaaagtaatagattttttgaagagatatgaacttaagagtattcttcaaaagttatttcctgatcttcaagaggaagaaaatatagagattaaagatgtcgaagagatcaattttaatgaggtagaaaaagaaggctactttgcctttaaatgtcttggagatagggcttttgagggtatttctctttccttcaaggagggggaaggatattttatatctccttttgatttcaataatgagataagaaagaagattgaaaatataatttcttcagagaatgttaaaaaaattggctcttatattcaaagagatttacattttttaaactgtaaaataaagggcgatgtatttgatgttagtctcgcatcttatcttttgaaccctgaaagacaaaatcactctcttgatattttgataggagagtatctaaataaaacctcttttattcctcaaaaatacgctggttatctttttccgttaaagtctattcttgaggagaggataaagaatgaagggttagaatttgtactttataacatagagattccattaatccctgtactttactccatggagaagtgggggataaaggtagataaggaatatttaaaacagctttctgatgaattctgcgagagaattaaaaaattggaagaagagatatatgaacttgcaggaaccagatttaatctcaattctccaaaacaactttctgaagttttatttgagaggttaaaacttccttctggtaagaaaggaaaaacaggatattctacgtcgtcttctgtgcttcaaaacttaataaatgctcatcctatagtgagaaaaatcctccaatatagagaactctataaattgaagagtacttatgtggatgctattcctaatctggttaatccacaaacaggtagagttcatacaaaatttaatcctacaggtacagctacaggaagaataagtagtagtgaacctaatcttcagaatattcctataaaaagtgaagaaggtagaaagataagaagagccttcgtgtcagaagatggatattttcttgtatctcttgattattctcagatagagctaaggattatggctcatctttctcaggagcctaaattaatatctgccttccaaaaaggagaggatattcatagaagaacagcatcggagatttttggagtgccagaggaagaagttgatgatcttttaaggtcaagggcaaaggccgttaattttggaattatttatggtatctcttcttttggactttctgagactgtaagtattacaccagaagaggcagagaaatttatagactcgtattttaagcactatccaagagtgaagctttttatagataagactattcatgaggcaagagaaaaactgtacgttaaaaccttatttggcagaaaagaatatattcctgagattaagagcataaataaacaggtaaggaatgcctatgaaaggatagcaataaatgcgccaattcagggaacagctgctgatattataaaacttgccatgatagaaatttacaaggagattgaaaataaaaatctcaagtcaagaatactccttcaaattcatgatgagcttattcttgaagtgccagaggaggagatggaatttactcctttaatggcaaaggaaaaaatggaaaaggtggtagaactttcggttcctcttgtagttgaaatctcggtaggtaaaaatcttgctgaattaaaatgagctataagattggtcgac

SEQ ID NO: 1915 - DNA, 2673 bp, Artificial Sequence
  Description of Artificial Sequence: Synthetic DNA sequence of Dictyoglomus thermophilum DNA R779Q
atgaaatacctgctgccgaccgctgctgctggtctgctgctcctcgctgcccagccggcgatggccatggatatcggaattaattcggatccgaaatctctgtgggatctttttcaagaaaataccgagaaagagtccaaaaggaagattctgattattgatggctcaagcctcatatacagggtttattacgcccttccccctttaaagacaaaaaatggtgaattaactaatgctctttatggcttcataagaatacttttaaaggccgtagaagattttaatcctgatcttgtaggcgttgcctttgatagacctgaacctacttttaggcatgtgatttataaagagtataaggctaagagaccacctatgaaggatgatttgaaagcgcagataccatggataagagaatttctaaggttaaatgatatacctctattggaagagcctggctatgaagcggatgatataatagctactatagtgaataaatataaggatgatttaaaatatattctctctggagatttagatcttttgcaattagtctcggacaaaacctttctaatacatcctcaaaagggaattactgagtttactatttatgatccaaaagctgtaaaggataggtttggagtagagccctataagattcccttatacaaagtattagtaggggacgaatctgataatattccaggagtaaatggaataggtcctaaaaaggcctcaaagattcttgagaaaatttcaagtgtagatgaatttaaaagtaaaataaaagttttggatagtgatttaagggagcttattgagaaaaattggaatattattgaaagaaatttagaacttgttactttaaaaaatatagataaggatcttattcttaaacccttcgagattaaaagagatgaaaaagtaatagattttttgaagagatatgaacttaagagtattcttcaaaagttatttcctgatcttcaagaggaagaaaatatagagattaaagatgtcgaagagatcaattttaatgaggtagaaaaagaaggctactttgcctttaaatgtcttggagatagggcttttgagggtatttctctttccttcaaggagggggaaggatattttatatctccttttgatttcaataatgagataagaaagaagattgaaaatataatttcttcagagaatgttaaaaaaattggctcttatattcaaagagatttacattttttaaactgtaaaataaagggcgatgtatttgatgttagtctcgcatcttatcttttgaaccctgaaagacaaaatcactctcttgatattttgataggagagtatctaaataaaacctcttttattcctcaaaaatacgctggttatctttttccgttaaagtctattcttgaggagaggataaagaatgaagggttagaatttgtactttataacatagagattccattaatccctgtactttactccatggagaagtgggggataaaggtagataaggaatatttaaaacagctttctgatgaattctgcgagagaattaaaaaattggaagaagagatatatgaacttgcaggaaccagatttaatctcaattctccaaaacaactttctgaagttttatttgagaggttaaaacttccttctggtaagaaaggaaaaacaggatattctacgtcgtcttctgtgcttcaaaacttaataaatgctcatcctatagtgagaaaaatcctccaatatagagaactctataaattgaagagtacttatgtggatgctattcctaatctggttaatccacaaacaggtagagttcatacaaaatttaatcctacaggtacagctacaggaagaataagtagtagtgaacctaatcttcagaatattcctataaaaagtgaagaaggtagaaagataagaagagccttcgtgtcagaagatggatattttcttgtatctcttgattattctcagatagagctaaggattatggctcatctttctcaggagcctaaattaatatctgccttccaaaaaggagaggatattcatagaagaacagcatcggagatttttggagtgccagaggaagaagttgatgatcttttaaggtcaagggcaaaggccgttaattttggaattatttatggtatctcttcttttggactttctgagactgtaagtattacaccagaagaggcagagaaatttatagactcgtattttaagcactatccaagagtgaagctttttatagataagactattcatgaggcaagagaaaaactgtacgttaaaaccttatttggcagaaaacaatatattcctgagattaagagcataaataaacaggtaaggaatgcctatgaaaggatagcaataaatgcgccaattcagggaacagctgctgatattataaaacttgccatgatagaaatttacaaggagattgaaaataaaaatctcaagtcaagaatactccttcaaattcatgatgagcttattcttgaagtgccagaggaggagatggaatttactcctttaatggcaaaggaaaaaatggaaaaggtggtagaactttcggttcctcttgtagttgaaatctcggtaggtaaaaatcttgctgaattaaaatgagctataagattggtcgac

SEQ ID NO: 1916 - DNA, 2673 bp, Artificial Sequence
  Description of Artificial Sequence: Synthetic DNA sequence of Dictyoglomus thermophilum DNA R779G
atgaaatacctgctgccgaccgctgctgctggtctgctgctcctcgctgcccagccggcgatggccatggatatcggaattaattcggatccgaaatctctgtgggatctttttcaagaaaataccgagaaagagtccaaaaggaagattctgattattgatggctcaagcctcatatacagggtttattacgcccttccccctttaaagacaaaaaatggtgaattaactaatgctctttatggcttcataagaatacttttaaaggccgtagaagattttaatcctgatcttgtaggcgttgcctttgatagacctgaacctacttttaggcatgtgatttataaagagtataaggctaagagaccacctatgaaggatgatttgaaagcgcagataccatggataagagaatttctaaggttaaatgatatacctctattggaagagcctggctatgaagcggatgatataatagctactatagtgaataaatataaggatgatttaaaatatattctctctggagatttagatcttttgcaattagtctcggacaaaacctttctaatacatcctcaaaagggaattactgagtttactatttatgatccaaaagctgtaaaggataggtttggagtagagccctataagattcccttatacaaagtattagtaggggacgaatctgataatattccaggagtaaatggaataggtcctaaaaaggcctcaaagattcttgagaaaatttcaagtgtagatgaatttaaaagtaaaataaaagttttggatagtgatttaagggagcttattgagaaaaattggaatattattgaaagaaatttagaacttgttactttaaaaaatatagataaggatcttattcttaaacccttcgagattaaaagagatgaaaaagtaatagattttttgaagagatatgaacttaagagtattcttcaaaagttatttcctgatcttcaagaggaagaaaatatagagattaaagatgtcgaagagatcaattttaatgaggtagaaaaagaaggctactttgcctttaaatgtcttggagatagggcttttgagggtatttctctttccttcaaggagggggaaggatattttatatctccttttgatttcaataatgagataagaaagaagattgaaaatataatttcttcagagaatgttaaaaaaattggctcttatattcaaagagatttacattttttaaactgtaaaataaagggcgatgtatttgatgttagtctcgcatcttatcttttgaaccctgaaagacaaaatcactctcttgatattttgataggagagtatctaaataaaacctcttttattcctcaaaaatacgctggttatctttttccgttaaagtctattcttgaggagaggataaagaatgaagggttagaatttgtactttataacatagagattccattaatccctgtactttactccatggagaagtgggggataaaggtagataaggaatatttaaaacagctttctgatgaattctgcgagagaattaaaaaattggaagaagagatatatgaacttgcaggaaccagatttaatctcaattctccaaaacaactttctgaagttttatttgagaggttaaaacttccttctggtaagaaaggaaaaacaggatattctacgtcgtcttctgtgcttcaaaacttaataaatgctcatcctatagtgagaaaaatcctccaatatagagaactctataaattgaagagtacttatgtggatgctattcctaatctggttaatccacaaacaggtagagttcatacaaaatttaatcctacaggtacagctacaggaagaataagtagtagtgaacctaatcttcagaatattcctataaaaagtgaagaaggtagaaagataagaagagccttcgtgtcagaagatggatattttcttgtatctcttgattattctcagatagagctaaggattatggctcatctttctcaggagcctaaattaatatctgccttccaaaaaggagaggatattcatagaagaacagcatcggagatttttggagtgccagaggaagaagttgatgatcttttaaggtcaagggcaaaggccgttaattttggaattatttatggtatctcttcttttggactttctgagactgtaagtattacaccagaagaggcagagaaatttatagactcgtattttaagcactatccaagagtgaagctttttatagataagactattcatgaggcaagagaaaaactgtacgttaaaaccttatttggcagaaaaggttatattcctgagattaagagcataaataaacaggtaaggaatgcctatgaaaggatagcaataaatgcgccaattcagggaacagctgctgatattataaaacttgccatgatagaaatttacaaggagattgaaaataaaaatctcaagtcaagaatactccttcaaattcatgatgagcttattcttgaagtgccagaggaggagatggaatttactcctttaatggcaaaggaaaaaatggaaaaggtggtagaactttcggttcctcttgtagttgaaatctcggtaggtaaaaatcttgctgaattaaaatgagctataagattggtcgac

SEQ ID NO: 1917 - DNA, 2673 bp, Artificial Sequence
  Description of Artificial Sequence: Synthetic DNA sequence of Dictyoglomus thermophilum DNA R779H
atgaaatacctgctgccgaccgctgctgctggtctgctgctcctcgctgcccagccggcgatggccatggatatcggaattaattcggatccgaaatctctgtgggatctttttcaagaaaataccgagaaagagtccaaaaggaagattctgattattgatggctcaagcctcatatacagggtttattacgcccttccccctttaaagacaaaaaatggtgaattaactaatgctctttatggcttcataagaatacttttaaaggccgtagaagattttaatcctgatcttgtaggcgttgcctttgatagacctgaacctacttttaggcatgtgatttataaagagtataaggctaagagaccacctatgaaggatgatttgaaagcgcagataccatggataagagaatttctaaggttaaatgatatacctctattggaagagcctggctatgaagcggatgatataatagctactatagtgaataaatataaggatgatttaaaatatattctctctggagatttagatcttttgcaattagtctcggacaaaacctttctaatacatcctcaaaagggaattactgagtttactatttatgatccaaaagctgtaaaggataggtttggagtagagccctataagattcccttatacaaagtattagtaggggacgaatctgataatattccaggagtaaatggaataggtcctaaaaaggcctcaaagattcttgagaaaatttcaagtgtagatgaatttaaaagtaaaataaaagttttggatagtgatttaagggagcttattgagaaaaattggaatattattgaaagaaatttagaacttgttactttaaaaaatatagataaggatcttattcttaaacccttcgagattaaaagagatgaaaaagtaatagattttttgaagagatatgaacttaagagtattcttcaaaagttatttcctgatcttcaagaggaagaaaatatagagattaaagatgtcgaagagatcaattttaatgaggtagaaaaagaaggctactttgcctttaaatgtcttggagatagggcttttgagggtatttctctttccttcaaggagggggaaggatattttatatctccttttgatttcaataatgagataagaaagaagattgaaaatataatttcttcagagaatgttaaaaaaattggctcttatattcaaagagatttacattttttaaactgtaaaataaagggcgatgtatttgatgttagtctcgcatcttatcttttgaaccctgaaagacaaaatcactctcttgatattttgataggagagtatctaaataaaacctcttttattcctcaaaaatacgctggttatctttttccgttaaagtctattcttgaggagaggataaagaatgaagggttagaatttgtactttataacatagagattccattaatccctgtactttactccatggagaagtgggggataaaggtagataaggaatatttaaaacagctttctgatgaattctgcgagagaattaaaaaattggaagaagagatatatgaacttgcaggaaccagatttaatctcaattctccaaaacaactttctgaagttttatttgagaggttaaaacttccttctggtaagaaaggaaaaacaggatattctacgtcgtcttctgtgcttcaaaacttaataaatgctcatcctatagtgagaaaaatcctccaatatagagaactctataaattgaagagtacttatgtggatgctattcctaatctggttaatccacaaacaggtagagttcatacaaaatttaatcctacaggtacagctacaggaagaataagtagtagtgaacctaatcttcagaatattcctataaaaagtgaagaaggtagaaagataagaagagccttcgtgtcagaagatggatattttcttgtatctcttgattattctcagatagagctaaggattatggctcatctttctcaggagcctaaattaatatctgccttccaaaaaggagaggatattcatagaagaacagcatcggagatttttggagtgccagaggaagaagttgatgatcttttaaggtcaagggcaaaggccgttaattttggaattatttatggtatctcttcttttggactttctgagactgtaagtattacaccagaagaggcagagaaatttatagactcgtattttaagcactatccaagagtgaagctttttatagataagactattcatgaggcaagagaaaaactgtacgttaaaaccttatttggcagaaaacattatattcctgagattaagagcataaataaacaggtaaggaatgcctatgaaaggatagcaataaatgcgccaattcagggaacagctgctgatattataaaacttgccatgatagaaatttacaaggagattgaaaataaaaatctcaagtcaagaatactccttcaaattcatgatgagcttattcttgaagtgccagaggaggagatggaatttactcctttaatggcaaaggaaaaaatggaaaaggtggtagaactttcggttcctcttgtagttgaaatctcggtaggtaaaaatcttgctgaattaaaatgagctataagattggtcgac

SEQ ID NO: 1918 - DNA, 2673 bp, Artificial Sequence
  Description of Artificial Sequence: Synthetic DNA sequence of Dictyoglomus thermophilum DNA R779I
atgaaatacctgctgccgaccgctgctgctggtctgctgctcctcgctgcccagccggcgatggccatggatatcggaattaattcggatccgaaatctctgtgggatctttttcaagaaaataccgagaaagagtccaaaaggaagattctgattattgatggctcaagcctcatatacagggtttattacgcccttccccctttaaagacaaaaaatggtgaattaactaatgctctttatggcttcataagaatacttttaaaggccgtagaagattttaatcctgatcttgtaggcgttgcctttgatagacctgaacctacttttaggcatgtgatttataaagagtataaggctaagagaccacctatgaaggatgatttgaaagcgcagataccatggataagagaatttctaaggttaaatgatatacctctattggaagagcctggctatgaagcggatgatataatagctactatagtgaataaatataaggatgatttaaaatatattctctctggagatttagatcttttgcaattagtctcggacaaaacctttctaatacatcctcaaaagggaattactgagtttactatttatgatccaaaagctgtaaaggataggtttggagtagagccctataagattcccttatacaaagtattagtaggggacgaatctgataatattccaggagtaaatggaataggtcctaaaaaggcctcaaagattcttgagaaaatttcaagtgtagatgaatttaaaagtaaaataaaagttttggatagtgatttaagggagcttattgagaaaaattggaatattattgaaagaaatttagaacttgttactttaaaaaatatagataaggatcttattcttaaacccttcgagattaaaagagatgaaaaagtaatagattttttgaagagatatgaacttaagagtattcttcaaaagttatttcctgatcttcaagaggaagaaaatatagagattaaagatgtcgaagagatcaattttaatgaggtagaaaaagaaggctactttgcctttaaatgtcttggagatagggcttttgagggtatttctctttccttcaaggagggggaaggatattttatatctccttttgatttcaataatgagataagaaagaagattgaaaatataatttcttcagagaatgttaaaaaaattggctcttatattcaaagagatttacattttttaaactgtaaaataaagggcgatgtatttgatgttagtctcgcatcttatcttttgaaccctgaaagacaaaatcactctcttgatattttgataggagagtatctaaataaaacctcttttattcctcaaaaatacgctggttatctttttccgttaaagtctattcttgaggagaggataaagaatgaagggttagaatttgtactttataacatagagattccattaatccctgtactttactccatggagaagtgggggataaaggtagataaggaatatttaaaacagctttctgatgaattctgcgagagaattaaaaaattggaagaagagatatatgaacttgcaggaaccagatttaatctcaattctccaaaacaactttctgaagttttatttgagaggttaaaacttccttctggtaagaaaggaaaaacaggatattctacgtcgtcttctgtgcttcaaaacttaataaatgctcatcctatagtgagaaaaatcctccaatatagagaactctataaattgaagagtacttatgtggatgctattcctaatctggttaatccacaaacaggtagagttcatacaaaatttaatcctacaggtacagctacaggaagaataagtagtagtgaacctaatcttcagaatattcctataaaaagtgaagaaggtagaaagataagaagagccttcgtgtcagaagatggatattttcttgtatctcttgattattctcagatagagctaaggattatggctcatctttctcaggagcctaaattaatatctgccttccaaaaaggagaggatattcatagaagaacagcatcggagatttttggagtgccagaggaagaagttgatgatcttttaaggtcaagggcaaaggccgttaattttggaattatttatggtatctcttcttttggactttctgagactgtaagtattacaccagaagaggcagagaaatttatagactcgtattttaagcactatccaagagtgaagctttttatagataagactattcatgaggcaagagaaaaactgtacgttaaaaccttatttggcagaaaaatttatattcctgagattaagagcataaataaacaggtaaggaatgcctatgaaaggatagcaataaatgcgccaattcagggaacagctgctgatattataaaacttgccatgatagaaatttacaaggagattgaaaataaaaatctcaagtcaagaatactccttcaaattcatgatgagcttattcttgaagtgccagaggaggagatggaatttactcctttaatggcaaaggaaaaaatggaaaaggtggtagaactttcggttcctcttgtagttgaaatctcggtaggtaaaaatcttgctgaattaaaatgagctataagattggtcgac

SEQ ID NO: 1919 - DNA, 2673 bp, Artificial Sequence
  Description of Artificial Sequence: Synthetic DNA sequence of Dictyoglomus thermophilum DNA R779L
atgaaatacctgctgccgaccgctgctgctggtctgctgctcctcgctgcccagccggcgatggccatggatatcggaattaattcggatccgaaatctctgtgggatctttttcaagaaaataccgagaaagagtccaaaaggaagattctgattattgatggctcaagcctcatatacagggtttattacgcccttccccctttaaagacaaaaaatggtgaattaactaatgctctttatggcttcataagaatacttttaaaggccgtagaagattttaatcctgatcttgtaggcgttgcctttgatagacctgaacctacttttaggcatgtgatttataaagagtataaggctaagagaccacctatgaaggatgatttgaaagcgcagataccatggataagagaatttctaaggttaaatgatatacctctattggaagagcctggctatgaagcggatgatataatagctactatagtgaataaatataaggatgatttaaaatatattctctctggagatttagatcttttgcaattagtctcggacaaaacctttctaatacatcctcaaaagggaattactgagtttactatttatgatccaaaagctgtaaaggataggtttggagtagagccctataagattcccttatacaaagtattagtaggggacgaatctgataatattccaggagtaaatggaataggtcctaaaaaggcctcaaagattcttgagaaaatttcaagtgtagatgaatttaaaagtaaaataaaagttttggatagtgatttaagggagcttattgagaaaaattggaatattattgaaagaaatttagaacttgttactttaaaaaatatagataaggatcttattcttaaacccttcgagattaaaagagatgaaaaagtaatagattttttgaagagatatgaacttaagagtattcttcaaaagttatttcctgatcttcaagaggaagaaaatatagagattaaagatgtcgaagagatcaattttaatgaggtagaaaaagaaggctactttgcctttaaatgtcttggagatagggcttttgagggtatttctctttccttcaaggagggggaaggatattttatatctccttttgatttcaataatgagataagaaagaagattgaaaatataatttcttcagagaatgttaaaaaaattggctcttatattcaaagagatttacattttttaaactgtaaaataaagggcgatgtatttgatgttagtctcgcatcttatcttttgaaccctgaaagacaaaatcactctcttgatattttgataggagagtatctaaataaaacctcttttattcctcaaaaatacgctggttatctttttccgttaaagtctattcttgaggagaggataaagaatgaagggttagaatttgtactttataacatagagattccattaatccctgtactttactccatggagaagtgggggataaaggtagataaggaatatttaaaacagctttctgatgaattctgcgagagaattaaaaaattggaagaagagatatatgaacttgcaggaaccagatttaatctcaattctccaaaacaactttctgaagttttatttgagaggttaaaacttccttctggtaagaaaggaaaaacaggatattctacgtcgtcttctgtgcttcaaaacttaataaatgctcatcctatagtgagaaaaatcctccaatatagagaactctataaattgaagagtacttatgtggatgctattcctaatctggttaatccacaaacaggtagagttcatacaaaatttaatcctacaggtacagctacaggaagaataagtagtagtgaacctaatcttcagaatattcctataaaaagtgaagaaggtagaaagataagaagagccttcgtgtcagaagatggatattttcttgtatctcttgattattctcagatagagctaaggattatggctcatctttctcaggagcctaaattaatatctgccttccaaaaaggagaggatattcatagaagaacagcatcggagatttttggagtgccagaggaagaagttgatgatcttttaaggtcaagggcaaaggccgttaattttggaattatttatggtatctcttcttttggactttctgagactgtaagtattacaccagaagaggcagagaaatttatagactcgtattttaagcactatccaagagtgaagctttttatagataagactattcatgaggcaagagaaaaactgtacgttaaaaccttatttggcagaaaactttatattcctgagattaagagcataaataaacaggtaaggaatgcctatgaaaggatagcaataaatgcgccaattcagggaacagctgctgatattataaaacttgccatgatagaaatttacaaggagattgaaaataaaaatctcaagtcaagaatactccttcaaattcatgatgagcttattcttgaagtgccagaggaggagatggaatttactcctttaatggcaaaggaaaaaatggaaaaggtggtagaactttcggttcctcttgtagttgaaatctcggtaggtaaaaatcttgctgaattaaaatgagctataagattggtcgac

SEQ ID NO: 1920 - DNA, 2673 bp, Artificial Sequence
  Description of Artificial Sequence: Synthetic DNA sequence of Dictyoglomus thermophilum DNA R779K
atgaaatacctgctgccgaccgctgctgctggtctgctgctcctcgctgcccagccggcgatggccatggatatcggaattaattcggatccgaaatctctgtgggatctttttcaagaaaataccgagaaagagtccaaaaggaagattctgattattgatggctcaagcctcatatacagggtttattacgcccttccccctttaaagacaaaaaatggtgaattaactaatgctctttatggcttcataagaatacttttaaaggccgtagaagattttaatcctgatcttgtaggcgttgcctttgatagacctgaacctacttttaggcatgtgatttataaagagtataaggctaagagaccacctatgaaggatgatttgaaagcgcagataccatggataagagaatttctaaggttaaatgatatacctctattggaagagcctggctatgaagcggatgatataatagctactatagtgaataaatataaggatgatttaaaatatattctctctggagatttagatcttttgcaattagtctcggacaaaacctttctaatacatcctcaaaagggaattactgagtttactatttatgatccaaaagctgtaaaggataggtttggagtagagccctataagattcccttatacaaagtattagtaggggacgaatctgataatattccaggagtaaatggaataggtcctaaaaaggcctcaaagattcttgagaaaatttcaagtgtagatgaatttaaaagtaaaataaaagttttggatagtgatttaagggagcttattgagaaaaattggaatattattgaaagaaatttagaacttgttactttaaaaaatatagataaggatcttattcttaaacccttcgagattaaaagagatgaaaaagtaatagattttttgaagagatatgaacttaagagtattcttcaaaagttatttcctgatcttcaagaggaagaaaatatagagattaaagatgtcgaagagatcaattttaatgaggtagaaaaagaaggctactttgcctttaaatgtcttggagatagggcttttgagggtatttctctttccttcaaggagggggaaggatattttatatctccttttgatttcaataatgagataagaaagaagattgaaaatataatttcttcagagaatgttaaaaaaattggctcttatattcaaagagatttacattttttaaactgtaaaataaagggcgatgtatttgatgttagtctcgcatcttatcttttgaaccctgaaagacaaaatcactctcttgatattttgataggagagtatctaaataaaacctcttttattcctcaaaaatacgctggttatctttttccgttaaagtctattcttgaggagaggataaagaatgaagggttagaatttgtactttataacatagagattccattaatccctgtactttactccatggagaagtgggggataaaggtagataaggaatatttaaaacagctttctgatgaattctgcgagagaattaaaaaattggaagaagagatatatgaacttgcaggaaccagatttaatctcaattctccaaaacaactttctgaagttttatttgagaggttaaaacttccttctggtaagaaaggaaaaacaggatattctacgtcgtcttctgtgcttcaaaacttaataaatgctcatcctatagtgagaaaaatcctccaatatagagaactctataaattgaagagtacttatgtggatgctattcctaatctggttaatccacaaacaggtagagttcatacaaaatttaatcctacaggtacagctacaggaagaataagtagtagtgaacctaatcttcagaatattcctataaaaagtgaagaaggtagaaagataagaagagccttcgtgtcagaagatggatattttcttgtatctcttgattattctcagatagagctaaggattatggctcatctttctcaggagcctaaattaatatctgccttccaaaaaggagaggatattcatagaagaacagcatcggagatttttggagtgccagaggaagaagttgatgatcttttaaggtcaagggcaaaggccgttaattttggaattatttatggtatctcttcttttggactttctgagactgtaagtattacaccagaagaggcagagaaatttatagactcgtattttaagcactatccaagagtgaagctttttatagataagactattcatgaggcaagagaaaaactgtacgttaaaaccttatttggcagaaaaaaatatattcctgagattaagagcataaataaacaggtaaggaatgcctatgaaaggatagcaataaatgcgccaattcagggaacagctgctgatattataaaacttgccatgatagaaatttacaaggagattgaaaataaaaatctcaagtcaagaatactccttcaaattcatgatgagcttattcttgaagtgccagaggaggagatggaatttactcctttaatggcaaaggaaaaaatggaaaaggtggtagaactttcggttcctcttgtagttgaaatctcggtaggtaaaaatcttgctgaattaaaatgagctataagattggtcgac

SEQ ID NO: 1921 - DNA, 2673 bp, Artificial Sequence
  Description of Artificial Sequence: Synthetic DNA sequence of Dictyoglomus thermophilum DNA R779M
atgaaatacctgctgccgaccgctgctgctggtctgctgctcctcgctgcccagccggcgatggccatggatatcggaattaattcggatccgaaatctctgtgggatctttttcaagaaaataccgagaaagagtccaaaaggaagattctgattattgatggctcaagcctcatatacagggtttattacgcccttccccctttaaagacaaaaaatggtgaattaactaatgctctttatggcttcataagaatacttttaaaggccgtagaagattttaatcctgatcttgtaggcgttgcctttgatagacctgaacctacttttaggcatgtgatttataaagagtataaggctaagagaccacctatgaaggatgatttgaaagcgcagataccatggataagagaatttctaaggttaaatgatatacctctattggaagagcctggctatgaagcggatgatataatagctactatagtgaataaatataaggatgatttaaaatatattctctctggagatttagatcttttgcaattagtctcggacaaaacctttctaatacatcctcaaaagggaattactgagtttactatttatgatccaaaagctgtaaaggataggtttggagtagagccctataagattcccttatacaaagtattagtaggggacgaatctgataatattccaggagtaaatggaataggtcctaaaaaggcctcaaagattcttgagaaaatttcaagtgtagatgaatttaaaagtaaaataaaagttttggatagtgatttaagggagcttattgagaaaaattggaatattattgaaagaaatttagaacttgttactttaaaaaatatagataaggatcttattcttaaacccttcgagattaaaagagatgaaaaagtaatagattttttgaagagatatgaacttaagagtattcttcaaaagttatttcctgatcttcaagaggaagaaaatatagagattaaagatgtcgaagagatcaattttaatgaggtagaaaaagaaggctactttgcctttaaatgtcttggagatagggcttttgagggtatttctctttccttcaaggagggggaaggatattttatatctccttttgatttcaataatgagataagaaagaagattgaaaatataatttcttcagagaatgttaaaaaaattggctcttatattcaaagagatttacattttttaaactgtaaaataaagggcgatgtatttgatgttagtctcgcatcttatcttttgaaccctgaaagacaaaatcactctcttgatattttgataggagagtatctaaataaaacctcttttattcctcaaaaatacgctggttatctttttccgttaaagtctattcttgaggagaggataaagaatgaagggttagaatttgtactttataacatagagattccattaatccctgtactttactccatggagaagtgggggataaaggtagataaggaatatttaaaacagctttctgatgaattctgcgagagaattaaaaaattggaagaagagatatatgaacttgcaggaaccagatttaatctcaattctccaaaacaactttctgaagttttatttgagaggttaaaacttccttctggtaagaaaggaaaaacaggatattctacgtcgtcttctgtgcttcaaaacttaataaatgctcatcctatagtgagaaaaatcctccaatatagagaactctataaattgaagagtacttatgtggatgctattcctaatctggttaatccacaaacaggtagagttcatacaaaatttaatcctacaggtacagctacaggaagaataagtagtagtgaacctaatcttcagaatattcctataaaaagtgaagaaggtagaaagataagaagagccttcgtgtcagaagatggatattttcttgtatctcttgattattctcagatagagctaaggattatggctcatctttctcaggagcctaaattaatatctgccttccaaaaaggagaggatattcatagaagaacagcatcggagatttttggagtgccagaggaagaagttgatgatcttttaaggtcaagggcaaaggccgttaattttggaattatttatggtatctcttcttttggactttctgagactgtaagtattacaccagaagaggcagagaaatttatagactcgtattttaagcactatccaagagtgaagctttttatagataagactattcatgaggcaagagaaaaactgtacgttaaaaccttatttggcagaaaaatgtatattcctgagattaagagcataaataaacaggtaaggaatgcctatgaaaggatagcaataaatgcgccaattcagggaacagctgctgatattataaaacttgccatgatagaaatttacaaggagattgaaaataaaaatctcaagtcaagaatactccttcaaattcatgatgagcttattcttgaagtgccagaggaggagatggaatttactcctttaatggcaaaggaaaaaatggaaaaggtggtagaactttcggttcctcttgtagttgaaatctcggtaggtaaaaatcttgctgaattaaaatgagctataagattggtcgac

SEQ ID NO: 1922 - DNA, 2673 bp, Artificial Sequence
  Description of Artificial Sequence: Synthetic DNA sequence of Dictyoglomus thermophilum DNA R779F
atgaaatacctgctgccgaccgctgctgctggtctgctgctcctcgctgcccagccggcgatggccatggatatcggaattaattcggatccgaaatctctgtgggatctttttcaagaaaataccgagaaagagtccaaaaggaagattctgattattgatggctcaagcctcatatacagggtttattacgcccttccccctttaaagacaaaaaatggtgaattaactaatgctctttatggcttcataagaatacttttaaaggccgtagaagattttaatcctgatcttgtaggcgttgcctttgatagacctgaacctacttttaggcatgtgatttataaagagtataaggctaagagaccacctatgaaggatgatttgaaagcgcagataccatggataagagaatttctaaggttaaatgatatacctctattggaagagcctggctatgaagcggatgatataatagctactatagtgaataaatataaggatgatttaaaatatattctctctggagatttagatcttttgcaattagtctcggacaaaacctttctaatacatcctcaaaagggaattactgagtttactatttatgatccaaaagctgtaaaggataggtttggagtagagccctataagattcccttatacaaagtattagtaggggacgaatctgataatattccaggagtaaatggaataggtcctaaaaaggcctcaaagattcttgagaaaatttcaagtgtagatgaatttaaaagtaaaataaaagttttggatagtgatttaagggagcttattgagaaaaattggaatattattgaaagaaatttagaacttgttactttaaaaaatatagataaggatcttattcttaaacccttcgagattaaaagagatgaaaaagtaatagattttttgaagagatatgaacttaagagtattcttcaaaagttatttcctgatcttcaagaggaagaaaatatagagattaaagatgtcgaagagatcaattttaatgaggtagaaaaagaaggctactttgcctttaaatgtcttggagatagggcttttgagggtatttctctttccttcaaggagggggaaggatattttatatctccttttgatttcaataatgagataagaaagaagattgaaaatataatttcttcagagaatgttaaaaaaattggctcttatattcaaagagatttacattttttaaactgtaaaataaagggcgatgtatttgatgttagtctcgcatcttatcttttgaaccctgaaagacaaaatcactctcttgatattttgataggagagtatctaaataaaacctcttttattcctcaaaaatacgctggttatctttttccgttaaagtctattcttgaggagaggataaagaatgaagggttagaatttgtactttataacatagagattccattaatccctgtactttactccatggagaagtgggggataaaggtagataaggaatatttaaaacagctttctgatgaattctgcgagagaattaaaaaattggaagaagagatatatgaacttgcaggaaccagatttaatctcaattctccaaaacaactttctgaagttttatttgagaggttaaaacttccttctggtaagaaaggaaaaacaggatattctacgtcgtcttctgtgcttcaaaacttaataaatgctcatcctatagtgagaaaaatcctccaatatagagaactctataaattgaagagtacttatgtggatgctattcctaatctggttaatccacaaacaggtagagttcatacaaaatttaatcctacaggtacagctacaggaagaataagtagtagtgaacctaatcttcagaatattcctataaaaagtgaagaaggtagaaagataagaagagccttcgtgtcagaagatggatattttcttgtatctcttgattattctcagatagagctaaggattatggctcatctttctcaggagcctaaattaatatctgccttccaaaaaggagaggatattcatagaagaacagcatcggagatttttggagtgccagaggaagaagttgatgatcttttaaggtcaagggcaaaggccgttaattttggaattatttatggtatctcttcttttggactttctgagactgtaagtattacaccagaagaggcagagaaatttatagactcgtattttaagcactatccaagagtgaagctttttatagataagactattcatgaggcaagagaaaaactgtacgttaaaaccttatttggcagaaaattttatattcctgagattaagagcataaataaacaggtaaggaatgcctatgaaaggatagcaataaatgcgccaattcagggaacagctgctgatattataaaacttgccatgatagaaatttacaaggagattgaaaataaaaatctcaagtcaagaatactccttcaaattcatgatgagcttattcttgaagtgccagaggaggagatggaatttactcctttaatggcaaaggaaaaaatggaaaaggtggtagaactttcggttcctcttgtagttgaaatctcggtaggtaaaaatcttgctgaattaaaatgagctataagattggtcgac

SEQ ID NO: 1923 - DNA, 2673 bp, Artificial Sequence
  Description of Artificial Sequence: Synthetic DNA sequence of Dictyoglomus thermophilum DNA R779P
atgaaatacctgctgccgaccgctgctgctggtctgctgctcctcgctgcccagccggcgatggccatggatatcggaattaattcggatccgaaatctctgtgggatctttttcaagaaaataccgagaaagagtccaaaaggaagattctgattattgatggctcaagcctcatatacagggtttattacgcccttccccctttaaagacaaaaaatggtgaattaactaatgctctttatggcttcataagaatacttttaaaggccgtagaagattttaatcctgatcttgtaggcgttgcctttgatagacctgaacctacttttaggcatgtgatttataaagagtataaggctaagagaccacctatgaaggatgatttgaaagcgcagataccatggataagagaatttctaaggttaaatgatatacctctattggaagagcctggctatgaagcggatgatataatagctactatagtgaataaatataaggatgatttaaaatatattctctctggagatttagatcttttgcaattagtctcggacaaaacctttctaatacatcctcaaaagggaattactgagtttactatttatgatccaaaagctgtaaaggataggtttggagtagagccctataagattcccttatacaaagtattagtaggggacgaatctgataatattccaggagtaaatggaataggtcctaaaaaggcctcaaagattcttgagaaaatttcaagtgtagatgaatttaaaagtaaaataaaagttttggatagtgatttaagggagcttattgagaaaaattggaatattattgaaagaaatttagaacttgttactttaaaaaatatagataaggatcttattcttaaacccttcgagattaaaagagatgaaaaagtaatagattttttgaagagatatgaacttaagagtattcttcaaaagttatttcctgatcttcaagaggaagaaaatatagagattaaagatgtcgaagagatcaattttaatgaggtagaaaaagaaggctactttgcctttaaatgtcttggagatagggcttttgagggtatttctctttccttcaaggagggggaaggatattttatatctccttttgatttcaataatgagataagaaagaagattgaaaatataatttcttcagagaatgttaaaaaaattggctcttatattcaaagagatttacattttttaaactgtaaaataaagggcgatgtatttgatgttagtctcgcatcttatcttttgaaccctgaaagacaaaatcactctcttgatattttgataggagagtatctaaataaaacctcttttattcctcaaaaatacgctggttatctttttccgttaaagtctattcttgaggagaggataaagaatgaagggttagaatttgtactttataacatagagattccattaatccctgtactttactccatggagaagtgggggataaaggtagataaggaatatttaaaacagctttctgatgaattctgcgagagaattaaaaaattggaagaagagatatatgaacttgcaggaaccagatttaatctcaattctccaaaacaactttctgaagttttatttgagaggttaaaacttccttctggtaagaaaggaaaaacaggatattctacgtcgtcttctgtgcttcaaaacttaataaatgctcatcctatagtgagaaaaatcctccaatatagagaactctataaattgaagagtacttatgtggatgctattcctaatctggttaatccacaaacaggtagagttcatacaaaatttaatcctacaggtacagctacaggaagaataagtagtagtgaacctaatcttcagaatattcctataaaaagtgaagaaggtagaaagataagaagagccttcgtgtcagaagatggatattttcttgtatctcttgattattctcagatagagctaaggattatggctcatctttctcaggagcctaaattaatatctgccttccaaaaaggagaggatattcatagaagaacagcatcggagatttttggagtgccagaggaagaagttgatgatcttttaaggtcaagggcaaaggccgttaattttggaattatttatggtatctcttcttttggactttctgagactgtaagtattacaccagaagaggcagagaaatttatagactcgtattttaagcactatccaagagtgaagctttttatagataagactattcatgaggcaagagaaaaactgtacgttaaaaccttatttggcagaaaaccttatattcctgagattaagagcataaataaacaggtaaggaatgcctatgaaaggatagcaataaatgcgccaattcagggaacagctgctgatattataaaacttgccatgatagaaatttacaaggagattgaaaataaaaatctcaagtcaagaatactccttcaaattcatgatgagcttattcttgaagtgccagaggaggagatggaatttactcctttaatggcaaaggaaaaaatggaaaaggtggtagaactttcggttcctcttgtagttgaaatctcggtaggtaaaaatcttgctgaattaaaatgagctataagattggtcgac

SEQ ID NO: 1924 - DNA, 2673 bp, Artificial Sequence
  Description of Artificial Sequence: Synthetic DNA sequence of Dictyoglomus thermophilum DNA R779S
atgaaatacctgctgccgaccgctgctgctggtctgctgctcctcgctgcccagccggcgatggccatggatatcggaattaattcggatccgaaatctctgtgggatctttttcaagaaaataccgagaaagagtccaaaaggaagattctgattattgatggctcaagcctcatatacagggtttattacgcccttccccctttaaagacaaaaaatggtgaattaactaatgctctttatggcttcataagaatacttttaaaggccgtagaagattttaatcctgatcttgtaggcgttgcctttgatagacctgaacctacttttaggcatgtgatttataaagagtataaggctaagagaccacctatgaaggatgatttgaaagcgcagataccatggataagagaatttctaaggttaaatgatatacctctattggaagagcctggctatgaagcggatgatataatagctactatagtgaataaatataaggatgatttaaaatatattctctctggagatttagatcttttgcaattagtctcggacaaaacctttctaatacatcctcaaaagggaattactgagtttactatttatgatccaaaagctgtaaaggataggtttggagtagagccctataagattcccttatacaaagtattagtaggggacgaatctgataatattccaggagtaaatggaataggtcctaaaaaggcctcaaagattcttgagaaaatttcaagtgtagatgaatttaaaagtaaaataaaagttttggatagtgatttaagggagcttattgagaaaaattggaatattattgaaagaaatttagaacttgttactttaaaaaatatagataaggatcttattcttaaacccttcgagattaaaagagatgaaaaagtaatagattttttgaagagatatgaacttaagagtattcttcaaaagttatttcctgatcttcaagaggaagaaaatatagagattaaagatgtcgaagagatcaattttaatgaggtagaaaaagaaggctactttgcctttaaatgtcttggagatagggcttttgagggtatttctctttccttcaaggagggggaaggatattttatatctccttttgatttcaataatgagataagaaagaagattgaaaatataatttcttcagagaatgttaaaaaaattggctcttatattcaaagagatttacattttttaaactgtaaaataaagggcgatgtatttgatgttagtctcgcatcttatcttttgaaccctgaaagacaaaatcactctcttgatattttgataggagagtatctaaataaaacctcttttattcctcaaaaatacgctggttatctttttccgttaaagtctattcttgaggagaggataaagaatgaagggttagaatttgtactttataacatagagattccattaatccctgtactttactccatggagaagtgggggataaaggtagataaggaatatttaaaacagctttctgatgaattctgcgagagaattaaaaaattggaagaagagatatatgaacttgcaggaaccagatttaatctcaattctccaaaacaactttctgaagttttatttgagaggttaaaacttccttctggtaagaaaggaaaaacaggatattctacgtcgtcttctgtgcttcaaaacttaataaatgctcatcctatagtgagaaaaatcctccaatatagagaactctataaattgaagagtacttatgtggatgctattcctaatctggttaatccacaaacaggtagagttcatacaaaatttaatcctacaggtacagctacaggaagaataagtagtagtgaacctaatcttcagaatattcctataaaaagtgaagaaggtagaaagataagaagagccttcgtgtcagaagatggatattttcttgtatctcttgattattctcagatagagctaaggattatggctcatctttctcaggagcctaaattaatatctgccttccaaaaaggagaggatattcatagaagaacagcatcggagatttttggagtgccagaggaagaagttgatgatcttttaaggtcaagggcaaaggccgttaattttggaattatttatggtatctcttcttttggactttctgagactgtaagtattacaccagaagaggcagagaaatttatagactcgtattttaagcactatccaagagtgaagctttttatagataagactattcatgaggcaagagaaaaactgtacgttaaaaccttatttggcagaaaatcttatattcctgagattaagagcataaataaacaggtaaggaatgcctatgaaaggatagcaataaatgcgccaattcagggaacagctgctgatattataaaacttgccatgatagaaatttacaaggagattgaaaataaaaatctcaagtcaagaatactccttcaaattcatgatgagcttattcttgaagtgccagaggaggagatggaatttactcctttaatggcaaaggaaaaaatggaaaaggtggtagaactttcggttcctcttgtagttgaaatctcggtaggtaaaaatcttgctgaattaaaatgagctataagattggtcgac

SEQ ID NO: 1925 - DNA, 2673 bp, Artificial Sequence
  Description of Artificial Sequence: Synthetic DNA sequence of Dictyoglomus thermophilum DNA R779T
atgaaatacctgctgccgaccgctgctgctggtctgctgctcctcgctgcccagccggcgatggccatggatatcggaattaattcggatccgaaatctctgtgggatctttttcaagaaaataccgagaaagagtccaaaaggaagattctgattattgatggctcaagcctcatatacagggtttattacgcccttccccctttaaagacaaaaaatggtgaattaactaatgctctttatggcttcataagaatacttttaaaggccgtagaagattttaatcctgatcttgtaggcgttgcctttgatagacctgaacctacttttaggcatgtgatttataaagagtataaggctaagagaccacctatgaaggatgatttgaaagcgcagataccatggataagagaatttctaaggttaaatgatatacctctattggaagagcctggctatgaagcggatgatataatagctactatagtgaataaatataaggatgatttaaaatatattctctctggagatttagatcttttgcaattagtctcggacaaaacctttctaatacatcctcaaaagggaattactgagtttactatttatgatccaaaagctgtaaaggataggtttggagtagagccctataagattcccttatacaaagtattagtaggggacgaatctgataatattccaggagtaaatggaataggtcctaaaaaggcctcaaagattcttgagaaaatttcaagtgtagatgaatttaaaagtaaaataaaagttttggatagtgatttaagggagcttattgagaaaaattggaatattattgaaagaaatttagaacttgttactttaaaaaatatagataaggatcttattcttaaacccttcgagattaaaagagatgaaaaagtaatagattttttgaagagatatgaacttaagagtattcttcaaaagttatttcctgatcttcaagaggaagaaaatatagagattaaagatgtcgaagagatcaattttaatgaggtagaaaaagaaggctactttgcctttaaatgtcttggagatagggcttttgagggtatttctctttccttcaaggagggggaaggatattttatatctccttttgatttcaataatgagataagaaagaagattgaaaatataatttcttcagagaatgttaaaaaaattggctcttatattcaaagagatttacattttttaaactgtaaaataaagggcgatgtatttgatgttagtctcgcatcttatcttttgaaccctgaaagacaaaatcactctcttgatattttgataggagagtatctaaataaaacctcttttattcctcaaaaatacgctggttatctttttccgttaaagtctattcttgaggagaggataaagaatgaagggttagaatttgtactttataacatagagattccattaatccctgtactttactccatggagaagtgggggataaaggtagataaggaatatttaaaacagctttctgatgaattctgcgagagaattaaaaaattggaagaagagatatatgaacttgcaggaaccagatttaatctcaattctccaaaacaactttctgaagttttatttgagaggttaaaacttccttctggtaagaaaggaaaaacaggatattctacgtcgtcttctgtgcttcaaaacttaataaatgctcatcctatagtgagaaaaatcctccaatatagagaactctataaattgaagagtacttatgtggatgctattcctaatctggttaatccacaaacaggtagagttcatacaaaatttaatcctacaggtacagctacaggaagaataagtagtagtgaacctaatcttcagaatattcctataaaaagtgaagaaggtagaaagataagaagagccttcgtgtcagaagatggatattttcttgtatctcttgattattctcagatagagctaaggattatggctcatctttctcaggagcctaaattaatatctgccttccaaaaaggagaggatattcatagaagaacagcatcggagatttttggagtgccagaggaagaagttgatgatcttttaaggtcaagggcaaaggccgttaattttggaattatttatggtatctcttcttttggactttctgagactgtaagtattacaccagaagaggcagagaaatttatagactcgtattttaagcactatccaagagtgaagctttttatagataagactattcatgaggcaagagaaaaactgtacgttaaaaccttatttggcagaaaaacttatattcctgagattaagagcataaataaacaggtaaggaatgcctatgaaaggatagcaataaatgcgccaattcagggaacagctgctgatattataaaacttgccatgatagaaatttacaaggagattgaaaataaaaatctcaagtcaagaatactccttcaaattcatgatgagcttattcttgaagtgccagaggaggagatggaatttactcctttaatggcaaaggaaaaaatggaaaaggtggtagaactttcggttcctcttgtagttgaaatctcggtaggtaaaaatcttgctgaattaaaatgagctataagattggtcgac

SEQ ID NO: 1926 - DNA, 2673 bp, Artificial Sequence
  Description of Artificial Sequence: Synthetic DNA sequence of Dictyoglomus thermophilum DNA R779W
atgaaatacctgctgccgaccgctgctgctggtctgctgctcctcgctgcccagccggcgatggccatggatatcggaattaattcggatccgaaatctctgtgggatctttttcaagaaaataccgagaaagagtccaaaaggaagattctgattattgatggctcaagcctcatatacagggtttattacgcccttccccctttaaagacaaaaaatggtgaattaactaatgctctttatggcttcataagaatacttttaaaggccgtagaagattttaatcctgatcttgtaggcgttgcctttgatagacctgaacctacttttaggcatgtgatttataaagagtataaggctaagagaccacctatgaaggatgatttgaaagcgcagataccatggataagagaatttctaaggttaaatgatatacctctattggaagagcctggctatgaagcggatgatataatagctactatagtgaataaatataaggatgatttaaaatatattctctctggagatttagatcttttgcaattagtctcggacaaaacctttctaatacatcctcaaaagggaattactgagtttactatttatgatccaaaagctgtaaaggataggtttggagtagagccctataagattcccttatacaaagtattagtaggggacgaatctgataatattccaggagtaaatggaataggtcctaaaaaggcctcaaagattcttgagaaaatttcaagtgtagatgaatttaaaagtaaaataaaagttttggatagtgatttaagggagcttattgagaaaaattggaatattattgaaagaaatttagaacttgttactttaaaaaatatagataaggatcttattcttaaacccttcgagattaaaagagatgaaaaagtaatagattttttgaagagatatgaacttaagagtattcttcaaaagttatttcctgatcttcaagaggaagaaaatatagagattaaagatgtcgaagagatcaattttaatgaggtagaaaaagaaggctactttgcctttaaatgtcttggagatagggcttttgagggtatttctctttccttcaaggagggggaaggatattttatatctccttttgatttcaataatgagataagaaagaagattgaaaatataatttcttcagagaatgttaaaaaaattggctcttatattcaaagagatttacattttttaaactgtaaaataaagggcgatgtatttgatgttagtctcgcatcttatcttttgaaccctgaaagacaaaatcactctcttgatattttgataggagagtatctaaataaaacctcttttattcctcaaaaatacgctggttatctttttccgttaaagtctattcttgaggagaggataaagaatgaagggttagaatttgtactttataacatagagattccattaatccctgtactttactccatggagaagtgggggataaaggtagataaggaatatttaaaacagctttctgatgaattctgcgagagaattaaaaaattggaagaagagatatatgaacttgcaggaaccagatttaatctcaattctccaaaacaactttctgaagttttatttgagaggttaaaacttccttctggtaagaaaggaaaaacaggatattctacgtcgtcttctgtgcttcaaaacttaataaatgctcatcctatagtgagaaaaatcctccaatatagagaactctataaattgaagagtacttatgtggatgctattcctaatctggttaatccacaaacaggtagagttcatacaaaatttaatcctacaggtacagctacaggaagaataagtagtagtgaacctaatcttcagaatattcctataaaaagtgaagaaggtagaaagataagaagagccttcgtgtcagaagatggatattttcttgtatctcttgattattctcagatagagctaaggattatggctcatctttctcaggagcctaaattaatatctgccttccaaaaaggagaggatattcatagaagaacagcatcggagatttttggagtgccagaggaagaagttgatgatcttttaaggtcaagggcaaaggccgttaattttggaattatttatggtatctcttcttttggactttctgagactgtaagtattacaccagaagaggcagagaaatttatagactcgtattttaagcactatccaagagtgaagctttttatagataagactattcatgaggcaagagaaaaactgtacgttaaaaccttatttggcagaaaatggtatattcctgagattaagagcataaataaacaggtaaggaatgcctatgaaaggatagcaataaatgcgccaattcagggaacagctgctgatattataaaacttgccatgatagaaatttacaaggagattgaaaataaaaatctcaagtcaagaatactccttcaaattcatgatgagcttattcttgaagtgccagaggaggagatggaatttactcctttaatggcaaaggaaaaaatggaaaaggtggtagaactttcggttcctcttgtagttgaaatctcggtaggtaaaaatcttgctgaattaaaatgagctataagattggtcgac

SEQ ID NO: 1927 - DNA, 2673 bp, Artificial Sequence
  Description of Artificial Sequence: Synthetic DNA sequence of Dictyoglomus thermophilum DNA R779Y
atgaaatacctgctgccgaccgctgctgctggtctgctgctcctcgctgcccagccggcgatggccatggatatcggaattaattcggatccgaaatctctgtgggatctttttcaagaaaataccgagaaagagtccaaaaggaagattctgattattgatggctcaagcctcatatacagggtttattacgcccttccccctttaaagacaaaaaatggtgaattaactaatgctctttatggcttcataagaatacttttaaaggccgtagaagattttaatcctgatcttgtaggcgttgcctttgatagacctgaacctacttttaggcatgtgatttataaagagtataaggctaagagaccacctatgaaggatgatttgaaagcgcagataccatggataagagaatttctaaggttaaatgatatacctctattggaagagcctggctatgaagcggatgatataatagctactatagtgaataaatataaggatgatttaaaatatattctctctggagatttagatcttttgcaattagtctcggacaaaacctttctaatacatcctcaaaagggaattactgagtttactatttatgatccaaaagctgtaaaggataggtttggagtagagccctataagattcccttatacaaagtattagtaggggacgaatctgataatattccaggagtaaatggaataggtcctaaaaaggcctcaaagattcttgagaaaatttcaagtgtagatgaatttaaaagtaaaataaaagttttggatagtgatttaagggagcttattgagaaaaattggaatattattgaaagaaatttagaacttgttactttaaaaaatatagataaggatcttattcttaaacccttcgagattaaaagagatgaaaaagtaatagattttttgaagagatatgaacttaagagtattcttcaaaagttatttcctgatcttcaagaggaagaaaatatagagattaaagatgtcgaagagatcaattttaatgaggtagaaaaagaaggctactttgcctttaaatgtcttggagatagggcttttgagggtatttctctttccttcaaggagggggaaggatattttatatctccttttgatttcaataatgagataagaaagaagattgaaaatataatttcttcagagaatgttaaaaaaattggctcttatattcaaagagatttacattttttaaactgtaaaataaagggcgatgtatttgatgttagtctcgcatcttatcttttgaaccctgaaagacaaaatcactctcttgatattttgataggagagtatctaaataaaacctcttttattcctcaaaaatacgctggttatctttttccgttaaagtctattcttgaggagaggataaagaatgaagggttagaatttgtactttataacatagagattccattaatccctgtactttactccatggagaagtgggggataaaggtagataaggaatatttaaaacagctttctgatgaattctgcgagagaattaaaaaattggaagaagagatatatgaacttgcaggaaccagatttaatctcaattctccaaaacaactttctgaagttttatttgagaggttaaaacttccttctggtaagaaaggaaaaacaggatattctacgtcgtcttctgtgcttcaaaacttaataaatgctcatcctatagtgagaaaaatcctccaatatagagaactctataaattgaagagtacttatgtggatgctattcctaatctggttaatccacaaacaggtagagttcatacaaaatttaatcctacaggtacagctacaggaagaataagtagtagtgaacctaatcttcagaatattcctataaaaagtgaagaaggtagaaagataagaagagccttcgtgtcagaagatggatattttcttgtatctcttgattattctcagatagagctaaggattatggctcatctttctcaggagcctaaattaatatctgccttccaaaaaggagaggatattcatagaagaacagcatcggagatttttggagtgccagaggaagaagttgatgatcttttaaggtcaagggcaaaggccgttaattttggaattatttatggtatctcttcttttggactttctgagactgtaagtattacaccagaagaggcagagaaatttatagactcgtattttaagcactatccaagagtgaagctttttatagataagactattcatgaggcaagagaaaaactgtacgttaaaaccttatttggcagaaaatattatattcctgagattaagagcataaataaacaggtaaggaatgcctatgaaaggatagcaataaatgcgccaattcagggaacagctgctgatattataaaacttgccatgatagaaatttacaaggagattgaaaataaaaatctcaagtcaagaatactccttcaaattcatgatgagcttattcttgaagtgccagaggaggagatggaatttactcctttaatggcaaaggaaaaaatggaaaaggtggtagaactttcggttcctcttgtagttgaaatctcggtaggtaaaaatcttgctgaattaaaatgagctataagattggtcgac

SEQ ID NO: 1928 - DNA, 2673 bp, Artificial Sequence
  Description of Artificial Sequence: Synthetic DNA sequence of Dictyoglomus thermophilum DNA R779V
atgaaatacctgctgccgaccgctgctgctggtctgctgctcctcgctgcccagccggcgatggccatggatatcggaattaattcggatccgaaatctctgtgggatctttttcaagaaaataccgagaaagagtccaaaaggaagattctgattattgatggctcaagcctcatatacagggtttattacgcccttccccctttaaagacaaaaaatggtgaattaactaatgctctttatggcttcataagaatacttttaaaggccgtagaagattttaatcctgatcttgtaggcgttgcctttgatagacctgaacctacttttaggcatgtgatttataaagagtataaggctaagagaccacctatgaaggatgatttgaaagcgcagataccatggataagagaatttctaaggttaaatgatatacctctattggaagagcctggctatgaagcggatgatataatagctactatagtgaataaatataaggatgatttaaaatatattctctctggagatttagatcttttgcaattagtctcggacaaaacctttctaatacatcctcaaaagggaattactgagtttactatttatgatccaaaagctgtaaaggataggtttggagtagagccctataagattcccttatacaaagtattagtaggggacgaatctgataatattccaggagtaaatggaataggtcctaaaaaggcctcaaagattcttgagaaaatttcaagtgtagatgaatttaaaagtaaaataaaagttttggatagtgatttaagggagcttattgagaaaaattggaatattattgaaagaaatttagaacttgttactttaaaaaatatagataaggatcttattcttaaacccttcgagattaaaagagatgaaaaagtaatagattttttgaagagatatgaacttaagagtattcttcaaaagttatttcctgatcttcaagaggaagaaaatatagagattaaagatgtcgaagagatcaattttaatgaggtagaaaaagaaggctactttgcctttaaatgtcttggagatagggcttttgagggtatttctctttccttcaaggagggggaaggatattttatatctccttttgatttcaataatgagataagaaagaagattgaaaatataatttcttcagagaatgttaaaaaaattggctcttatattcaaagagatttacattttttaaactgtaaaataaagggcgatgtatttgatgttagtctcgcatcttatcttttgaaccctgaaagacaaaatcactctcttgatattttgataggagagtatctaaataaaacctcttttattcctcaaaaatacgctggttatctttttccgttaaagtctattcttgaggagaggataaagaatgaagggttagaatttgtactttataacatagagattccattaatccctgtactttactccatggagaagtgggggataaaggtagataaggaatatttaaaacagctttctgatgaattctgcgagagaattaaaaaattggaagaagagatatatgaacttgcaggaaccagatttaatctcaattctccaaaacaactttctgaagttttatttgagaggttaaaacttccttctggtaagaaaggaaaaacaggatattctacgtcgtcttctgtgcttcaaaacttaataaatgctcatcctatagtgagaaaaatcctccaatatagagaactctataaattgaagagtacttatgtggatgctattcctaatctggttaatccacaaacaggtagagttcatacaaaatttaatcctacaggtacagctacaggaagaataagtagtagtgaacctaatcttcagaatattcctataaaaagtgaagaaggtagaaagataagaagagccttcgtgtcagaagatggatattttcttgtatctcttgattattctcagatagagctaaggattatggctcatctttctcaggagcctaaattaatatctgccttccaaaaaggagaggatattcatagaagaacagcatcggagatttttggagtgccagaggaagaagttgatgatcttttaaggtcaagggcaaaggccgttaattttggaattatttatggtatctcttcttttggactttctgagactgtaagtattacaccagaagaggcagagaaatttatagactcgtattttaagcactatccaagagtgaagctttttatagataagactattcatgaggcaagagaaaaactgtacgttaaaaccttatttggcagaaaagtttatattcctgagattaagagcataaataaacaggtaaggaatgcctatgaaaggatagcaataaatgcgccaattcagggaacagctgctgatattataaaacttgccatgatagaaatttacaaggagattgaaaataaaaatctcaagtcaagaatactccttcaaattcatgatgagcttattcttgaagtgccagaggaggagatggaatttactcctttaatggcaaaggaaaaaatggaaaaggtggtagaactttcggttcctcttgtagttgaaatctcggtaggtaaaaatcttgctgaattaaaatgagctataagattggtcgac

SEQ ID NO: 1929 - DNA, 2673 bp, Artificial Sequence
  Description of Artificial Sequence: Synthetic DNA sequence of Dictyoglomus thermophilum DNA Y780A
atgaaatacctgctgccgaccgctgctgctggtctgctgctcctcgctgcccagccggcgatggccatggatatcggaattaattcggatccgaaatctctgtgggatctttttcaagaaaataccgagaaagagtccaaaaggaagattctgattattgatggctcaagcctcatatacagggtttattacgcccttccccctttaaagacaaaaaatggtgaattaactaatgctctttatggcttcataagaatacttttaaaggccgtagaagattttaatcctgatcttgtaggcgttgcctttgatagacctgaacctacttttaggcatgtgatttataaagagtataaggctaagagaccacctatgaaggatgatttgaaagcgcagataccatggataagagaatttctaaggttaaatgatatacctctattggaagagcctggctatgaagcggatgatataatagctactatagtgaataaatataaggatgatttaaaatatattctctctggagatttagatcttttgcaattagtctcggacaaaacctttctaatacatcctcaaaagggaattactgagtttactatttatgatccaaaagctgtaaaggataggtttggagtagagccctataagattcccttatacaaagtattagtaggggacgaatctgataatattccaggagtaaatggaataggtcctaaaaaggcctcaaagattcttgagaaaatttcaagtgtagatgaatttaaaagtaaaataaaagttttggatagtgatttaagggagcttattgagaaaaattggaatattattgaaagaaatttagaacttgttactttaaaaaatatagataaggatcttattcttaaacccttcgagattaaaagagatgaaaaagtaatagattttttgaagagatatgaacttaagagtattcttcaaaagttatttcctgatcttcaagaggaagaaaatatagagattaaagatgtcgaagagatcaattttaatgaggtagaaaaagaaggctactttgcctttaaatgtcttggagatagggcttttgagggtatttctctttccttcaaggagggggaaggatattttatatctccttttgatttcaataatgagataagaaagaagattgaaaatataatttcttcagagaatgttaaaaaaattggctcttatattcaaagagatttacattttttaaactgtaaaataaagggcgatgtatttgatgttagtctcgcatcttatcttttgaaccctgaaagacaaaatcactctcttgatattttgataggagagtatctaaataaaacctcttttattcctcaaaaatacgctggttatctttttccgttaaagtctattcttgaggagaggataaagaatgaagggttagaatttgtactttataacatagagattccattaatccctgtactttactccatggagaagtgggggataaaggtagataaggaatatttaaaacagctttctgatgaattctgcgagagaattaaaaaattggaagaagagatatatgaacttgcaggaaccagatttaatctcaattctccaaaacaactttctgaagttttatttgagaggttaaaacttccttctggtaagaaaggaaaaacaggatattctacgtcgtcttctgtgcttcaaaacttaataaatgctcatcctatagtgagaaaaatcctccaatatagagaactctataaattgaagagtacttatgtggatgctattcctaatctggttaatccacaaacaggtagagttcatacaaaatttaatcctacaggtacagctacaggaagaataagtagtagtgaacctaatcttcagaatattcctataaaaagtgaagaaggtagaaagataagaagagccttcgtgtcagaagatggatattttcttgtatctcttgattattctcagatagagctaaggattatggctcatctttctcaggagcctaaattaatatctgccttccaaaaaggagaggatattcatagaagaacagcatcggagatttttggagtgccagaggaagaagttgatgatcttttaaggtcaagggcaaaggccgttaattttggaattatttatggtatctcttcttttggactttctgagactgtaagtattacaccagaagaggcagagaaatttatagactcgtattttaagcactatccaagagtgaagctttttatagataagactattcatgaggcaagagaaaaactgtacgttaaaaccttatttggcagaaaaagagctattcctgagattaagagcataaataaacaggtaaggaatgcctatgaaaggatagcaataaatgcgccaattcagggaacagctgctgatattataaaacttgccatgatagaaatttacaaggagattgaaaataaaaatctcaagtcaagaatactccttcaaattcatgatgagcttattcttgaagtgccagaggaggagatggaatttactcctttaatggcaaaggaaaaaatggaaaaggtggtagaactttcggttcctcttgtagttgaaatctcggtaggtaaaaatcttgctgaattaaaatgagctataagattggtcgac

SEQ ID NO: 1930 - DNA, 2673 bp, Artificial Sequence
  Description of Artificial Sequence: Synthetic DNA sequence of Dictyoglomus thermophilum DNA Y780R
atgaaatacctgctgccgaccgctgctgctggtctgctgctcctcgctgcccagccggcgatggccatggatatcggaattaattcggatccgaaatctctgtgggatctttttcaagaaaataccgagaaagagtccaaaaggaagattctgattattgatggctcaagcctcatatacagggtttattacgcccttccccctttaaagacaaaaaatggtgaattaactaatgctctttatggcttcataagaatacttttaaaggccgtagaagattttaatcctgatcttgtaggcgttgcctttgatagacctgaacctacttttaggcatgtgatttataaagagtataaggctaagagaccacctatgaaggatgatttgaaagcgcagataccatggataagagaatttctaaggttaaatgatatacctctattggaagagcctggctatgaagcggatgatataatagctactatagtgaataaatataaggatgatttaaaatatattctctctggagatttagatcttttgcaattagtctcggacaaaacctttctaatacatcctcaaaagggaattactgagtttactatttatgatccaaaagctgtaaaggataggtttggagtagagccctataagattcccttatacaaagtattagtaggggacgaatctgataatattccaggagtaaatggaataggtcctaaaaaggcctcaaagattcttgagaaaatttcaagtgtagatgaatttaaaagtaaaataaaagttttggatagtgatttaagggagcttattgagaaaaattggaatattattgaaagaaatttagaacttgttactttaaaaaatatagataaggatcttattcttaaacccttcgagattaaaagagatgaaaaagtaatagattttttgaagagatatgaacttaagagtattcttcaaaagttatttcctgatcttcaagaggaagaaaatatagagattaaagatgtcgaagagatcaattttaatgaggtagaaaaagaaggctactttgcctttaaatgtcttggagatagggcttttgagggtatttctctttccttcaaggagggggaaggatattttatatctccttttgatttcaataatgagataagaaagaagattgaaaatataatttcttcagagaatgttaaaaaaattggctcttatattcaaagagatttacattttttaaactgtaaaataaagggcgatgtatttgatgttagtctcgcatcttatcttttgaaccctgaaagacaaaatcactctcttgatattttgataggagagtatctaaataaaacctcttttattcctcaaaaatacgctggttatctttttccgttaaagtctattcttgaggagaggataaagaatgaagggttagaatttgtactttataacatagagattccattaatccctgtactttactccatggagaagtgggggataaaggtagataaggaatatttaaaacagctttctgatgaattctgcgagagaattaaaaaattggaagaagagatatatgaacttgcaggaaccagatttaatctcaattctccaaaacaactttctgaagttttatttgagaggttaaaacttccttctggtaagaaaggaaaaacaggatattctacgtcgtcttctgtgcttcaaaacttaataaatgctcatcctatagtgagaaaaatcctccaatatagagaactctataaattgaagagtacttatgtggatgctattcctaatctggttaatccacaaacaggtagagttcatacaaaatttaatcctacaggtacagctacaggaagaataagtagtagtgaacctaatcttcagaatattcctataaaaagtgaagaaggtagaaagataagaagagccttcgtgtcagaagatggatattttcttgtatctcttgattattctcagatagagctaaggattatggctcatctttctcaggagcctaaattaatatctgccttccaaaaaggagaggatattcatagaagaacagcatcggagatttttggagtgccagaggaagaagttgatgatcttttaaggtcaagggcaaaggccgttaattttggaattatttatggtatctcttcttttggactttctgagactgtaagtattacaccagaagaggcagagaaatttatagactcgtattttaagcactatccaagagtgaagctttttatagataagactattcatgaggcaagagaaaaactgtacgttaaaaccttatttggcagaaaaagacgtattcctgagattaagagcataaataaacaggtaaggaatgcctatgaaaggatagcaataaatgcgccaattcagggaacagctgctgatattataaaacttgccatgatagaaatttacaaggagattgaaaataaaaatctcaagtcaagaatactccttcaaattcatgatgagcttattcttgaagtgccagaggaggagatggaatttactcctttaatggcaaaggaaaaaatggaaaaggtggtagaactttcggttcctcttgtagttgaaatctcggtaggtaaaaatcttgctgaattaaaatgagctataagattggtcgac

SEQ ID NO: 1931 - DNA, 2673 bp, Artificial Sequence
  Description of Artificial Sequence: Synthetic DNA sequence of Dictyoglomus thermophilum DNA Y780N
atgaaatacctgctgccgaccgctgctgctggtctgctgctcctcgctgcccagccggcgatggccatggatatcggaattaattcggatccgaaatctctgtgggatctttttcaagaaaataccgagaaagagtccaaaaggaagattctgattattgatggctcaagcctcatatacagggtttattacgcccttccccctttaaagacaaaaaatggtgaattaactaatgctctttatggcttcataagaatacttttaaaggccgtagaagattttaatcctgatcttgtaggcgttgcctttgatagacctgaacctacttttaggcatgtgatttataaagagtataaggctaagagaccacctatgaaggatgatttgaaagcgcagataccatggataagagaatttctaaggttaaatgatatacctctattggaagagcctggctatgaagcggatgatataatagctactatagtgaataaatataaggatgatttaaaatatattctctctggagatttagatcttttgcaattagtctcggacaaaacctttctaatacatcctcaaaagggaattactgagtttactatttatgatccaaaagctgtaaaggataggtttggagtagagccctataagattcccttatacaaagtattagtaggggacgaatctgataatattccaggagtaaatggaataggtcctaaaaaggcctcaaagattcttgagaaaatttcaagtgtagatgaatttaaaagtaaaataaaagttttggatagtgatttaagggagcttattgagaaaaattggaatattattgaaagaaatttagaacttgttactttaaaaaatatagataaggatcttattcttaaacccttcgagattaaaagagatgaaaaagtaatagattttttgaagagatatgaacttaagagtattcttcaaaagttatttcctgatcttcaagaggaagaaaatatagagattaaagatgtcgaagagatcaattttaatgaggtagaaaaagaaggctactttgcctttaaatgtcttggagatagggcttttgagggtatttctctttccttcaaggagggggaaggatattttatatctccttttgatttcaataatgagataagaaagaagattgaaaatataatttcttcagagaatgttaaaaaaattggctcttatattcaaagagatttacattttttaaactgtaaaataaagggcgatgtatttgatgttagtctcgcatcttatcttttgaaccctgaaagacaaaatcactctcttgatattttgataggagagtatctaaataaaacctcttttattcctcaaaaatacgctggttatctttttccgttaaagtctattcttgaggagaggataaagaatgaagggttagaatttgtactttataacatagagattccattaatccctgtactttactccatggagaagtgggggataaaggtagataaggaatatttaaaacagctttctgatgaattctgcgagagaattaaaaaattggaagaagagatatatgaacttgcaggaaccagatttaatctcaattctccaaaacaactttctgaagttttatttgagaggttaaaacttccttctggtaagaaaggaaaaacaggatattctacgtcgtcttctgtgcttcaaaacttaataaatgctcatcctatagtgagaaaaatcctccaatatagagaactctataaattgaagagtacttatgtggatgctattcctaatctggttaatccacaaacaggtagagttcatacaaaatttaatcctacaggtacagctacaggaagaataagtagtagtgaacctaatcttcagaatattcctataaaaagtgaagaaggtagaaagataagaagagccttcgtgtcagaagatggatattttcttgtatctcttgattattctcagatagagctaaggattatggctcatctttctcaggagcctaaattaatatctgccttccaaaaaggagaggatattcatagaagaacagcatcggagatttttggagtgccagaggaagaagttgatgatcttttaaggtcaagggcaaaggccgttaattttggaattatttatggtatctcttcttttggactttctgagactgtaagtattacaccagaagaggcagagaaatttatagactcgtattttaagcactatccaagagtgaagctttttatagataagactattcatgaggcaagagaaaaactgtacgttaaaaccttatttggcagaaaaagaaatattcctgagattaagagcataaataaacaggtaaggaatgcctatgaaaggatagcaataaatgcgccaattcagggaacagctgctgatattataaaacttgccatgatagaaatttacaaggagattgaaaataaaaatctcaagtcaagaatactccttcaaattcatgatgagcttattcttgaagtgccagaggaggagatggaatttactcctttaatggcaaaggaaaaaatggaaaaggtggtagaactttcggttcctcttgtagttgaaatctcggtaggtaaaaatcttgctgaattaaaatgagctataagattggtcgac

SEQ ID NO: 1932 - DNA, 2673 bp, Artificial Sequence
  Description of Artificial Sequence: Synthetic DNA sequence of Dictyoglomus thermophilum DNA Y780D
atgaaatacctgctgccgaccgctgctgctggtctgctgctcctcgctgcccagccggcgatggccatggatatcggaattaattcggatccgaaatctctgtgggatctttttcaagaaaataccgagaaagagtccaaaaggaagattctgattattgatggctcaagcctcatatacagggtttattacgcccttccccctttaaagacaaaaaatggtgaattaactaatgctctttatggcttcataagaatacttttaaaggccgtagaagattttaatcctgatcttgtaggcgttgcctttgatagacctgaacctacttttaggcatgtgatttataaagagtataaggctaagagaccacctatgaaggatgatttgaaagcgcagataccatggataagagaatttctaaggttaaatgatatacctctattggaagagcctggctatgaagcggatgatataatagctactatagtgaataaatataaggatgatttaaaatatattctctctggagatttagatcttttgcaattagtctcggacaaaacctttctaatacatcctcaaaagggaattactgagtttactatttatgatccaaaagctgtaaaggataggtttggagtagagccctataagattcccttatacaaagtattagtaggggacgaatctgataatattccaggagtaaatggaataggtcctaaaaaggcctcaaagattcttgagaaaatttcaagtgtagatgaatttaaaagtaaaataaaagttttggatagtgatttaagggagcttattgagaaaaattggaatattattgaaagaaatttagaacttgttactttaaaaaatatagataaggatcttattcttaaacccttcgagattaaaagagatgaaaaagtaatagattttttgaagagatatgaacttaagagtattcttcaaaagttatttcctgatcttcaagaggaagaaaatatagagattaaagatgtcgaagagatcaattttaatgaggtagaaaaagaaggctactttgcctttaaatgtcttggagatagggcttttgagggtatttctctttccttcaaggagggggaaggatattttatatctccttttgatttcaataatgagataagaaagaagattgaaaatataatttcttcagagaatgttaaaaaaattggctcttatattcaaagagatttacattttttaaactgtaaaataaagggcgatgtatttgatgttagtctcgcatcttatcttttgaaccctgaaagacaaaatcactctcttgatattttgataggagagtatctaaataaaacctcttttattcctcaaaaatacgctggttatctttttccgttaaagtctattcttgaggagaggataaagaatgaagggttagaatttgtactttataacatagagattccattaatccctgtactttactccatggagaagtgggggataaaggtagataaggaatatttaaaacagctttctgatgaattctgcgagagaattaaaaaattggaagaagagatatatgaacttgcaggaaccagatttaatctcaattctccaaaacaactttctgaagttttatttgagaggttaaaacttccttctggtaagaaaggaaaaacaggatattctacgtcgtcttctgtgcttcaaaacttaataaatgctcatcctatagtgagaaaaatcctccaatatagagaactctataaattgaagagtacttatgtggatgctattcctaatctggttaatccacaaacaggtagagttcatacaaaatttaatcctacaggtacagctacaggaagaataagtagtagtgaacctaatcttcagaatattcctataaaaagtgaagaaggtagaaagataagaagagccttcgtgtcagaagatggatattttcttgtatctcttgattattctcagatagagctaaggattatggctcatctttctcaggagcctaaattaatatctgccttccaaaaaggagaggatattcatagaagaacagcatcggagatttttggagtgccagaggaagaagttgatgatcttttaaggtcaagggcaaaggccgttaattttggaattatttatggtatctcttcttttggactttctgagactgtaagtattacaccagaagaggcagagaaatttatagactcgtattttaagcactatccaagagtgaagctttttatagataagactattcatgaggcaagagaaaaactgtacgttaaaaccttatttggcagaaaaagagatattcctgagattaagagcataaataaacaggtaaggaatgcctatgaaaggatagcaataaatgcgccaattcagggaacagctgctgatattataaaacttgccatgatagaaatttacaaggagattgaaaataaaaatctcaagtcaagaatactccttcaaattcatgatgagcttattcttgaagtgccagaggaggagatggaatttactcctttaatggcaaaggaaaaaatggaaaaggtggtagaactttcggttcctcttgtagttgaaatctcggtaggtaaaaatcttgctgaattaaaatgagctataagattggtcgac

SEQ ID NO: 1933 - DNA, 2673 bp, Artificial Sequence
  Description of Artificial Sequence: Synthetic DNA sequence of Dictyoglomus thermophilum DNA Y780C
atgaaatacctgctgccgaccgctgctgctggtctgctgctcctcgctgcccagccggcgatggccatggatatcggaattaattcggatccgaaatctctgtgggatctttttcaagaaaataccgagaaagagtccaaaaggaagattctgattattgatggctcaagcctcatatacagggtttattacgcccttccccctttaaagacaaaaaatggtgaattaactaatgctctttatggcttcataagaatacttttaaaggccgtagaagattttaatcctgatcttgtaggcgttgcctttgatagacctgaacctacttttaggcatgtgatttataaagagtataaggctaagagaccacctatgaaggatgatttgaaagcgcagataccatggataagagaatttctaaggttaaatgatatacctctattggaagagcctggctatgaagcggatgatataatagctactatagtgaataaatataaggatgatttaaaatatattctctctggagatttagatcttttgcaattagtctcggacaaaacctttctaatacatcctcaaaagggaattactgagtttactatttatgatccaaaagctgtaaaggataggtttggagtagagccctataagattcccttatacaaagtattagtaggggacgaatctgataatattccaggagtaaatggaataggtcctaaaaaggcctcaaagattcttgagaaaatttcaagtgtagatgaatttaaaagtaaaataaaagttttggatagtgatttaagggagcttattgagaaaaattggaatattattgaaagaaatttagaacttgttactttaaaaaatatagataaggatcttattcttaaacccttcgagattaaaagagatgaaaaagtaatagattttttgaagagatatgaacttaagagtattcttcaaaagttatttcctgatcttcaagaggaagaaaatatagagattaaagatgtcgaagagatcaattttaatgaggtagaaaaagaaggctactttgcctttaaatgtcttggagatagggcttttgagggtatttctctttccttcaaggagggggaaggatattttatatctccttttgatttcaataatgagataagaaagaagattgaaaatataatttcttcagagaatgttaaaaaaattggctcttatattcaaagagatttacattttttaaactgtaaaataaagggcgatgtatttgatgttagtctcgcatcttatcttttgaaccctgaaagacaaaatcactctcttgatattttgataggagagtatctaaataaaacctcttttattcctcaaaaatacgctggttatctttttccgttaaagtctattcttgaggagaggataaagaatgaagggttagaatttgtactttataacatagagattccattaatccctgtactttactccatggagaagtgggggataaaggtagataaggaatatttaaaacagctttctgatgaattctgcgagagaattaaaaaattggaagaagagatatatgaacttgcaggaaccagatttaatctcaattctccaaaacaactttctgaagttttatttgagaggttaaaacttccttctggtaagaaaggaaaaacaggatattctacgtcgtcttctgtgcttcaaaacttaataaatgctcatcctatagtgagaaaaatcctccaatatagagaactctataaattgaagagtacttatgtggatgctattcctaatctggttaatccacaaacaggtagagttcatacaaaatttaatcctacaggtacagctacaggaagaataagtagtagtgaacctaatcttcagaatattcctataaaaagtgaagaaggtagaaagataagaagagccttcgtgtcagaagatggatattttcttgtatctcttgattattctcagatagagctaaggattatggctcatctttctcaggagcctaaattaatatctgccttccaaaaaggagaggatattcatagaagaacagcatcggagatttttggagtgccagaggaagaagttgatgatcttttaaggtcaagggcaaaggccgttaattttggaattatttatggtatctcttcttttggactttctgagactgtaagtattacaccagaagaggcagagaaatttatagactcgtattttaagcactatccaagagtgaagctttttatagataagactattcatgaggcaagagaaaaactgtacgttaaaaccttatttggcagaaaaagatgtattcctgagattaagagcataaataaacaggtaaggaatgcctatgaaaggatagcaataaatgcgccaattcagggaacagctgctgatattataaaacttgccatgatagaaatttacaaggagattgaaaataaaaatctcaagtcaagaatactccttcaaattcatgatgagcttattcttgaagtgccagaggaggagatggaatttactcctttaatggcaaaggaaaaaatggaaaaggtggtagaactttcggttcctcttgtagttgaaatctcggtaggtaaaaatcttgctgaattaaaatgagctataagattggtcgac

SEQ ID NO: 1934 - DNA, 2673 bp, Artificial Sequence
  Description of Artificial Sequence: Synthetic DNA sequence of Dictyoglomus thermophilum DNA Y780E
atgaaatacctgctgccgaccgctgctgctggtctgctgctcctcgctgcccagccggcgatggccatggatatcggaattaattcggatccgaaatctctgtgggatctttttcaagaaaataccgagaaagagtccaaaaggaagattctgattattgatggctcaagcctcatatacagggtttattacgcccttccccctttaaagacaaaaaatggtgaattaactaatgctctttatggcttcataagaatacttttaaaggccgtagaagattttaatcctgatcttgtaggcgttgcctttgatagacctgaacctacttttaggcatgtgatttataaagagtataaggctaagagaccacctatgaaggatgatttgaaagcgcagataccatggataagagaatttctaaggttaaatgatatacctctattggaagagcctggctatgaagcggatgatataatagctactatagtgaataaatataaggatgatttaaaatatattctctctggagatttagatcttttgcaattagtctcggacaaaacctttctaatacatcctcaaaagggaattactgagtttactatttatgatccaaaagctgtaaaggataggtttggagtagagccctataagattcccttatacaaagtattagtaggggacgaatctgataatattccaggagtaaatggaataggtcctaaaaaggcctcaaagattcttgagaaaatttcaagtgtagatgaatttaaaagtaaaataaaagttttggatagtgatttaagggagcttattgagaaaaattggaatattattgaaagaaatttagaacttgttactttaaaaaatatagataaggatcttattcttaaacccttcgagattaaaagagatgaaaaagtaatagattttttgaagagatatgaacttaagagtattcttcaaaagttatttcctgatcttcaagaggaagaaaatatagagattaaagatgtcgaagagatcaattttaatgaggtagaaaaagaaggctactttgcctttaaatgtcttggagatagggcttttgagggtatttctctttccttcaaggagggggaaggatattttatatctccttttgatttcaataatgagataagaaagaagattgaaaatataatttcttcagagaatgttaaaaaaattggctcttatattcaaagagatttacattttttaaactgtaaaataaagggcgatgtatttgatgttagtctcgcatcttatcttttgaaccctgaaagacaaaatcactctcttgatattttgataggagagtatctaaataaaacctcttttattcctcaaaaatacgctggttatctttttccgttaaagtctattcttgaggagaggataaagaatgaagggttagaatttgtactttataacatagagattccattaatccctgtactttactccatggagaagtgggggataaaggtagataaggaatatttaaaacagctttctgatgaattctgcgagagaattaaaaaattggaagaagagatatatgaacttgcaggaaccagatttaatctcaattctccaaaacaactttctgaagttttatttgagaggttaaaacttccttctggtaagaaaggaaaaacaggatattctacgtcgtcttctgtgcttcaaaacttaataaatgctcatcctatagtgagaaaaatcctccaatatagagaactctataaattgaagagtacttatgtggatgctattcctaatctggttaatccacaaacaggtagagttcatacaaaatttaatcctacaggtacagctacaggaagaataagtagtagtgaacctaatcttcagaatattcctataaaaagtgaagaaggtagaaagataagaagagccttcgtgtcagaagatggatattttcttgtatctcttgattattctcagatagagctaaggattatggctcatctttctcaggagcctaaattaatatctgccttccaaaaaggagaggatattcatagaagaacagcatcggagatttttggagtgccagaggaagaagttgatgatcttttaaggtcaagggcaaaggccgttaattttggaattatttatggtatctcttcttttggactttctgagactgtaagtattacaccagaagaggcagagaaatttatagactcgtattttaagcactatccaagagtgaagctttttatagataagactattcatgaggcaagagaaaaactgtacgttaaaaccttatttggcagaaaaagagaaattcctgagattaagagcataaataaacaggtaaggaatgcctatgaaaggatagcaataaatgcgccaattcagggaacagctgctgatattataaaacttgccatgatagaaatttacaaggagattgaaaataaaaatctcaagtcaagaatactccttcaaattcatgatgagcttattcttgaagtgccagaggaggagatggaatttactcctttaatggcaaaggaaaaaatggaaaaggtggtagaactttcggttcctcttgtagttgaaatctcggtaggtaaaaatcttgctgaattaaaatgagctataagattggtcgac

SEQ ID NO: 1935 - DNA, 2673 bp, Artificial Sequence
  Description of Artificial Sequence: Synthetic DNA sequence of Dictyoglomus thermophilum DNA Y780Q
atgaaatacctgctgccgaccgctgctgctggtctgctgctcctcgctgcccagccggcgatggccatggatatcggaattaattcggatccgaaatctctgtgggatctttttcaagaaaataccgagaaagagtccaaaaggaagattctgattattgatggctcaagcctcatatacagggtttattacgcccttccccctttaaagacaaaaaatggtgaattaactaatgctctttatggcttcataagaatacttttaaaggccgtagaagattttaatcctgatcttgtaggcgttgcctttgatagacctgaacctacttttaggcatgtgatttataaagagtataaggctaagagaccacctatgaaggatgatttgaaagcgcagataccatggataagagaatttctaaggttaaatgatatacctctattggaagagcctggctatgaagcggatgatataatagctactatagtgaataaatataaggatgatttaaaatatattctctctggagatttagatcttttgcaattagtctcggacaaaacctttctaatacatcctcaaaagggaattactgagtttactatttatgatccaaaagctgtaaaggataggtttggagtagagccctataagattcccttatacaaagtattagtaggggacgaatctgataatattccaggagtaaatggaataggtcctaaaaaggcctcaaagattcttgagaaaatttcaagtgtagatgaatttaaaagtaaaataaaagttttggatagtgatttaagggagcttattgagaaaaattggaatattattgaaagaaatttagaacttgttactttaaaaaatatagataaggatcttattcttaaacccttcgagattaaaagagatgaaaaagtaatagattttttgaagagatatgaacttaagagtattcttcaaaagttatttcctgatcttcaagaggaagaaaatatagagattaaagatgtcgaagagatcaattttaatgaggtagaaaaagaaggctactttgcctttaaatgtcttggagatagggcttttgagggtatttctctttccttcaaggagggggaaggatattttatatctccttttgatttcaataatgagataagaaagaagattgaaaatataatttcttcagagaatgttaaaaaaattggctcttatattcaaagagatttacattttttaaactgtaaaataaagggcgatgtatttgatgttagtctcgcatcttatcttttgaaccctgaaagacaaaatcactctcttgatattttgataggagagtatctaaataaaacctcttttattcctcaaaaatacgctggttatctttttccgttaaagtctattcttgaggagaggataaagaatgaagggttagaatttgtactttataacatagagattccattaatccctgtactttactccatggagaagtgggggataaaggtagataaggaatatttaaaacagctttctgatgaattctgcgagagaattaaaaaattggaagaagagatatatgaacttgcaggaaccagatttaatctcaattctccaaaacaactttctgaagttttatttgagaggttaaaacttccttctggtaagaaaggaaaaacaggatattctacgtcgtcttctgtgcttcaaaacttaataaatgctcatcctatagtgagaaaaatcctccaatatagagaactctataaattgaagagtacttatgtggatgctattcctaatctggttaatccacaaacaggtagagttcatacaaaatttaatcctacaggtacagctacaggaagaataagtagtagtgaacctaatcttcagaatattcctataaaaagtgaagaaggtagaaagataagaagagccttcgtgtcagaagatggatattttcttgtatctcttgattattctcagatagagctaaggattatggctcatctttctcaggagcctaaattaatatctgccttccaaaaaggagaggatattcatagaagaacagcatcggagatttttggagtgccagaggaagaagttgatgatcttttaaggtcaagggcaaaggccgttaattttggaattatttatggtatctcttcttttggactttctgagactgtaagtattacaccagaagaggcagagaaatttatagactcgtattttaagcactatccaagagtgaagctttttatagataagactattcatgaggcaagagaaaaactgtacgttaaaaccttatttggcagaaaaagacaaattcctgagattaagagcataaataaacaggtaaggaatgcctatgaaaggatagcaataaatgcgccaattcagggaacagctgctgatattataaaacttgccatgatagaaatttacaaggagattgaaaataaaaatctcaagtcaagaatactccttcaaattcatgatgagcttattcttgaagtgccagaggaggagatggaatttactcctttaatggcaaaggaaaaaatggaaaaggtggtagaactttcggttcctcttgtagttgaaatctcggtaggtaaaaatcttgctgaattaaaatgagctataagattggtcgac

SEQ ID NO: 1936 - DNA, 2673 bp, Artificial Sequence
  Description of Artificial Sequence: Synthetic DNA sequence of Dictyoglomus thermophilum DNA Y780G
atgaaatacctgctgccgaccgctgctgctggtctgctgctcctcgctgcccagccggcgatggccatggatatcggaattaattcggatccgaaatctctgtgggatctttttcaagaaaataccgagaaagagtccaaaaggaagattctgattattgatggctcaagcctcatatacagggtttattacgcccttccccctttaaagacaaaaaatggtgaattaactaatgctctttatggcttcataagaatacttttaaaggccgtagaagattttaatcctgatcttgtaggcgttgcctttgatagacctgaacctacttttaggcatgtgatttataaagagtataaggctaagagaccacctatgaaggatgatttgaaagcgcagataccatggataagagaatttctaaggttaaatgatatacctctattggaagagcctggctatgaagcggatgatataatagctactatagtgaataaatataaggatgatttaaaatatattctctctggagatttagatcttttgcaattagtctcggacaaaacctttctaatacatcctcaaaagggaattactgagtttactatttatgatccaaaagctgtaaaggataggtttggagtagagccctataagattcccttatacaaagtattagtaggggacgaatctgataatattccaggagtaaatggaataggtcctaaaaaggcctcaaagattcttgagaaaatttcaagtgtagatgaatttaaaagtaaaataaaagttttggatagtgatttaagggagcttattgagaaaaattggaatattattgaaagaaatttagaacttgttactttaaaaaatatagataaggatcttattcttaaacccttcgagattaaaagagatgaaaaagtaatagattttttgaagagatatgaacttaagagtattcttcaaaagttatttcctgatcttcaagaggaagaaaatatagagattaaagatgtcgaagagatcaattttaatgaggtagaaaaagaaggctactttgcctttaaatgtcttggagatagggcttttgagggtatttctctttccttcaaggagggggaaggatattttatatctccttttgatttcaataatgagataagaaagaagattgaaaatataatttcttcagagaatgttaaaaaaattggctcttatattcaaagagatttacattttttaaactgtaaaataaagggcgatgtatttgatgttagtctcgcatcttatcttttgaaccctgaaagacaaaatcactctcttgatattttgataggagagtatctaaataaaacctcttttattcctcaaaaatacgctggttatctttttccgttaaagtctattcttgaggagaggataaagaatgaagggttagaatttgtactttataacatagagattccattaatccctgtactttactccatggagaagtgggggataaaggtagataaggaatatttaaaacagctttctgatgaattctgcgagagaattaaaaaattggaagaagagatatatgaacttgcaggaaccagatttaatctcaattctccaaaacaactttctgaagttttatttgagaggttaaaacttccttctggtaagaaaggaaaaacaggatattctacgtcgtcttctgtgcttcaaaacttaataaatgctcatcctatagtgagaaaaatcctccaatatagagaactctataaattgaagagtacttatgtggatgctattcctaatctggttaatccacaaacaggtagagttcatacaaaatttaatcctacaggtacagctacaggaagaataagtagtagtgaacctaatcttcagaatattcctataaaaagtgaagaaggtagaaagataagaagagccttcgtgtcagaagatggatattttcttgtatctcttgattattctcagatagagctaaggattatggctcatctttctcaggagcctaaattaatatctgccttccaaaaaggagaggatattcatagaagaacagcatcggagatttttggagtgccagaggaagaagttgatgatcttttaaggtcaagggcaaaggccgttaattttggaattatttatggtatctcttcttttggactttctgagactgtaagtattacaccagaagaggcagagaaatttatagactcgtattttaagcactatccaagagtgaagctttttatagataagactattcatgaggcaagagaaaaactgtacgttaaaaccttatttggcagaaaaagaggtattcctgagattaagagcataaataaacaggtaaggaatgcctatgaaaggatagcaataaatgcgccaattcagggaacagctgctgatattataaaacttgccatgatagaaatttacaaggagattgaaaataaaaatctcaagtcaagaatactccttcaaattcatgatgagcttattcttgaagtgccagaggaggagatggaatttactcctttaatggcaaaggaaaaaatggaaaaggtggtagaactttcggttcctcttgtagttgaaatctcggtaggtaaaaatcttgctgaattaaaatgagctataagattggtcgac

SEQ ID NO: 1937 - DNA, 2673 bp, Artificial Sequence
  Description of Artificial Sequence: Synthetic DNA sequence of Dictyoglomus thermophilum DNA Y780H
atgaaatacctgctgccgaccgctgctgctggtctgctgctcctcgctgcccagccggcgatggccatggatatcggaattaattcggatccgaaatctctgtgggatctttttcaagaaaataccgagaaagagtccaaaaggaagattctgattattgatggctcaagcctcatatacagggtttattacgcccttccccctttaaagacaaaaaatggtgaattaactaatgctctttatggcttcataagaatacttttaaaggccgtagaagattttaatcctgatcttgtaggcgttgcctttgatagacctgaacctacttttaggcatgtgatttataaagagtataaggctaagagaccacctatgaaggatgatttgaaagcgcagataccatggataagagaatttctaaggttaaatgatatacctctattggaagagcctggctatgaagcggatgatataatagctactatagtgaataaatataaggatgatttaaaatatattctctctggagatttagatcttttgcaattagtctcggacaaaacctttctaatacatcctcaaaagggaattactgagtttactatttatgatccaaaagctgtaaaggataggtttggagtagagccctataagattcccttatacaaagtattagtaggggacgaatctgataatattccaggagtaaatggaataggtcctaaaaaggcctcaaagattcttgagaaaatttcaagtgtagatgaatttaaaagtaaaataaaagttttggatagtgatttaagggagcttattgagaaaaattggaatattattgaaagaaatttagaacttgttactttaaaaaatatagataaggatcttattcttaaacccttcgagattaaaagagatgaaaaagtaatagattttttgaagagatatgaacttaagagtattcttcaaaagttatttcctgatcttcaagaggaagaaaatatagagattaaagatgtcgaagagatcaattttaatgaggtagaaaaagaaggctactttgcctttaaatgtcttggagatagggcttttgagggtatttctctttccttcaaggagggggaaggatattttatatctccttttgatttcaataatgagataagaaagaagattgaaaatataatttcttcagagaatgttaaaaaaattggctcttatattcaaagagatttacattttttaaactgtaaaataaagggcgatgtatttgatgttagtctcgcatcttatcttttgaaccctgaaagacaaaatcactctcttgatattttgataggagagtatctaaataaaacctcttttattcctcaaaaatacgctggttatctttttccgttaaagtctattcttgaggagaggataaagaatgaagggttagaatttgtactttataacatagagattccattaatccctgtactttactccatggagaagtgggggataaaggtagataaggaatatttaaaacagctttctgatgaattctgcgagagaattaaaaaattggaagaagagatatatgaacttgcaggaaccagatttaatctcaattctccaaaacaactttctgaagttttatttgagaggttaaaacttccttctggtaagaaaggaaaaacaggatattctacgtcgtcttctgtgcttcaaaacttaataaatgctcatcctatagtgagaaaaatcctccaatatagagaactctataaattgaagagtacttatgtggatgctattcctaatctggttaatccacaaacaggtagagttcatacaaaatttaatcctacaggtacagctacaggaagaataagtagtagtgaacctaatcttcagaatattcctataaaaagtgaagaaggtagaaagataagaagagccttcgtgtcagaagatggatattttcttgtatctcttgattattctcagatagagctaaggattatggctcatctttctcaggagcctaaattaatatctgccttccaaaaaggagaggatattcatagaagaacagcatcggagatttttggagtgccagaggaagaagttgatgatcttttaaggtcaagggcaaaggccgttaattttggaattatttatggtatctcttcttttggactttctgagactgtaagtattacaccagaagaggcagagaaatttatagactcgtattttaagcactatccaagagtgaagctttttatagataagactattcatgaggcaagagaaaaactgtacgttaaaaccttatttggcagaaaaagacatattcctgagattaagagcataaataaacaggtaaggaatgcctatgaaaggatagcaataaatgcgccaattcagggaacagctgctgatattataaaacttgccatgatagaaatttacaaggagattgaaaataaaaatctcaagtcaagaatactccttcaaattcatgatgagcttattcttgaagtgccagaggaggagatggaatttactcctttaatggcaaaggaaaaaatggaaaaggtggtagaactttcggttcctcttgtagttgaaatctcggtaggtaaaaatcttgctgaattaaaatgagctataagattggtcgac

SEQ ID NO: 1938 - DNA, 2673 bp, Artificial Sequence
  Description of Artificial Sequence: Synthetic DNA sequence of Dictyoglomus thermophilum DNA Y780I
atgaaatacctgctgccgaccgctgctgctggtctgctgctcctcgctgcccagccggcgatggccatggatatcggaattaattcggatccgaaatctctgtgggatctttttcaagaaaataccgagaaagagtccaaaaggaagattctgattattgatggctcaagcctcatatacagggtttattacgcccttccccctttaaagacaaaaaatggtgaattaactaatgctctttatggcttcataagaatacttttaaaggccgtagaagattttaatcctgatcttgtaggcgttgcctttgatagacctgaacctacttttaggcatgtgatttataaagagtataaggctaagagaccacctatgaaggatgatttgaaagcgcagataccatggataagagaatttctaaggttaaatgatatacctctattggaagagcctggctatgaagcggatgatataatagctactatagtgaataaatataaggatgatttaaaatatattctctctggagatttagatcttttgcaattagtctcggacaaaacctttctaatacatcctcaaaagggaattactgagtttactatttatgatccaaaagctgtaaaggataggtttggagtagagccctataagattcccttatacaaagtattagtaggggacgaatctgataatattccaggagtaaatggaataggtcctaaaaaggcctcaaagattcttgagaaaatttcaagtgtagatgaatttaaaagtaaaataaaagttttggatagtgatttaagggagcttattgagaaaaattggaatattattgaaagaaatttagaacttgttactttaaaaaatatagataaggatcttattcttaaacccttcgagattaaaagagatgaaaaagtaatagattttttgaagagatatgaacttaagagtattcttcaaaagttatttcctgatcttcaagaggaagaaaatatagagattaaagatgtcgaagagatcaattttaatgaggtagaaaaagaaggctactttgcctttaaatgtcttggagatagggcttttgagggtatttctctttccttcaaggagggggaaggatattttatatctccttttgatttcaataatgagataagaaagaagattgaaaatataatttcttcagagaatgttaaaaaaattggctcttatattcaaagagatttacattttttaaactgtaaaataaagggcgatgtatttgatgttagtctcgcatcttatcttttgaaccctgaaagacaaaatcactctcttgatattttgataggagagtatctaaataaaacctcttttattcctcaaaaatacgctggttatctttttccgttaaagtctattcttgaggagaggataaagaatgaagggttagaatttgtactttataacatagagattccattaatccctgtactttactccatggagaagtgggggataaaggtagataaggaatatttaaaacagctttctgatgaattctgcgagagaattaaaaaattggaagaagagatatatgaacttgcaggaaccagatttaatctcaattctccaaaacaactttctgaagttttatttgagaggttaaaacttccttctggtaagaaaggaaaaacaggatattctacgtcgtcttctgtgcttcaaaacttaataaatgctcatcctatagtgagaaaaatcctccaatatagagaactctataaattgaagagtacttatgtggatgctattcctaatctggttaatccacaaacaggtagagttcatacaaaatttaatcctacaggtacagctacaggaagaataagtagtagtgaacctaatcttcagaatattcctataaaaagtgaagaaggtagaaagataagaagagccttcgtgtcagaagatggatattttcttgtatctcttgattattctcagatagagctaaggattatggctcatctttctcaggagcctaaattaatatctgccttccaaaaaggagaggatattcatagaagaacagcatcggagatttttggagtgccagaggaagaagttgatgatcttttaaggtcaagggcaaaggccgttaattttggaattatttatggtatctcttcttttggactttctgagactgtaagtattacaccagaagaggcagagaaatttatagactcgtattttaagcactatccaagagtgaagctttttatagataagactattcatgaggcaagagaaaaactgtacgttaaaaccttatttggcagaaaaagaattattcctgagattaagagcataaataaacaggtaaggaatgcctatgaaaggatagcaataaatgcgccaattcagggaacagctgctgatattataaaacttgccatgatagaaatttacaaggagattgaaaataaaaatctcaagtcaagaatactccttcaaattcatgatgagcttattcttgaagtgccagaggaggagatggaatttactcctttaatggcaaaggaaaaaatggaaaaggtggtagaactttcggttcctcttgtagttgaaatctcggtaggtaaaaatcttgctgaattaaaatgagctataagattggtcgac

SEQ ID NO: 1939 - DNA, 2673 bp, Artificial Sequence
  Description of Artificial Sequence: Synthetic DNA sequence of Dictyoglomus thermophilum DNA Y780L
atgaaatacctgctgccgaccgctgctgctggtctgctgctcctcgctgcccagccggcgatggccatggatatcggaattaattcggatccgaaatctctgtgggatctttttcaagaaaataccgagaaagagtccaaaaggaagattctgattattgatggctcaagcctcatatacagggtttattacgcccttccccctttaaagacaaaaaatggtgaattaactaatgctctttatggcttcataagaatacttttaaaggccgtagaagattttaatcctgatcttgtaggcgttgcctttgatagacctgaacctacttttaggcatgtgatttataaagagtataaggctaagagaccacctatgaaggatgatttgaaagcgcagataccatggataagagaatttctaaggttaaatgatatacctctattggaagagcctggctatgaagcggatgatataatagctactatagtgaataaatataaggatgatttaaaatatattctctctggagatttagatcttttgcaattagtctcggacaaaacctttctaatacatcctcaaaagggaattactgagtttactatttatgatccaaaagctgtaaaggataggtttggagtagagccctataagattcccttatacaaagtattagtaggggacgaatctgataatattccaggagtaaatggaataggtcctaaaaaggcctcaaagattcttgagaaaatttcaagtgtagatgaatttaaaagtaaaataaaagttttggatagtgatttaagggagcttattgagaaaaattggaatattattgaaagaaatttagaacttgttactttaaaaaatatagataaggatcttattcttaaacccttcgagattaaaagagatgaaaaagtaatagattttttgaagagatatgaacttaagagtattcttcaaaagttatttcctgatcttcaagaggaagaaaatatagagattaaagatgtcgaagagatcaattttaatgaggtagaaaaagaaggctactttgcctttaaatgtcttggagatagggcttttgagggtatttctctttccttcaaggagggggaaggatattttatatctccttttgatttcaataatgagataagaaagaagattgaaaatataatttcttcagagaatgttaaaaaaattggctcttatattcaaagagatttacattttttaaactgtaaaataaagggcgatgtatttgatgttagtctcgcatcttatcttttgaaccctgaaagacaaaatcactctcttgatattttgataggagagtatctaaataaaacctcttttattcctcaaaaatacgctggttatctttttccgttaaagtctattcttgaggagaggataaagaatgaagggttagaatttgtactttataacatagagattccattaatccctgtactttactccatggagaagtgggggataaaggtagataaggaatatttaaaacagctttctgatgaattctgcgagagaattaaaaaattggaagaagagatatatgaacttgcaggaaccagatttaatctcaattctccaaaacaactttctgaagttttatttgagaggttaaaacttccttctggtaagaaaggaaaaacaggatattctacgtcgtcttctgtgcttcaaaacttaataaatgctcatcctatagtgagaaaaatcctccaatatagagaactctataaattgaagagtacttatgtggatgctattcctaatctggttaatccacaaacaggtagagttcatacaaaatttaatcctacaggtacagctacaggaagaataagtagtagtgaacctaatcttcagaatattcctataaaaagtgaagaaggtagaaagataagaagagccttcgtgtcagaagatggatattttcttgtatctcttgattattctcagatagagctaaggattatggctcatctttctcaggagcctaaattaatatctgccttccaaaaaggagaggatattcatagaagaacagcatcggagatttttggagtgccagaggaagaagttgatgatcttttaaggtcaagggcaaaggccgttaattttggaattatttatggtatctcttcttttggactttctgagactgtaagtattacaccagaagaggcagagaaatttatagactcgtattttaagcactatccaagagtgaagctttttatagataagactattcatgaggcaagagaaaaactgtacgttaaaaccttatttggcagaaaaagacttattcctgagattaagagcataaataaacaggtaaggaatgcctatgaaaggatagcaataaatgcgccaattcagggaacagctgctgatattataaaacttgccatgatagaaatttacaaggagattgaaaataaaaatctcaagtcaagaatactccttcaaattcatgatgagcttattcttgaagtgccagaggaggagatggaatttactcctttaatggcaaaggaaaaaatggaaaaggtggtagaactttcggttcctcttgtagttgaaatctcggtaggtaaaaatcttgctgaattaaaatgagctataagattggtcgac

SEQ ID NO: 1940 - DNA, 2673 bp, Artificial Sequence
  Description of Artificial Sequence: Synthetic DNA sequence of Dictyoglomus thermophilum DNA Y780K
atgaaatacctgctgccgaccgctgctgctggtctgctgctcctcgctgcccagccggcgatggccatggatatcggaattaattcggatccgaaatctctgtgggatctttttcaagaaaataccgagaaagagtccaaaaggaagattctgattattgatggctcaagcctcatatacagggtttattacgcccttccccctttaaagacaaaaaatggtgaattaactaatgctctttatggcttcataagaatacttttaaaggccgtagaagattttaatcctgatcttgtaggcgttgcctttgatagacctgaacctacttttaggcatgtgatttataaagagtataaggctaagagaccacctatgaaggatgatttgaaagcgcagataccatggataagagaatttctaaggttaaatgatatacctctattggaagagcctggctatgaagcggatgatataatagctactatagtgaataaatataaggatgatttaaaatatattctctctggagatttagatcttttgcaattagtctcggacaaaacctttctaatacatcctcaaaagggaattactgagtttactatttatgatccaaaagctgtaaaggataggtttggagtagagccctataagattcccttatacaaagtattagtaggggacgaatctgataatattccaggagtaaatggaataggtcctaaaaaggcctcaaagattcttgagaaaatttcaagtgtagatgaatttaaaagtaaaataaaagttttggatagtgatttaagggagcttattgagaaaaattggaatattattgaaagaaatttagaacttgttactttaaaaaatatagataaggatcttattcttaaacccttcgagattaaaagagatgaaaaagtaatagattttttgaagagatatgaacttaagagtattcttcaaaagttatttcctgatcttcaagaggaagaaaatatagagattaaagatgtcgaagagatcaattttaatgaggtagaaaaagaaggctactttgcctttaaatgtcttggagatagggcttttgagggtatttctctttccttcaaggagggggaaggatattttatatctccttttgatttcaataatgagataagaaagaagattgaaaatataatttcttcagagaatgttaaaaaaattggctcttatattcaaagagatttacattttttaaactgtaaaataaagggcgatgtatttgatgttagtctcgcatcttatcttttgaaccctgaaagacaaaatcactctcttgatattttgataggagagtatctaaataaaacctcttttattcctcaaaaatacgctggttatctttttccgttaaagtctattcttgaggagaggataaagaatgaagggttagaatttgtactttataacatagagattccattaatccctgtactttactccatggagaagtgggggataaaggtagataaggaatatttaaaacagctttctgatgaattctgcgagagaattaaaaaattggaagaagagatatatgaacttgcaggaaccagatttaatctcaattctccaaaacaactttctgaagttttatttgagaggttaaaacttccttctggtaagaaaggaaaaacaggatattctacgtcgtcttctgtgcttcaaaacttaataaatgctcatcctatagtgagaaaaatcctccaatatagagaactctataaattgaagagtacttatgtggatgctattcctaatctggttaatccacaaacaggtagagttcatacaaaatttaatcctacaggtacagctacaggaagaataagtagtagtgaacctaatcttcagaatattcctataaaaagtgaagaaggtagaaagataagaagagccttcgtgtcagaagatggatattttcttgtatctcttgattattctcagatagagctaaggattatggctcatctttctcaggagcctaaattaatatctgccttccaaaaaggagaggatattcatagaagaacagcatcggagatttttggagtgccagaggaagaagttgatgatcttttaaggtcaagggcaaaggccgttaattttggaattatttatggtatctcttcttttggactttctgagactgtaagtattacaccagaagaggcagagaaatttatagactcgtattttaagcactatccaagagtgaagctttttatagataagactattcatgaggcaagagaaaaactgtacgttaaaaccttatttggcagaaaaagaaaaattcctgagattaagagcataaataaacaggtaaggaatgcctatgaaaggatagcaataaatgcgccaattcagggaacagctgctgatattataaaacttgccatgatagaaatttacaaggagattgaaaataaaaatctcaagtcaagaatactccttcaaattcatgatgagcttattcttgaagtgccagaggaggagatggaatttactcctttaatggcaaaggaaaaaatggaaaaggtggtagaactttcggttcctcttgtagttgaaatctcggtaggtaaaaatcttgctgaattaaaatgagctataagattggtcgac

SEQ ID NO: 1941 - DNA, 2673 bp, Artificial Sequence
  Description of Artificial Sequence: Synthetic DNA sequence of Dictyoglomus thermophilum DNA Y780M
atgaaatacctgctgccgaccgctgctgctggtctgctgctcctcgctgcccagccggcgatggccatggatatcggaattaattcggatccgaaatctctgtgggatctttttcaagaaaataccgagaaagagtccaaaaggaagattctgattattgatggctcaagcctcatatacagggtttattacgcccttccccctttaaagacaaaaaatggtgaattaactaatgctctttatggcttcataagaatacttttaaaggccgtagaagattttaatcctgatcttgtaggcgttgcctttgatagacctgaacctacttttaggcatgtgatttataaagagtataaggctaagagaccacctatgaaggatgatttgaaagcgcagataccatggataagagaatttctaaggttaaatgatatacctctattggaagagcctggctatgaagcggatgatataatagctactatagtgaataaatataaggatgatttaaaatatattctctctggagatttagatcttttgcaattagtctcggacaaaacctttctaatacatcctcaaaagggaattactgagtttactatttatgatccaaaagctgtaaaggataggtttggagtagagccctataagattcccttatacaaagtattagtaggggacgaatctgataatattccaggagtaaatggaataggtcctaaaaaggcctcaaagattcttgagaaaatttcaagtgtagatgaatttaaaagtaaaataaaagttttggatagtgatttaagggagcttattgagaaaaattggaatattattgaaagaaatttagaacttgttactttaaaaaatatagataaggatcttattcttaaacccttcgagattaaaagagatgaaaaagtaatagattttttgaagagatatgaacttaagagtattcttcaaaagttatttcctgatcttcaagaggaagaaaatatagagattaaagatgtcgaagagatcaattttaatgaggtagaaaaagaaggctactttgcctttaaatgtcttggagatagggcttttgagggtatttctctttccttcaaggagggggaaggatattttatatctccttttgatttcaataatgagataagaaagaagattgaaaatataatttcttcagagaatgttaaaaaaattggctcttatattcaaagagatttacattttttaaactgtaaaataaagggcgatgtatttgatgttagtctcgcatcttatcttttgaaccctgaaagacaaaatcactctcttgatattttgataggagagtatctaaataaaacctcttttattcctcaaaaatacgctggttatctttttccgttaaagtctattcttgaggagaggataaagaatgaagggttagaatttgtactttataacatagagattccattaatccctgtactttactccatggagaagtgggggataaaggtagataaggaatatttaaaacagctttctgatgaattctgcgagagaattaaaaaattggaagaagagatatatgaacttgcaggaaccagatttaatctcaattctccaaaacaactttctgaagttttatttgagaggttaaaacttccttctggtaagaaaggaaaaacaggatattctacgtcgtcttctgtgcttcaaaacttaataaatgctcatcctatagtgagaaaaatcctccaatatagagaactctataaattgaagagtacttatgtggatgctattcctaatctggttaatccacaaacaggtagagttcatacaaaatttaatcctacaggtacagctacaggaagaataagtagtagtgaacctaatcttcagaatattcctataaaaagtgaagaaggtagaaagataagaagagccttcgtgtcagaagatggatattttcttgtatctcttgattattctcagatagagctaaggattatggctcatctttctcaggagcctaaattaatatctgccttccaaaaaggagaggatattcatagaagaacagcatcggagatttttggagtgccagaggaagaagttgatgatcttttaaggtcaagggcaaaggccgttaattttggaattatttatggtatctcttcttttggactttctgagactgtaagtattacaccagaagaggcagagaaatttatagactcgtattttaagcactatccaagagtgaagctttttatagataagactattcatgaggcaagagaaaaactgtacgttaaaaccttatttggcagaaaaagaatgattcctgagattaagagcataaataaacaggtaaggaatgcctatgaaaggatagcaataaatgcgccaattcagggaacagctgctgatattataaaacttgccatgatagaaatttacaaggagattgaaaataaaaatctcaagtcaagaatactccttcaaattcatgatgagcttattcttgaagtgccagaggaggagatggaatttactcctttaatggcaaaggaaaaaatggaaaaggtggtagaactttcggttcctcttgtagttgaaatctcggtaggtaaaaatcttgctgaattaaaatgagctataagattggtcgac

SEQ ID NO: 1942 - DNA, 2673 bp, Artificial Sequence
  Description of Artificial Sequence: Synthetic DNA sequence of Dictyoglomus thermophilum DNA Y780F
atgaaatacctgctgccgaccgctgctgctggtctgctgctcctcgctgcccagccggcgatggccatggatatcggaattaattcggatccgaaatctctgtgggatctttttcaagaaaataccgagaaagagtccaaaaggaagattctgattattgatggctcaagcctcatatacagggtttattacgcccttccccctttaaagacaaaaaatggtgaattaactaatgctctttatggcttcataagaatacttttaaaggccgtagaagattttaatcctgatcttgtaggcgttgcctttgatagacctgaacctacttttaggcatgtgatttataaagagtataaggctaagagaccacctatgaaggatgatttgaaagcgcagataccatggataagagaatttctaaggttaaatgatatacctctattggaagagcctggctatgaagcggatgatataatagctactatagtgaataaatataaggatgatttaaaatatattctctctggagatttagatcttttgcaattagtctcggacaaaacctttctaatacatcctcaaaagggaattactgagtttactatttatgatccaaaagctgtaaaggataggtttggagtagagccctataagattcccttatacaaagtattagtaggggacgaatctgataatattccaggagtaaatggaataggtcctaaaaaggcctcaaagattcttgagaaaatttcaagtgtagatgaatttaaaagtaaaataaaagttttggatagtgatttaagggagcttattgagaaaaattggaatattattgaaagaaatttagaacttgttactttaaaaaatatagataaggatcttattcttaaacccttcgagattaaaagagatgaaaaagtaatagattttttgaagagatatgaacttaagagtattcttcaaaagttatttcctgatcttcaagaggaagaaaatatagagattaaagatgtcgaagagatcaattttaatgaggtagaaaaagaaggctactttgcctttaaatgtcttggagatagggcttttgagggtatttctctttccttcaaggagggggaaggatattttatatctccttttgatttcaataatgagataagaaagaagattgaaaatataatttcttcagagaatgttaaaaaaattggctcttatattcaaagagatttacattttttaaactgtaaaataaagggcgatgtatttgatgttagtctcgcatcttatcttttgaaccctgaaagacaaaatcactctcttgatattttgataggagagtatctaaataaaacctcttttattcctcaaaaatacgctggttatctttttccgttaaagtctattcttgaggagaggataaagaatgaagggttagaatttgtactttataacatagagattccattaatccctgtactttactccatggagaagtgggggataaaggtagataaggaatatttaaaacagctttctgatgaattctgcgagagaattaaaaaattggaagaagagatatatgaacttgcaggaaccagatttaatctcaattctccaaaacaactttctgaagttttatttgagaggttaaaacttccttctggtaagaaaggaaaaacaggatattctacgtcgtcttctgtgcttcaaaacttaataaatgctcatcctatagtgagaaaaatcctccaatatagagaactctataaattgaagagtacttatgtggatgctattcctaatctggttaatccacaaacaggtagagttcatacaaaatttaatcctacaggtacagctacaggaagaataagtagtagtgaacctaatcttcagaatattcctataaaaagtgaagaaggtagaaagataagaagagccttcgtgtcagaagatggatattttcttgtatctcttgattattctcagatagagctaaggattatggctcatctttctcaggagcctaaattaatatctgccttccaaaaaggagaggatattcatagaagaacagcatcggagatttttggagtgccagaggaagaagttgatgatcttttaaggtcaagggcaaaggccgttaattttggaattatttatggtatctcttcttttggactttctgagactgtaagtattacaccagaagaggcagagaaatttatagactcgtattttaagcactatccaagagtgaagctttttatagataagactattcatgaggcaagagaaaaactgtacgttaaaaccttatttggcagaaaaagatttattcctgagattaagagcataaataaacaggtaaggaatgcctatgaaaggatagcaataaatgcgccaattcagggaacagctgctgatattataaaacttgccatgatagaaatttacaaggagattgaaaataaaaatctcaagtcaagaatactccttcaaattcatgatgagcttattcttgaagtgccagaggaggagatggaatttactcctttaatggcaaaggaaaaaatggaaaaggtggtagaactttcggttcctcttgtagttgaaatctcggtaggtaaaaatcttgctgaattaaaatgagctataagattggtcgac

SEQ ID NO: 1943 - DNA, 2673 bp, Artificial Sequence
  Description of Artificial Sequence: Synthetic DNA sequence of Dictyoglomus thermophilum DNA Y780P
atgaaatacctgctgccgaccgctgctgctggtctgctgctcctcgctgcccagccggcgatggccatggatatcggaattaattcggatccgaaatctctgtgggatctttttcaagaaaataccgagaaagagtccaaaaggaagattctgattattgatggctcaagcctcatatacagggtttattacgcccttccccctttaaagacaaaaaatggtgaattaactaatgctctttatggcttcataagaatacttttaaaggccgtagaagattttaatcctgatcttgtaggcgttgcctttgatagacctgaacctacttttaggcatgtgatttataaagagtataaggctaagagaccacctatgaaggatgatttgaaagcgcagataccatggataagagaatttctaaggttaaatgatatacctctattggaagagcctggctatgaagcggatgatataatagctactatagtgaataaatataaggatgatttaaaatatattctctctggagatttagatcttttgcaattagtctcggacaaaacctttctaatacatcctcaaaagggaattactgagtttactatttatgatccaaaagctgtaaaggataggtttggagtagagccctataagattcccttatacaaagtattagtaggggacgaatctgataatattccaggagtaaatggaataggtcctaaaaaggcctcaaagattcttgagaaaatttcaagtgtagatgaatttaaaagtaaaataaaagttttggatagtgatttaagggagcttattgagaaaaattggaatattattgaaagaaatttagaacttgttactttaaaaaatatagataaggatcttattcttaaacccttcgagattaaaagagatgaaaaagtaatagattttttgaagagatatgaacttaagagtattcttcaaaagttatttcctgatcttcaagaggaagaaaatatagagattaaagatgtcgaagagatcaattttaatgaggtagaaaaagaaggctactttgcctttaaatgtcttggagatagggcttttgagggtatttctctttccttcaaggagggggaaggatattttatatctccttttgatttcaataatgagataagaaagaagattgaaaatataatttcttcagagaatgttaaaaaaattggctcttatattcaaagagatttacattttttaaactgtaaaataaagggcgatgtatttgatgttagtctcgcatcttatcttttgaaccctgaaagacaaaatcactctcttgatattttgataggagagtatctaaataaaacctcttttattcctcaaaaatacgctggttatctttttccgttaaagtctattcttgaggagaggataaagaatgaagggttagaatttgtactttataacatagagattccattaatccctgtactttactccatggagaagtgggggataaaggtagataaggaatatttaaaacagctttctgatgaattctgcgagagaattaaaaaattggaagaagagatatatgaacttgcaggaaccagatttaatctcaattctccaaaacaactttctgaagttttatttgagaggttaaaacttccttctggtaagaaaggaaaaacaggatattctacgtcgtcttctgtgcttcaaaacttaataaatgctcatcctatagtgagaaaaatcctccaatatagagaactctataaattgaagagtacttatgtggatgctattcctaatctggttaatccacaaacaggtagagttcatacaaaatttaatcctacaggtacagctacaggaagaataagtagtagtgaacctaatcttcagaatattcctataaaaagtgaagaaggtagaaagataagaagagccttcgtgtcagaagatggatattttcttgtatctcttgattattctcagatagagctaaggattatggctcatctttctcaggagcctaaattaatatctgccttccaaaaaggagaggatattcatagaagaacagcatcggagatttttggagtgccagaggaagaagttgatgatcttttaaggtcaagggcaaaggccgttaattttggaattatttatggtatctcttcttttggactttctgagactgtaagtattacaccagaagaggcagagaaatttatagactcgtattttaagcactatccaagagtgaagctttttatagataagactattcatgaggcaagagaaaaactgtacgttaaaaccttatttggcagaaaaagacctattcctgagattaagagcataaataaacaggtaaggaatgcctatgaaaggatagcaataaatgcgccaattcagggaacagctgctgatattataaaacttgccatgatagaaatttacaaggagattgaaaataaaaatctcaagtcaagaatactccttcaaattcatgatgagcttattcttgaagtgccagaggaggagatggaatttactcctttaatggcaaaggaaaaaatggaaaaggtggtagaactttcggttcctcttgtagttgaaatctcggtaggtaaaaatcttgctgaattaaaatgagctataagattggtcgac

SEQ ID NO: 1944 - DNA, 2673 bp, Artificial Sequence
  Description of Artificial Sequence: Synthetic DNA sequence of Dictyoglomus thermophilum DNA Y780S
atgaaatacctgctgccgaccgctgctgctggtctgctgctcctcgctgcccagccggcgatggccatggatatcggaattaattcggatccgaaatctctgtgggatctttttcaagaaaataccgagaaagagtccaaaaggaagattctgattattgatggctcaagcctcatatacagggtttattacgcccttccccctttaaagacaaaaaatggtgaattaactaatgctctttatggcttcataagaatacttttaaaggccgtagaagattttaatcctgatcttgtaggcgttgcctttgatagacctgaacctacttttaggcatgtgatttataaagagtataaggctaagagaccacctatgaaggatgatttgaaagcgcagataccatggataagagaatttctaaggttaaatgatatacctctattggaagagcctggctatgaagcggatgatataatagctactatagtgaataaatataaggatgatttaaaatatattctctctggagatttagatcttttgcaattagtctcggacaaaacctttctaatacatcctcaaaagggaattactgagtttactatttatgatccaaaagctgtaaaggataggtttggagtagagccctataagattcccttatacaaagtattagtaggggacgaatctgataatattccaggagtaaatggaataggtcctaaaaaggcctcaaagattcttgagaaaatttcaagtgtagatgaatttaaaagtaaaataaaagttttggatagtgatttaagggagcttattgagaaaaattggaatattattgaaagaaatttagaacttgttactttaaaaaatatagataaggatcttattcttaaacccttcgagattaaaagagatgaaaaagtaatagattttttgaagagatatgaacttaagagtattcttcaaaagttatttcctgatcttcaagaggaagaaaatatagagattaaagatgtcgaagagatcaattttaatgaggtagaaaaagaaggctactttgcctttaaatgtcttggagatagggcttttgagggtatttctctttccttcaaggagggggaaggatattttatatctccttttgatttcaataatgagataagaaagaagattgaaaatataatttcttcagagaatgttaaaaaaattggctcttatattcaaagagatttacattttttaaactgtaaaataaagggcgatgtatttgatgttagtctcgcatcttatcttttgaaccctgaaagacaaaatcactctcttgatattttgataggagagtatctaaataaaacctcttttattcctcaaaaatacgctggttatctttttccgttaaagtctattcttgaggagaggataaagaatgaagggttagaatttgtactttataacatagagattccattaatccctgtactttactccatggagaagtgggggataaaggtagataaggaatatttaaaacagctttctgatgaattctgcgagagaattaaaaaattggaagaagagatatatgaacttgcaggaaccagatttaatctcaattctccaaaacaactttctgaagttttatttgagaggttaaaacttccttctggtaagaaaggaaaaacaggatattctacgtcgtcttctgtgcttcaaaacttaataaatgctcatcctatagtgagaaaaatcctccaatatagagaactctataaattgaagagtacttatgtggatgctattcctaatctggttaatccacaaacaggtagagttcatacaaaatttaatcctacaggtacagctacaggaagaataagtagtagtgaacctaatcttcagaatattcctataaaaagtgaagaaggtagaaagataagaagagccttcgtgtcagaagatggatattttcttgtatctcttgattattctcagatagagctaaggattatggctcatctttctcaggagcctaaattaatatctgccttccaaaaaggagaggatattcatagaagaacagcatcggagatttttggagtgccagaggaagaagttgatgatcttttaaggtcaagggcaaaggccgttaattttggaattatttatggtatctcttcttttggactttctgagactgtaagtattacaccagaagaggcagagaaatttatagactcgtattttaagcactatccaagagtgaagctttttatagataagactattcatgaggcaagagaaaaactgtacgttaaaaccttatttggcagaaaaagatctattcctgagattaagagcataaataaacaggtaaggaatgcctatgaaaggatagcaataaatgcgccaattcagggaacagctgctgatattataaaacttgccatgatagaaatttacaaggagattgaaaataaaaatctcaagtcaagaatactccttcaaattcatgatgagcttattcttgaagtgccagaggaggagatggaatttactcctttaatggcaaaggaaaaaatggaaaaggtggtagaactttcggttcctcttgtagttgaaatctcggtaggtaaaaatcttgctgaattaaaatgagctataagattggtcgac

SEQ ID NO: 1945 - DNA, 2673 bp, Artificial Sequence
  Description of Artificial Sequence: Synthetic DNA sequence of Dictyoglomus thermophilum DNA Y780T
atgaaatacctgctgccgaccgctgctgctggtctgctgctcctcgctgcccagccggcgatggccatggatatcggaattaattcggatccgaaatctctgtgggatctttttcaagaaaataccgagaaagagtccaaaaggaagattctgattattgatggctcaagcctcatatacagggtttattacgcccttccccctttaaagacaaaaaatggtgaattaactaatgctctttatggcttcataagaatacttttaaaggccgtagaagattttaatcctgatcttgtaggcgttgcctttgatagacctgaacctacttttaggcatgtgatttataaagagtataaggctaagagaccacctatgaaggatgatttgaaagcgcagataccatggataagagaatttctaaggttaaatgatatacctctattggaagagcctggctatgaagcggatgatataatagctactatagtgaataaatataaggatgatttaaaatatattctctctggagatttagatcttttgcaattagtctcggacaaaacctttctaatacatcctcaaaagggaattactgagtttactatttatgatccaaaagctgtaaaggataggtttggagtagagccctataagattcccttatacaaagtattagtaggggacgaatctgataatattccaggagtaaatggaataggtcctaaaaaggcctcaaagattcttgagaaaatttcaagtgtagatgaatttaaaagtaaaataaaagttttggatagtgatttaagggagcttattgagaaaaattggaatattattgaaagaaatttagaacttgttactttaaaaaatatagataaggatcttattcttaaacccttcgagattaaaagagatgaaaaagtaatagattttttgaagagatatgaacttaagagtattcttcaaaagttatttcctgatcttcaagaggaagaaaatatagagattaaagatgtcgaagagatcaattttaatgaggtagaaaaagaaggctactttgcctttaaatgtcttggagatagggcttttgagggtatttctctttccttcaaggagggggaaggatattttatatctccttttgatttcaataatgagataagaaagaagattgaaaatataatttcttcagagaatgttaaaaaaattggctcttatattcaaagagatttacattttttaaactgtaaaataaagggcgatgtatttgatgttagtctcgcatcttatcttttgaaccctgaaagacaaaatcactctcttgatattttgataggagagtatctaaataaaacctcttttattcctcaaaaatacgctggttatctttttccgttaaagtctattcttgaggagaggataaagaatgaagggttagaatttgtactttataacatagagattccattaatccctgtactttactccatggagaagtgggggataaaggtagataaggaatatttaaaacagctttctgatgaattctgcgagagaattaaaaaattggaagaagagatatatgaacttgcaggaaccagatttaatctcaattctccaaaacaactttctgaagttttatttgagaggttaaaacttccttctggtaagaaaggaaaaacaggatattctacgtcgtcttctgtgcttcaaaacttaataaatgctcatcctatagtgagaaaaatcctccaatatagagaactctataaattgaagagtacttatgtggatgctattcctaatctggttaatccacaaacaggtagagttcatacaaaatttaatcctacaggtacagctacaggaagaataagtagtagtgaacctaatcttcagaatattcctataaaaagtgaagaaggtagaaagataagaagagccttcgtgtcagaagatggatattttcttgtatctcttgattattctcagatagagctaaggattatggctcatctttctcaggagcctaaattaatatctgccttccaaaaaggagaggatattcatagaagaacagcatcggagatttttggagtgccagaggaagaagttgatgatcttttaaggtcaagggcaaaggccgttaattttggaattatttatggtatctcttcttttggactttctgagactgtaagtattacaccagaagaggcagagaaatttatagactcgtattttaagcactatccaagagtgaagctttttatagataagactattcatgaggcaagagaaaaactgtacgttaaaaccttatttggcagaaaaagaactattcctgagattaagagcataaataaacaggtaaggaatgcctatgaaaggatagcaataaatgcgccaattcagggaacagctgctgatattataaaacttgccatgatagaaatttacaaggagattgaaaataaaaatctcaagtcaagaatactccttcaaattcatgatgagcttattcttgaagtgccagaggaggagatggaatttactcctttaatggcaaaggaaaaaatggaaaaggtggtagaactttcggttcctcttgtagttgaaatctcggtaggtaaaaatcttgctgaattaaaatgagctataagattggtcgac

SEQ ID NO: 1946 - DNA, 2673 bp, Artificial Sequence
  Description of Artificial Sequence: Synthetic DNA sequence of Dictyoglomus thermophilum DNA Y780W
atgaaatacctgctgccgaccgctgctgctggtctgctgctcctcgctgcccagccggcgatggccatggatatcggaattaattcggatccgaaatctctgtgggatctttttcaagaaaataccgagaaagagtccaaaaggaagattctgattattgatggctcaagcctcatatacagggtttattacgcccttccccctttaaagacaaaaaatggtgaattaactaatgctctttatggcttcataagaatacttttaaaggccgtagaagattttaatcctgatcttgtaggcgttgcctttgatagacctgaacctacttttaggcatgtgatttataaagagtataaggctaagagaccacctatgaaggatgatttgaaagcgcagataccatggataagagaatttctaaggttaaatgatatacctctattggaagagcctggctatgaagcggatgatataatagctactatagtgaataaatataaggatgatttaaaatatattctctctggagatttagatcttttgcaattagtctcggacaaaacctttctaatacatcctcaaaagggaattactgagtttactatttatgatccaaaagctgtaaaggataggtttggagtagagccctataagattcccttatacaaagtattagtaggggacgaatctgataatattccaggagtaaatggaataggtcctaaaaaggcctcaaagattcttgagaaaatttcaagtgtagatgaatttaaaagtaaaataaaagttttggatagtgatttaagggagcttattgagaaaaattggaatattattgaaagaaatttagaacttgttactttaaaaaatatagataaggatcttattcttaaacccttcgagattaaaagagatgaaaaagtaatagattttttgaagagatatgaacttaagagtattcttcaaaagttatttcctgatcttcaagaggaagaaaatatagagattaaagatgtcgaagagatcaattttaatgaggtagaaaaagaaggctactttgcctttaaatgtcttggagatagggcttttgagggtatttctctttccttcaaggagggggaaggatattttatatctccttttgatttcaataatgagataagaaagaagattgaaaatataatttcttcagagaatgttaaaaaaattggctcttatattcaaagagatttacattttttaaactgtaaaataaagggcgatgtatttgatgttagtctcgcatcttatcttttgaaccctgaaagacaaaatcactctcttgatattttgataggagagtatctaaataaaacctcttttattcctcaaaaatacgctggttatctttttccgttaaagtctattcttgaggagaggataaagaatgaagggttagaatttgtactttataacatagagattccattaatccctgtactttactccatggagaagtgggggataaaggtagataaggaatatttaaaacagctttctgatgaattctgcgagagaattaaaaaattggaagaagagatatatgaacttgcaggaaccagatttaatctcaattctccaaaacaactttctgaagttttatttgagaggttaaaacttccttctggtaagaaaggaaaaacaggatattctacgtcgtcttctgtgcttcaaaacttaataaatgctcatcctatagtgagaaaaatcctccaatatagagaactctataaattgaagagtacttatgtggatgctattcctaatctggttaatccacaaacaggtagagttcatacaaaatttaatcctacaggtacagctacaggaagaataagtagtagtgaacctaatcttcagaatattcctataaaaagtgaagaaggtagaaagataagaagagccttcgtgtcagaagatggatattttcttgtatctcttgattattctcagatagagctaaggattatggctcatctttctcaggagcctaaattaatatctgccttccaaaaaggagaggatattcatagaagaacagcatcggagatttttggagtgccagaggaagaagttgatgatcttttaaggtcaagggcaaaggccgttaattttggaattatttatggtatctcttcttttggactttctgagactgtaagtattacaccagaagaggcagagaaatttatagactcgtattttaagcactatccaagagtgaagctttttatagataagactattcatgaggcaagagaaaaactgtacgttaaaaccttatttggcagaaaaagatggattcctgagattaagagcataaataaacaggtaaggaatgcctatgaaaggatagcaataaatgcgccaattcagggaacagctgctgatattataaaacttgccatgatagaaatttacaaggagattgaaaataaaaatctcaagtcaagaatactccttcaaattcatgatgagcttattcttgaagtgccagaggaggagatggaatttactcctttaatggcaaaggaaaaaatggaaaaggtggtagaactttcggttcctcttgtagttgaaatctcggtaggtaaaaatcttgctgaattaaaatgagctataagattggtcgac

SEQ ID NO: 1947 - DNA, 2673 bp, Artificial Sequence
  Description of Artificial Sequence: Synthetic DNA sequence of Dictyoglomus thermophilum DNA Y780V
atgaaatacctgctgccgaccgctgctgctggtctgctgctcctcgctgcccagccggcgatggccatggatatcggaattaattcggatccgaaatctctgtgggatctttttcaagaaaataccgagaaagagtccaaaaggaagattctgattattgatggctcaagcctcatatacagggtttattacgcccttccccctttaaagacaaaaaatggtgaattaactaatgctctttatggcttcataagaatacttttaaaggccgtagaagattttaatcctgatcttgtaggcgttgcctttgatagacctgaacctacttttaggcatgtgatttataaagagtataaggctaagagaccacctatgaaggatgatttgaaagcgcagataccatggataagagaatttctaaggttaaatgatatacctctattggaagagcctggctatgaagcggatgatataatagctactatagtgaataaatataaggatgatttaaaatatattctctctggagatttagatcttttgcaattagtctcggacaaaacctttctaatacatcctcaaaagggaattactgagtttactatttatgatccaaaagctgtaaaggataggtttggagtagagccctataagattcccttatacaaagtattagtaggggacgaatctgataatattccaggagtaaatggaataggtcctaaaaaggcctcaaagattcttgagaaaatttcaagtgtagatgaatttaaaagtaaaataaaagttttggatagtgatttaagggagcttattgagaaaaattggaatattattgaaagaaatttagaacttgttactttaaaaaatatagataaggatcttattcttaaacccttcgagattaaaagagatgaaaaagtaatagattttttgaagagatatgaacttaagagtattcttcaaaagttatttcctgatcttcaagaggaagaaaatatagagattaaagatgtcgaagagatcaattttaatgaggtagaaaaagaaggctactttgcctttaaatgtcttggagatagggcttttgagggtatttctctttccttcaaggagggggaaggatattttatatctccttttgatttcaataatgagataagaaagaagattgaaaatataatttcttcagagaatgttaaaaaaattggctcttatattcaaagagatttacattttttaaactgtaaaataaagggcgatgtatttgatgttagtctcgcatcttatcttttgaaccctgaaagacaaaatcactctcttgatattttgataggagagtatctaaataaaacctcttttattcctcaaaaatacgctggttatctttttccgttaaagtctattcttgaggagaggataaagaatgaagggttagaatttgtactttataacatagagattccattaatccctgtactttactccatggagaagtgggggataaaggtagataaggaatatttaaaacagctttctgatgaattctgcgagagaattaaaaaattggaagaagagatatatgaacttgcaggaaccagatttaatctcaattctccaaaacaactttctgaagttttatttgagaggttaaaacttccttctggtaagaaaggaaaaacaggatattctacgtcgtcttctgtgcttcaaaacttaataaatgctcatcctatagtgagaaaaatcctccaatatagagaactctataaattgaagagtacttatgtggatgctattcctaatctggttaatccacaaacaggtagagttcatacaaaatttaatcctacaggtacagctacaggaagaataagtagtagtgaacctaatcttcagaatattcctataaaaagtgaagaaggtagaaagataagaagagccttcgtgtcagaagatggatattttcttgtatctcttgattattctcagatagagctaaggattatggctcatctttctcaggagcctaaattaatatctgccttccaaaaaggagaggatattcatagaagaacagcatcggagatttttggagtgccagaggaagaagttgatgatcttttaaggtcaagggcaaaggccgttaattttggaattatttatggtatctcttcttttggactttctgagactgtaagtattacaccagaagaggcagagaaatttatagactcgtattttaagcactatccaagagtgaagctttttatagataagactattcatgaggcaagagaaaaactgtacgttaaaaccttatttggcagaaaaagagttattcctgagattaagagcataaataaacaggtaaggaatgcctatgaaaggatagcaataaatgcgccaattcagggaacagctgctgatattataaaacttgccatgatagaaatttacaaggagattgaaaataaaaatctcaagtcaagaatactccttcaaattcatgatgagcttattcttgaagtgccagaggaggagatggaatttactcctttaatggcaaaggaaaaaatggaaaaggtggtagaactttcggttcctcttgtagttgaaatctcggtaggtaaaaatcttgctgaattaaaatgagctataagattggtcgac

SEQ ID NO: 1948 - DNA, 2673 bp, Artificial Sequence
  Description of Artificial Sequence: Synthetic DNA sequence of Dictyoglomus thermophilum DNA I781A
atgaaatacctgctgccgaccgctgctgctggtctgctgctcctcgctgcccagccggcgatggccatggatatcggaattaattcggatccgaaatctctgtgggatctttttcaagaaaataccgagaaagagtccaaaaggaagattctgattattgatggctcaagcctcatatacagggtttattacgcccttccccctttaaagacaaaaaatggtgaattaactaatgctctttatggcttcataagaatacttttaaaggccgtagaagattttaatcctgatcttgtaggcgttgcctttgatagacctgaacctacttttaggcatgtgatttataaagagtataaggctaagagaccacctatgaaggatgatttgaaagcgcagataccatggataagagaatttctaaggttaaatgatatacctctattggaagagcctggctatgaagcggatgatataatagctactatagtgaataaatataaggatgatttaaaatatattctctctggagatttagatcttttgcaattagtctcggacaaaacctttctaatacatcctcaaaagggaattactgagtttactatttatgatccaaaagctgtaaaggataggtttggagtagagccctataagattcccttatacaaagtattagtaggggacgaatctgataatattccaggagtaaatggaataggtcctaaaaaggcctcaaagattcttgagaaaatttcaagtgtagatgaatttaaaagtaaaataaaagttttggatagtgatttaagggagcttattgagaaaaattggaatattattgaaagaaatttagaacttgttactttaaaaaatatagataaggatcttattcttaaacccttcgagattaaaagagatgaaaaagtaatagattttttgaagagatatgaacttaagagtattcttcaaaagttatttcctgatcttcaagaggaagaaaatatagagattaaagatgtcgaagagatcaattttaatgaggtagaaaaagaaggctactttgcctttaaatgtcttggagatagggcttttgagggtatttctctttccttcaaggagggggaaggatattttatatctccttttgatttcaataatgagataagaaagaagattgaaaatataatttcttcagagaatgttaaaaaaattggctcttatattcaaagagatttacattttttaaactgtaaaataaagggcgatgtatttgatgttagtctcgcatcttatcttttgaaccctgaaagacaaaatcactctcttgatattttgataggagagtatctaaataaaacctcttttattcctcaaaaatacgctggttatctttttccgttaaagtctattcttgaggagaggataaagaatgaagggttagaatttgtactttataacatagagattccattaatccctgtactttactccatggagaagtgggggataaaggtagataaggaatatttaaaacagctttctgatgaattctgcgagagaattaaaaaattggaagaagagatatatgaacttgcaggaaccagatttaatctcaattctccaaaacaactttctgaagttttatttgagaggttaaaacttccttctggtaagaaaggaaaaacaggatattctacgtcgtcttctgtgcttcaaaacttaataaatgctcatcctatagtgagaaaaatcctccaatatagagaactctataaattgaagagtacttatgtggatgctattcctaatctggttaatccacaaacaggtagagttcatacaaaatttaatcctacaggtacagctacaggaagaataagtagtagtgaacctaatcttcagaatattcctataaaaagtgaagaaggtagaaagataagaagagccttcgtgtcagaagatggatattttcttgtatctcttgattattctcagatagagctaaggattatggctcatctttctcaggagcctaaattaatatctgccttccaaaaaggagaggatattcatagaagaacagcatcggagatttttggagtgccagaggaagaagttgatgatcttttaaggtcaagggcaaaggccgttaattttggaattatttatggtatctcttcttttggactttctgagactgtaagtattacaccagaagaggcagagaaatttatagactcgtattttaagcactatccaagagtgaagctttttatagataagactattcatgaggcaagagaaaaactgtacgttaaaaccttatttggcagaaaaagatatgctcctgagattaagagcataaataaacaggtaaggaatgcctatgaaaggatagcaataaatgcgccaattcagggaacagctgctgatattataaaacttgccatgatagaaatttacaaggagattgaaaataaaaatctcaagtcaagaatactccttcaaattcatgatgagcttattcttgaagtgccagaggaggagatggaatttactcctttaatggcaaaggaaaaaatggaaaaggtggtagaactttcggttcctcttgtagttgaaatctcggtaggtaaaaatcttgctgaattaaaatgagctataagattggtcgac

SEQ ID NO: 1949 - DNA, 2673 bp, Artificial Sequence
  Description of Artificial Sequence: Synthetic DNA sequence of Dictyoglomus thermophilum DNA I781R
atgaaatacctgctgccgaccgctgctgctggtctgctgctcctcgctgcccagccggcgatggccatggatatcggaattaattcggatccgaaatctctgtgggatctttttcaagaaaataccgagaaagagtccaaaaggaagattctgattattgatggctcaagcctcatatacagggtttattacgcccttccccctttaaagacaaaaaatggtgaattaactaatgctctttatggcttcataagaatacttttaaaggccgtagaagattttaatcctgatcttgtaggcgttgcctttgatagacctgaacctacttttaggcatgtgatttataaagagtataaggctaagagaccacctatgaaggatgatttgaaagcgcagataccatggataagagaatttctaaggttaaatgatatacctctattggaagagcctggctatgaagcggatgatataatagctactatagtgaataaatataaggatgatttaaaatatattctctctggagatttagatcttttgcaattagtctcggacaaaacctttctaatacatcctcaaaagggaattactgagtttactatttatgatccaaaagctgtaaaggataggtttggagtagagccctataagattcccttatacaaagtattagtaggggacgaatctgataatattccaggagtaaatggaataggtcctaaaaaggcctcaaagattcttgagaaaatttcaagtgtagatgaatttaaaagtaaaataaaagttttggatagtgatttaagggagcttattgagaaaaattggaatattattgaaagaaatttagaacttgttactttaaaaaatatagataaggatcttattcttaaacccttcgagattaaaagagatgaaaaagtaatagattttttgaagagatatgaacttaagagtattcttcaaaagttatttcctgatcttcaagaggaagaaaatatagagattaaagatgtcgaagagatcaattttaatgaggtagaaaaagaaggctactttgcctttaaatgtcttggagatagggcttttgagggtatttctctttccttcaaggagggggaaggatattttatatctccttttgatttcaataatgagataagaaagaagattgaaaatataatttcttcagagaatgttaaaaaaattggctcttatattcaaagagatttacattttttaaactgtaaaataaagggcgatgtatttgatgttagtctcgcatcttatcttttgaaccctgaaagacaaaatcactctcttgatattttgataggagagtatctaaataaaacctcttttattcctcaaaaatacgctggttatctttttccgttaaagtctattcttgaggagaggataaagaatgaagggttagaatttgtactttataacatagagattccattaatccctgtactttactccatggagaagtgggggataaaggtagataaggaatatttaaaacagctttctgatgaattctgcgagagaattaaaaaattggaagaagagatatatgaacttgcaggaaccagatttaatctcaattctccaaaacaactttctgaagttttatttgagaggttaaaacttccttctggtaagaaaggaaaaacaggatattctacgtcgtcttctgtgcttcaaaacttaataaatgctcatcctatagtgagaaaaatcctccaatatagagaactctataaattgaagagtacttatgtggatgctattcctaatctggttaatccacaaacaggtagagttcatacaaaatttaatcctacaggtacagctacaggaagaataagtagtagtgaacctaatcttcagaatattcctataaaaagtgaagaaggtagaaagataagaagagccttcgtgtcagaagatggatattttcttgtatctcttgattattctcagatagagctaaggattatggctcatctttctcaggagcctaaattaatatctgccttccaaaaaggagaggatattcatagaagaacagcatcggagatttttggagtgccagaggaagaagttgatgatcttttaaggtcaagggcaaaggccgttaattttggaattatttatggtatctcttcttttggactttctgagactgtaagtattacaccagaagaggcagagaaatttatagactcgtattttaagcactatccaagagtgaagctttttatagataagactattcatgaggcaagagaaaaactgtacgttaaaaccttatttggcagaaaaagatatcgtcctgagattaagagcataaataaacaggtaaggaatgcctatgaaaggatagcaataaatgcgccaattcagggaacagctgctgatattataaaacttgccatgatagaaatttacaaggagattgaaaataaaaatctcaagtcaagaatactccttcaaattcatgatgagcttattcttgaagtgccagaggaggagatggaatttactcctttaatggcaaaggaaaaaatggaaaaggtggtagaactttcggttcctcttgtagttgaaatctcggtaggtaaaaatcttgctgaattaaaatgagctataagattggtcgac

SEQ ID NO: 1950 - DNA, 2673 bp, Artificial Sequence
  Description of Artificial Sequence: Synthetic DNA sequence of Dictyoglomus thermophilum DNA I781N
atgaaatacctgctgccgaccgctgctgctggtctgctgctcctcgctgcccagccggcgatggccatggatatcggaattaattcggatccgaaatctctgtgggatctttttcaagaaaataccgagaaagagtccaaaaggaagattctgattattgatggctcaagcctcatatacagggtttattacgcccttccccctttaaagacaaaaaatggtgaattaactaatgctctttatggcttcataagaatacttttaaaggccgtagaagattttaatcctgatcttgtaggcgttgcctttgatagacctgaacctacttttaggcatgtgatttataaagagtataaggctaagagaccacctatgaaggatgatttgaaagcgcagataccatggataagagaatttctaaggttaaatgatatacctctattggaagagcctggctatgaagcggatgatataatagctactatagtgaataaatataaggatgatttaaaatatattctctctggagatttagatcttttgcaattagtctcggacaaaacctttctaatacatcctcaaaagggaattactgagtttactatttatgatccaaaagctgtaaaggataggtttggagtagagccctataagattcccttatacaaagtattagtaggggacgaatctgataatattccaggagtaaatggaataggtcctaaaaaggcctcaaagattcttgagaaaatttcaagtgtagatgaatttaaaagtaaaataaaagttttggatagtgatttaagggagcttattgagaaaaattggaatattattgaaagaaatttagaacttgttactttaaaaaatatagataaggatcttattcttaaacccttcgagattaaaagagatgaaaaagtaatagattttttgaagagatatgaacttaagagtattcttcaaaagttatttcctgatcttcaagaggaagaaaatatagagattaaagatgtcgaagagatcaattttaatgaggtagaaaaagaaggctactttgcctttaaatgtcttggagatagggcttttgagggtatttctctttccttcaaggagggggaaggatattttatatctccttttgatttcaataatgagataagaaagaagattgaaaatataatttcttcagagaatgttaaaaaaattggctcttatattcaaagagatttacattttttaaactgtaaaataaagggcgatgtatttgatgttagtctcgcatcttatcttttgaaccctgaaagacaaaatcactctcttgatattttgataggagagtatctaaataaaacctcttttattcctcaaaaatacgctggttatctttttccgttaaagtctattcttgaggagaggataaagaatgaagggttagaatttgtactttataacatagagattccattaatccctgtactttactccatggagaagtgggggataaaggtagataaggaatatttaaaacagctttctgatgaattctgcgagagaattaaaaaattggaagaagagatatatgaacttgcaggaaccagatttaatctcaattctccaaaacaactttctgaagttttatttgagaggttaaaacttccttctggtaagaaaggaaaaacaggatattctacgtcgtcttctgtgcttcaaaacttaataaatgctcatcctatagtgagaaaaatcctccaatatagagaactctataaattgaagagtacttatgtggatgctattcctaatctggttaatccacaaacaggtagagttcatacaaaatttaatcctacaggtacagctacaggaagaataagtagtagtgaacctaatcttcagaatattcctataaaaagtgaagaaggtagaaagataagaagagccttcgtgtcagaagatggatattttcttgtatctcttgattattctcagatagagctaaggattatggctcatctttctcaggagcctaaattaatatctgccttccaaaaaggagaggatattcatagaagaacagcatcggagatttttggagtgccagaggaagaagttgatgatcttttaaggtcaagggcaaaggccgttaattttggaattatttatggtatctcttcttttggactttctgagactgtaagtattacaccagaagaggcagagaaatttatagactcgtattttaagcactatccaagagtgaagctttttatagataagactattcatgaggcaagagaaaaactgtacgttaaaaccttatttggcagaaaaagatataatcctgagattaagagcataaataaacaggtaaggaatgcctatgaaaggatagcaataaatgcgccaattcagggaacagctgctgatattataaaacttgccatgatagaaatttacaaggagattgaaaataaaaatctcaagtcaagaatactccttcaaattcatgatgagcttattcttgaagtgccagaggaggagatggaatttactcctttaatggcaaaggaaaaaatggaaaaggtggtagaactttcggttcctcttgtagttgaaatctcggtaggtaaaaatcttgctgaattaaaatgagctataagattggtcgac

SEQ ID NO: 1951 - DNA, 2673 bp, Artificial Sequence
  Description of Artificial Sequence: Synthetic DNA sequence of Dictyoglomus thermophilum DNA I781D
atgaaatacctgctgccgaccgctgctgctggtctgctgctcctcgctgcccagccggcgatggccatggatatcggaattaattcggatccgaaatctctgtgggatctttttcaagaaaataccgagaaagagtccaaaaggaagattctgattattgatggctcaagcctcatatacagggtttattacgcccttccccctttaaagacaaaaaatggtgaattaactaatgctctttatggcttcataagaatacttttaaaggccgtagaagattttaatcctgatcttgtaggcgttgcctttgatagacctgaacctacttttaggcatgtgatttataaagagtataaggctaagagaccacctatgaaggatgatttgaaagcgcagataccatggataagagaatttctaaggttaaatgatatacctctattggaagagcctggctatgaagcggatgatataatagctactatagtgaataaatataaggatgatttaaaatatattctctctggagatttagatcttttgcaattagtctcggacaaaacctttctaatacatcctcaaaagggaattactgagtttactatttatgatccaaaagctgtaaaggataggtttggagtagagccctataagattcccttatacaaagtattagtaggggacgaatctgataatattccaggagtaaatggaataggtcctaaaaaggcctcaaagattcttgagaaaatttcaagtgtagatgaatttaaaagtaaaataaaagttttggatagtgatttaagggagcttattgagaaaaattggaatattattgaaagaaatttagaacttgttactttaaaaaatatagataaggatcttattcttaaacccttcgagattaaaagagatgaaaaagtaatagattttttgaagagatatgaacttaagagtattcttcaaaagttatttcctgatcttcaagaggaagaaaatatagagattaaagatgtcgaagagatcaattttaatgaggtagaaaaagaaggctactttgcctttaaatgtcttggagatagggcttttgagggtatttctctttccttcaaggagggggaaggatattttatatctccttttgatttcaataatgagataagaaagaagattgaaaatataatttcttcagagaatgttaaaaaaattggctcttatattcaaagagatttacattttttaaactgtaaaataaagggcgatgtatttgatgttagtctcgcatcttatcttttgaaccctgaaagacaaaatcactctcttgatattttgataggagagtatctaaataaaacctcttttattcctcaaaaatacgctggttatctttttccgttaaagtctattcttgaggagaggataaagaatgaagggttagaatttgtactttataacatagagattccattaatccctgtactttactccatggagaagtgggggataaaggtagataaggaatatttaaaacagctttctgatgaattctgcgagagaattaaaaaattggaagaagagatatatgaacttgcaggaaccagatttaatctcaattctccaaaacaactttctgaagttttatttgagaggttaaaacttccttctggtaagaaaggaaaaacaggatattctacgtcgtcttctgtgcttcaaaacttaataaatgctcatcctatagtgagaaaaatcctccaatatagagaactctataaattgaagagtacttatgtggatgctattcctaatctggttaatccacaaacaggtagagttcatacaaaatttaatcctacaggtacagctacaggaagaataagtagtagtgaacctaatcttcagaatattcctataaaaagtgaagaaggtagaaagataagaagagccttcgtgtcagaagatggatattttcttgtatctcttgattattctcagatagagctaaggattatggctcatctttctcaggagcctaaattaatatctgccttccaaaaaggagaggatattcatagaagaacagcatcggagatttttggagtgccagaggaagaagttgatgatcttttaaggtcaagggcaaaggccgttaattttggaattatttatggtatctcttcttttggactttctgagactgtaagtattacaccagaagaggcagagaaatttatagactcgtattttaagcactatccaagagtgaagctttttatagataagactattcatgaggcaagagaaaaactgtacgttaaaaccttatttggcagaaaaagatatgatcctgagattaagagcataaataaacaggtaaggaatgcctatgaaaggatagcaataaatgcgccaattcagggaacagctgctgatattataaaacttgccatgatagaaatttacaaggagattgaaaataaaaatctcaagtcaagaatactccttcaaattcatgatgagcttattcttgaagtgccagaggaggagatggaatttactcctttaatggcaaaggaaaaaatggaaaaggtggtagaactttcggttcctcttgtagttgaaatctcggtaggtaaaaatcttgctgaattaaaatgagctataagattggtcgac

SEQ ID NO: 1952 - DNA, 2673 bp, Artificial Sequence
  Description of Artificial Sequence: Synthetic DNA sequence of Dictyoglomus thermophilum DNA I781C
atgaaatacctgctgccgaccgctgctgctggtctgctgctcctcgctgcccagccggcgatggccatggatatcggaattaattcggatccgaaatctctgtgggatctttttcaagaaaataccgagaaagagtccaaaaggaagattctgattattgatggctcaagcctcatatacagggtttattacgcccttccccctttaaagacaaaaaatggtgaattaactaatgctctttatggcttcataagaatacttttaaaggccgtagaagattttaatcctgatcttgtaggcgttgcctttgatagacctgaacctacttttaggcatgtgatttataaagagtataaggctaagagaccacctatgaaggatgatttgaaagcgcagataccatggataagagaatttctaaggttaaatgatatacctctattggaagagcctggctatgaagcggatgatataatagctactatagtgaataaatataaggatgatttaaaatatattctctctggagatttagatcttttgcaattagtctcggacaaaacctttctaatacatcctcaaaagggaattactgagtttactatttatgatccaaaagctgtaaaggataggtttggagtagagccctataagattcccttatacaaagtattagtaggggacgaatctgataatattccaggagtaaatggaataggtcctaaaaaggcctcaaagattcttgagaaaatttcaagtgtagatgaatttaaaagtaaaataaaagttttggatagtgatttaagggagcttattgagaaaaattggaatattattgaaagaaatttagaacttgttactttaaaaaatatagataaggatcttattcttaaacccttcgagattaaaagagatgaaaaagtaatagattttttgaagagatatgaacttaagagtattcttcaaaagttatttcctgatcttcaagaggaagaaaatatagagattaaagatgtcgaagagatcaattttaatgaggtagaaaaagaaggctactttgcctttaaatgtcttggagatagggcttttgagggtatttctctttccttcaaggagggggaaggatattttatatctccttttgatttcaataatgagataagaaagaagattgaaaatataatttcttcagagaatgttaaaaaaattggctcttatattcaaagagatttacattttttaaactgtaaaataaagggcgatgtatttgatgttagtctcgcatcttatcttttgaaccctgaaagacaaaatcactctcttgatattttgataggagagtatctaaataaaacctcttttattcctcaaaaatacgctggttatctttttccgttaaagtctattcttgaggagaggataaagaatgaagggttagaatttgtactttataacatagagattccattaatccctgtactttactccatggagaagtgggggataaaggtagataaggaatatttaaaacagctttctgatgaattctgcgagagaattaaaaaattggaagaagagatatatgaacttgcaggaaccagatttaatctcaattctccaaaacaactttctgaagttttatttgagaggttaaaacttccttctggtaagaaaggaaaaacaggatattctacgtcgtcttctgtgcttcaaaacttaataaatgctcatcctatagtgagaaaaatcctccaatatagagaactctataaattgaagagtacttatgtggatgctattcctaatctggttaatccacaaacaggtagagttcatacaaaatttaatcctacaggtacagctacaggaagaataagtagtagtgaacctaatcttcagaatattcctataaaaagtgaagaaggtagaaagataagaagagccttcgtgtcagaagatggatattttcttgtatctcttgattattctcagatagagctaaggattatggctcatctttctcaggagcctaaattaatatctgccttccaaaaaggagaggatattcatagaagaacagcatcggagatttttggagtgccagaggaagaagttgatgatcttttaaggtcaagggcaaaggccgttaattttggaattatttatggtatctcttcttttggactttctgagactgtaagtattacaccagaagaggcagagaaatttatagactcgtattttaagcactatccaagagtgaagctttttatagataagactattcatgaggcaagagaaaaactgtacgttaaaaccttatttggcagaaaaagatattgtcctgagattaagagcataaataaacaggtaaggaatgcctatgaaaggatagcaataaatgcgccaattcagggaacagctgctgatattataaaacttgccatgatagaaatttacaaggagattgaaaataaaaatctcaagtcaagaatactccttcaaattcatgatgagcttattcttgaagtgccagaggaggagatggaatttactcctttaatggcaaaggaaaaaatggaaaaggtggtagaactttcggttcctcttgtagttgaaatctcggtaggtaaaaatcttgctgaattaaaatgagctataagattggtcgac

SEQ ID NO: 1953 - DNA, 2673 bp, Artificial Sequence
  Description of Artificial Sequence: Synthetic DNA sequence of Dictyoglomus thermophilum DNA I781E
atgaaatacctgctgccgaccgctgctgctggtctgctgctcctcgctgcccagccggcgatggccatggatatcggaattaattcggatccgaaatctctgtgggatctttttcaagaaaataccgagaaagagtccaaaaggaagattctgattattgatggctcaagcctcatatacagggtttattacgcccttccccctttaaagacaaaaaatggtgaattaactaatgctctttatggcttcataagaatacttttaaaggccgtagaagattttaatcctgatcttgtaggcgttgcctttgatagacctgaacctacttttaggcatgtgatttataaagagtataaggctaagagaccacctatgaaggatgatttgaaagcgcagataccatggataagagaatttctaaggttaaatgatatacctctattggaagagcctggctatgaagcggatgatataatagctactatagtgaataaatataaggatgatttaaaatatattctctctggagatttagatcttttgcaattagtctcggacaaaacctttctaatacatcctcaaaagggaattactgagtttactatttatgatccaaaagctgtaaaggataggtttggagtagagccctataagattcccttatacaaagtattagtaggggacgaatctgataatattccaggagtaaatggaataggtcctaaaaaggcctcaaagattcttgagaaaatttcaagtgtagatgaatttaaaagtaaaataaaagttttggatagtgatttaagggagcttattgagaaaaattggaatattattgaaagaaatttagaacttgttactttaaaaaatatagataaggatcttattcttaaacccttcgagattaaaagagatgaaaaagtaatagattttttgaagagatatgaacttaagagtattcttcaaaagttatttcctgatcttcaagaggaagaaaatatagagattaaagatgtcgaagagatcaattttaatgaggtagaaaaagaaggctactttgcctttaaatgtcttggagatagggcttttgagggtatttctctttccttcaaggagggggaaggatattttatatctccttttgatttcaataatgagataagaaagaagattgaaaatataatttcttcagagaatgttaaaaaaattggctcttatattcaaagagatttacattttttaaactgtaaaataaagggcgatgtatttgatgttagtctcgcatcttatcttttgaaccctgaaagacaaaatcactctcttgatattttgataggagagtatctaaataaaacctcttttattcctcaaaaatacgctggttatctttttccgttaaagtctattcttgaggagaggataaagaatgaagggttagaatttgtactttataacatagagattccattaatccctgtactttactccatggagaagtgggggataaaggtagataaggaatatttaaaacagctttctgatgaattctgcgagagaattaaaaaattggaagaagagatatatgaacttgcaggaaccagatttaatctcaattctccaaaacaactttctgaagttttatttgagaggttaaaacttccttctggtaagaaaggaaaaacaggatattctacgtcgtcttctgtgcttcaaaacttaataaatgctcatcctatagtgagaaaaatcctccaatatagagaactctataaattgaagagtacttatgtggatgctattcctaatctggttaatccacaaacaggtagagttcatacaaaatttaatcctacaggtacagctacaggaagaataagtagtagtgaacctaatcttcagaatattcctataaaaagtgaagaaggtagaaagataagaagagccttcgtgtcagaagatggatattttcttgtatctcttgattattctcagatagagctaaggattatggctcatctttctcaggagcctaaattaatatctgccttccaaaaaggagaggatattcatagaagaacagcatcggagatttttggagtgccagaggaagaagttgatgatcttttaaggtcaagggcaaaggccgttaattttggaattatttatggtatctcttcttttggactttctgagactgtaagtattacaccagaagaggcagagaaatttatagactcgtattttaagcactatccaagagtgaagctttttatagataagactattcatgaggcaagagaaaaactgtacgttaaaaccttatttggcagaaaaagatatgaacctgagattaagagcataaataaacaggtaaggaatgcctatgaaaggatagcaataaatgcgccaattcagggaacagctgctgatattataaaacttgccatgatagaaatttacaaggagattgaaaataaaaatctcaagtcaagaatactccttcaaattcatgatgagcttattcttgaagtgccagaggaggagatggaatttactcctttaatggcaaaggaaaaaatggaaaaggtggtagaactttcggttcctcttgtagttgaaatctcggtaggtaaaaatcttgctgaattaaaatgagctataagattggtcgac

SEQ ID NO: 1954 - DNA, 2673 bp, Artificial Sequence
  Description of Artificial Sequence: Synthetic DNA sequence of Dictyoglomus thermophilum DNA I781Q
atgaaatacctgctgccgaccgctgctgctggtctgctgctcctcgctgcccagccggcgatggccatggatatcggaattaattcggatccgaaatctctgtgggatctttttcaagaaaataccgagaaagagtccaaaaggaagattctgattattgatggctcaagcctcatatacagggtttattacgcccttccccctttaaagacaaaaaatggtgaattaactaatgctctttatggcttcataagaatacttttaaaggccgtagaagattttaatcctgatcttgtaggcgttgcctttgatagacctgaacctacttttaggcatgtgatttataaagagtataaggctaagagaccacctatgaaggatgatttgaaagcgcagataccatggataagagaatttctaaggttaaatgatatacctctattggaagagcctggctatgaagcggatgatataatagctactatagtgaataaatataaggatgatttaaaatatattctctctggagatttagatcttttgcaattagtctcggacaaaacctttctaatacatcctcaaaagggaattactgagtttactatttatgatccaaaagctgtaaaggataggtttggagtagagccctataagattcccttatacaaagtattagtaggggacgaatctgataatattccaggagtaaatggaataggtcctaaaaaggcctcaaagattcttgagaaaatttcaagtgtagatgaatttaaaagtaaaataaaagttttggatagtgatttaagggagcttattgagaaaaattggaatattattgaaagaaatttagaacttgttactttaaaaaatatagataaggatcttattcttaaacccttcgagattaaaagagatgaaaaagtaatagattttttgaagagatatgaacttaagagtattcttcaaaagttatttcctgatcttcaagaggaagaaaatatagagattaaagatgtcgaagagatcaattttaatgaggtagaaaaagaaggctactttgcctttaaatgtcttggagatagggcttttgagggtatttctctttccttcaaggagggggaaggatattttatatctccttttgatttcaataatgagataagaaagaagattgaaaatataatttcttcagagaatgttaaaaaaattggctcttatattcaaagagatttacattttttaaactgtaaaataaagggcgatgtatttgatgttagtctcgcatcttatcttttgaaccctgaaagacaaaatcactctcttgatattttgataggagagtatctaaataaaacctcttttattcctcaaaaatacgctggttatctttttccgttaaagtctattcttgaggagaggataaagaatgaagggttagaatttgtactttataacatagagattccattaatccctgtactttactccatggagaagtgggggataaaggtagataaggaatatttaaaacagctttctgatgaattctgcgagagaattaaaaaattggaagaagagatatatgaacttgcaggaaccagatttaatctcaattctccaaaacaactttctgaagttttatttgagaggttaaaacttccttctggtaagaaaggaaaaacaggatattctacgtcgtcttctgtgcttcaaaacttaataaatgctcatcctatagtgagaaaaatcctccaatatagagaactctataaattgaagagtacttatgtggatgctattcctaatctggttaatccacaaacaggtagagttcatacaaaatttaatcctacaggtacagctacaggaagaataagtagtagtgaacctaatcttcagaatattcctataaaaagtgaagaaggtagaaagataagaagagccttcgtgtcagaagatggatattttcttgtatctcttgattattctcagatagagctaaggattatggctcatctttctcaggagcctaaattaatatctgccttccaaaaaggagaggatattcatagaagaacagcatcggagatttttggagtgccagaggaagaagttgatgatcttttaaggtcaagggcaaaggccgttaattttggaattatttatggtatctcttcttttggactttctgagactgtaagtattacaccagaagaggcagagaaatttatagactcgtattttaagcactatccaagagtgaagctttttatagataagactattcatgaggcaagagaaaaactgtacgttaaaaccttatttggcagaaaaagatatcaacctgagattaagagcataaataaacaggtaaggaatgcctatgaaaggatagcaataaatgcgccaattcagggaacagctgctgatattataaaacttgccatgatagaaatttacaaggagattgaaaataaaaatctcaagtcaagaatactccttcaaattcatgatgagcttattcttgaagtgccagaggaggagatggaatttactcctttaatggcaaaggaaaaaatggaaaaggtggtagaactttcggttcctcttgtagttgaaatctcggtaggtaaaaatcttgctgaattaaaatgagctataagattggtcgac

SEQ ID NO: 1955 - DNA, 2673 bp, Artificial Sequence
  Description of Artificial Sequence: Synthetic DNA sequence of Dictyoglomus thermophilum DNA I781G
atgaaatacctgctgccgaccgctgctgctggtctgctgctcctcgctgcccagccggcgatggccatggatatcggaattaattcggatccgaaatctctgtgggatctttttcaagaaaataccgagaaagagtccaaaaggaagattctgattattgatggctcaagcctcatatacagggtttattacgcccttccccctttaaagacaaaaaatggtgaattaactaatgctctttatggcttcataagaatacttttaaaggccgtagaagattttaatcctgatcttgtaggcgttgcctttgatagacctgaacctacttttaggcatgtgatttataaagagtataaggctaagagaccacctatgaaggatgatttgaaagcgcagataccatggataagagaatttctaaggttaaatgatatacctctattggaagagcctggctatgaagcggatgatataatagctactatagtgaataaatataaggatgatttaaaatatattctctctggagatttagatcttttgcaattagtctcggacaaaacctttctaatacatcctcaaaagggaattactgagtttactatttatgatccaaaagctgtaaaggataggtttggagtagagccctataagattcccttatacaaagtattagtaggggacgaatctgataatattccaggagtaaatggaataggtcctaaaaaggcctcaaagattcttgagaaaatttcaagtgtagatgaatttaaaagtaaaataaaagttttggatagtgatttaagggagcttattgagaaaaattggaatattattgaaagaaatttagaacttgttactttaaaaaatatagataaggatcttattcttaaacccttcgagattaaaagagatgaaaaagtaatagattttttgaagagatatgaacttaagagtattcttcaaaagttatttcctgatcttcaagaggaagaaaatatagagattaaagatgtcgaagagatcaattttaatgaggtagaaaaagaaggctactttgcctttaaatgtcttggagatagggcttttgagggtatttctctttccttcaaggagggggaaggatattttatatctccttttgatttcaataatgagataagaaagaagattgaaaatataatttcttcagagaatgttaaaaaaattggctcttatattcaaagagatttacattttttaaactgtaaaataaagggcgatgtatttgatgttagtctcgcatcttatcttttgaaccctgaaagacaaaatcactctcttgatattttgataggagagtatctaaataaaacctcttttattcctcaaaaatacgctggttatctttttccgttaaagtctattcttgaggagaggataaagaatgaagggttagaatttgtactttataacatagagattccattaatccctgtactttactccatggagaagtgggggataaaggtagataaggaatatttaaaacagctttctgatgaattctgcgagagaattaaaaaattggaagaagagatatatgaacttgcaggaaccagatttaatctcaattctccaaaacaactttctgaagttttatttgagaggttaaaacttccttctggtaagaaaggaaaaacaggatattctacgtcgtcttctgtgcttcaaaacttaataaatgctcatcctatagtgagaaaaatcctccaatatagagaactctataaattgaagagtacttatgtggatgctattcctaatctggttaatccacaaacaggtagagttcatacaaaatttaatcctacaggtacagctacaggaagaataagtagtagtgaacctaatcttcagaatattcctataaaaagtgaagaaggtagaaagataagaagagccttcgtgtcagaagatggatattttcttgtatctcttgattattctcagatagagctaaggattatggctcatctttctcaggagcctaaattaatatctgccttccaaaaaggagaggatattcatagaagaacagcatcggagatttttggagtgccagaggaagaagttgatgatcttttaaggtcaagggcaaaggccgttaattttggaattatttatggtatctcttcttttggactttctgagactgtaagtattacaccagaagaggcagagaaatttatagactcgtattttaagcactatccaagagtgaagctttttatagataagactattcatgaggcaagagaaaaactgtacgttaaaaccttatttggcagaaaaagatatggtcctgagattaagagcataaataaacaggtaaggaatgcctatgaaaggatagcaataaatgcgccaattcagggaacagctgctgatattataaaacttgccatgatagaaatttacaaggagattgaaaataaaaatctcaagtcaagaatactccttcaaattcatgatgagcttattcttgaagtgccagaggaggagatggaatttactcctttaatggcaaaggaaaaaatggaaaaggtggtagaactttcggttcctcttgtagttgaaatctcggtaggtaaaaatcttgctgaattaaaatgagctataagattggtcgac

SEQ ID NO: 1956 - DNA, 2673 bp, Artificial Sequence
  Description of Artificial Sequence: Synthetic DNA sequence of Dictyoglomus thermophilum DNA I781H
atgaaatacctgctgccgaccgctgctgctggtctgctgctcctcgctgcccagccggcgatggccatggatatcggaattaattcggatccgaaatctctgtgggatctttttcaagaaaataccgagaaagagtccaaaaggaagattctgattattgatggctcaagcctcatatacagggtttattacgcccttccccctttaaagacaaaaaatggtgaattaactaatgctctttatggcttcataagaatacttttaaaggccgtagaagattttaatcctgatcttgtaggcgttgcctttgatagacctgaacctacttttaggcatgtgatttataaagagtataaggctaagagaccacctatgaaggatgatttgaaagcgcagataccatggataagagaatttctaaggttaaatgatatacctctattggaagagcctggctatgaagcggatgatataatagctactatagtgaataaatataaggatgatttaaaatatattctctctggagatttagatcttttgcaattagtctcggacaaaacctttctaatacatcctcaaaagggaattactgagtttactatttatgatccaaaagctgtaaaggataggtttggagtagagccctataagattcccttatacaaagtattagtaggggacgaatctgataatattccaggagtaaatggaataggtcctaaaaaggcctcaaagattcttgagaaaatttcaagtgtagatgaatttaaaagtaaaataaaagttttggatagtgatttaagggagcttattgagaaaaattggaatattattgaaagaaatttagaacttgttactttaaaaaatatagataaggatcttattcttaaacccttcgagattaaaagagatgaaaaagtaatagattttttgaagagatatgaacttaagagtattcttcaaaagttatttcctgatcttcaagaggaagaaaatatagagattaaagatgtcgaagagatcaattttaatgaggtagaaaaagaaggctactttgcctttaaatgtcttggagatagggcttttgagggtatttctctttccttcaaggagggggaaggatattttatatctccttttgatttcaataatgagataagaaagaagattgaaaatataatttcttcagagaatgttaaaaaaattggctcttatattcaaagagatttacattttttaaactgtaaaataaagggcgatgtatttgatgttagtctcgcatcttatcttttgaaccctgaaagacaaaatcactctcttgatattttgataggagagtatctaaataaaacctcttttattcctcaaaaatacgctggttatctttttccgttaaagtctattcttgaggagaggataaagaatgaagggttagaatttgtactttataacatagagattccattaatccctgtactttactccatggagaagtgggggataaaggtagataaggaatatttaaaacagctttctgatgaattctgcgagagaattaaaaaattggaagaagagatatatgaacttgcaggaaccagatttaatctcaattctccaaaacaactttctgaagttttatttgagaggttaaaacttccttctggtaagaaaggaaaaacaggatattctacgtcgtcttctgtgcttcaaaacttaataaatgctcatcctatagtgagaaaaatcctccaatatagagaactctataaattgaagagtacttatgtggatgctattcctaatctggttaatccacaaacaggtagagttcatacaaaatttaatcctacaggtacagctacaggaagaataagtagtagtgaacctaatcttcagaatattcctataaaaagtgaagaaggtagaaagataagaagagccttcgtgtcagaagatggatattttcttgtatctcttgattattctcagatagagctaaggattatggctcatctttctcaggagcctaaattaatatctgccttccaaaaaggagaggatattcatagaagaacagcatcggagatttttggagtgccagaggaagaagttgatgatcttttaaggtcaagggcaaaggccgttaattttggaattatttatggtatctcttcttttggactttctgagactgtaagtattacaccagaagaggcagagaaatttatagactcgtattttaagcactatccaagagtgaagctttttatagataagactattcatgaggcaagagaaaaactgtacgttaaaaccttatttggcagaaaaagatatcatcctgagattaagagcataaataaacaggtaaggaatgcctatgaaaggatagcaataaatgcgccaattcagggaacagctgctgatattataaaacttgccatgatagaaatttacaaggagattgaaaataaaaatctcaagtcaagaatactccttcaaattcatgatgagcttattcttgaagtgccagaggaggagatggaatttactcctttaatggcaaaggaaaaaatggaaaaggtggtagaactttcggttcctcttgtagttgaaatctcggtaggtaaaaatcttgctgaattaaaatgagctataagattggtcgac

SEQ ID NO: 1957 - DNA, 2673 bp, Artificial Sequence
  Description of Artificial Sequence: Synthetic DNA sequence of Dictyoglomus thermophilum DNA I781L
atgaaatacctgctgccgaccgctgctgctggtctgctgctcctcgctgcccagccggcgatggccatggatatcggaattaattcggatccgaaatctctgtgggatctttttcaagaaaataccgagaaagagtccaaaaggaagattctgattattgatggctcaagcctcatatacagggtttattacgcccttccccctttaaagacaaaaaatggtgaattaactaatgctctttatggcttcataagaatacttttaaaggccgtagaagattttaatcctgatcttgtaggcgttgcctttgatagacctgaacctacttttaggcatgtgatttataaagagtataaggctaagagaccacctatgaaggatgatttgaaagcgcagataccatggataagagaatttctaaggttaaatgatatacctctattggaagagcctggctatgaagcggatgatataatagctactatagtgaataaatataaggatgatttaaaatatattctctctggagatttagatcttttgcaattagtctcggacaaaacctttctaatacatcctcaaaagggaattactgagtttactatttatgatccaaaagctgtaaaggataggtttggagtagagccctataagattcccttatacaaagtattagtaggggacgaatctgataatattccaggagtaaatggaataggtcctaaaaaggcctcaaagattcttgagaaaatttcaagtgtagatgaatttaaaagtaaaataaaagttttggatagtgatttaagggagcttattgagaaaaattggaatattattgaaagaaatttagaacttgttactttaaaaaatatagataaggatcttattcttaaacccttcgagattaaaagagatgaaaaagtaatagattttttgaagagatatgaacttaagagtattcttcaaaagttatttcctgatcttcaagaggaagaaaatatagagattaaagatgtcgaagagatcaattttaatgaggtagaaaaagaaggctactttgcctttaaatgtcttggagatagggcttttgagggtatttctctttccttcaaggagggggaaggatattttatatctccttttgatttcaataatgagataagaaagaagattgaaaatataatttcttcagagaatgttaaaaaaattggctcttatattcaaagagatttacattttttaaactgtaaaataaagggcgatgtatttgatgttagtctcgcatcttatcttttgaaccctgaaagacaaaatcactctcttgatattttgataggagagtatctaaataaaacctcttttattcctcaaaaatacgctggttatctttttccgttaaagtctattcttgaggagaggataaagaatgaagggttagaatttgtactttataacatagagattccattaatccctgtactttactccatggagaagtgggggataaaggtagataaggaatatttaaaacagctttctgatgaattctgcgagagaattaaaaaattggaagaagagatatatgaacttgcaggaaccagatttaatctcaattctccaaaacaactttctgaagttttatttgagaggttaaaacttccttctggtaagaaaggaaaaacaggatattctacgtcgtcttctgtgcttcaaaacttaataaatgctcatcctatagtgagaaaaatcctccaatatagagaactctataaattgaagagtacttatgtggatgctattcctaatctggttaatccacaaacaggtagagttcatacaaaatttaatcctacaggtacagctacaggaagaataagtagtagtgaacctaatcttcagaatattcctataaaaagtgaagaaggtagaaagataagaagagccttcgtgtcagaagatggatattttcttgtatctcttgattattctcagatagagctaaggattatggctcatctttctcaggagcctaaattaatatctgccttccaaaaaggagaggatattcatagaagaacagcatcggagatttttggagtgccagaggaagaagttgatgatcttttaaggtcaagggcaaaggccgttaattttggaattatttatggtatctcttcttttggactttctgagactgtaagtattacaccagaagaggcagagaaatttatagactcgtattttaagcactatccaagagtgaagctttttatagataagactattcatgaggcaagagaaaaactgtacgttaaaaccttatttggcagaaaaagatatcttcctgagattaagagcataaataaacaggtaaggaatgcctatgaaaggatagcaataaatgcgccaattcagggaacagctgctgatattataaaacttgccatgatagaaatttacaaggagattgaaaataaaaatctcaagtcaagaatactccttcaaattcatgatgagcttattcttgaagtgccagaggaggagatggaatttactcctttaatggcaaaggaaaaaatggaaaaggtggtagaactttcggttcctcttgtagttgaaatctcggtaggtaaaaatcttgctgaattaaaatgagctataagattggtcgac

SEQ ID NO: 1958 - DNA, 2673 bp, Artificial Sequence
  Description of Artificial Sequence: Synthetic DNA sequence of Dictyoglomus thermophilum DNA I781K
atgaaatacctgctgccgaccgctgctgctggtctgctgctcctcgctgcccagccggcgatggccatggatatcggaattaattcggatccgaaatctctgtgggatctttttcaagaaaataccgagaaagagtccaaaaggaagattctgattattgatggctcaagcctcatatacagggtttattacgcccttccccctttaaagacaaaaaatggtgaattaactaatgctctttatggcttcataagaatacttttaaaggccgtagaagattttaatcctgatcttgtaggcgttgcctttgatagacctgaacctacttttaggcatgtgatttataaagagtataaggctaagagaccacctatgaaggatgatttgaaagcgcagataccatggataagagaatttctaaggttaaatgatatacctctattggaagagcctggctatgaagcggatgatataatagctactatagtgaataaatataaggatgatttaaaatatattctctctggagatttagatcttttgcaattagtctcggacaaaacctttctaatacatcctcaaaagggaattactgagtttactatttatgatccaaaagctgtaaaggataggtttggagtagagccctataagattcccttatacaaagtattagtaggggacgaatctgataatattccaggagtaaatggaataggtcctaaaaaggcctcaaagattcttgagaaaatttcaagtgtagatgaatttaaaagtaaaataaaagttttggatagtgatttaagggagcttattgagaaaaattggaatattattgaaagaaatttagaacttgttactttaaaaaatatagataaggatcttattcttaaacccttcgagattaaaagagatgaaaaagtaatagattttttgaagagatatgaacttaagagtattcttcaaaagttatttcctgatcttcaagaggaagaaaatatagagattaaagatgtcgaagagatcaattttaatgaggtagaaaaagaaggctactttgcctttaaatgtcttggagatagggcttttgagggtatttctctttccttcaaggagggggaaggatattttatatctccttttgatttcaataatgagataagaaagaagattgaaaatataatttcttcagagaatgttaaaaaaattggctcttatattcaaagagatttacattttttaaactgtaaaataaagggcgatgtatttgatgttagtctcgcatcttatcttttgaaccctgaaagacaaaatcactctcttgatattttgataggagagtatctaaataaaacctcttttattcctcaaaaatacgctggttatctttttccgttaaagtctattcttgaggagaggataaagaatgaagggttagaatttgtactttataacatagagattccattaatccctgtactttactccatggagaagtgggggataaaggtagataaggaatatttaaaacagctttctgatgaattctgcgagagaattaaaaaattggaagaagagatatatgaacttgcaggaaccagatttaatctcaattctccaaaacaactttctgaagttttatttgagaggttaaaacttccttctggtaagaaaggaaaaacaggatattctacgtcgtcttctgtgcttcaaaacttaataaatgctcatcctatagtgagaaaaatcctccaatatagagaactctataaattgaagagtacttatgtggatgctattcctaatctggttaatccacaaacaggtagagttcatacaaaatttaatcctacaggtacagctacaggaagaataagtagtagtgaacctaatcttcagaatattcctataaaaagtgaagaaggtagaaagataagaagagccttcgtgtcagaagatggatattttcttgtatctcttgattattctcagatagagctaaggattatggctcatctttctcaggagcctaaattaatatctgccttccaaaaaggagaggatattcatagaagaacagcatcggagatttttggagtgccagaggaagaagttgatgatcttttaaggtcaagggcaaaggccgttaattttggaattatttatggtatctcttcttttggactttctgagactgtaagtattacaccagaagaggcagagaaatttatagactcgtattttaagcactatccaagagtgaagctttttatagataagactattcatgaggcaagagaaaaactgtacgttaaaaccttatttggcagaaaaagatataaacctgagattaagagcataaataaacaggtaaggaatgcctatgaaaggatagcaataaatgcgccaattcagggaacagctgctgatattataaaacttgccatgatagaaatttacaaggagattgaaaataaaaatctcaagtcaagaatactccttcaaattcatgatgagcttattcttgaagtgccagaggaggagatggaatttactcctttaatggcaaaggaaaaaatggaaaaggtggtagaactttcggttcctcttgtagttgaaatctcggtaggtaaaaatcttgctgaattaaaatgagctataagattggtcgac

SEQ ID NO: 1959 - DNA, 2673 bp, Artificial Sequence
  Description of Artificial Sequence: Synthetic DNA sequence of Dictyoglomus thermophilum DNA I781M
atgaaatacctgctgccgaccgctgctgctggtctgctgctcctcgctgcccagccggcgatggccatggatatcggaattaattcggatccgaaatctctgtgggatctttttcaagaaaataccgagaaagagtccaaaaggaagattctgattattgatggctcaagcctcatatacagggtttattacgcccttccccctttaaagacaaaaaatggtgaattaactaatgctctttatggcttcataagaatacttttaaaggccgtagaagattttaatcctgatcttgtaggcgttgcctttgatagacctgaacctacttttaggcatgtgatttataaagagtataaggctaagagaccacctatgaaggatgatttgaaagcgcagataccatggataagagaatttctaaggttaaatgatatacctctattggaagagcctggctatgaagcggatgatataatagctactatagtgaataaatataaggatgatttaaaatatattctctctggagatttagatcttttgcaattagtctcggacaaaacctttctaatacatcctcaaaagggaattactgagtttactatttatgatccaaaagctgtaaaggataggtttggagtagagccctataagattcccttatacaaagtattagtaggggacgaatctgataatattccaggagtaaatggaataggtcctaaaaaggcctcaaagattcttgagaaaatttcaagtgtagatgaatttaaaagtaaaataaaagttttggatagtgatttaagggagcttattgagaaaaattggaatattattgaaagaaatttagaacttgttactttaaaaaatatagataaggatcttattcttaaacccttcgagattaaaagagatgaaaaagtaatagattttttgaagagatatgaacttaagagtattcttcaaaagttatttcctgatcttcaagaggaagaaaatatagagattaaagatgtcgaagagatcaattttaatgaggtagaaaaagaaggctactttgcctttaaatgtcttggagatagggcttttgagggtatttctctttccttcaaggagggggaaggatattttatatctccttttgatttcaataatgagataagaaagaagattgaaaatataatttcttcagagaatgttaaaaaaattggctcttatattcaaagagatttacattttttaaactgtaaaataaagggcgatgtatttgatgttagtctcgcatcttatcttttgaaccctgaaagacaaaatcactctcttgatattttgataggagagtatctaaataaaacctcttttattcctcaaaaatacgctggttatctttttccgttaaagtctattcttgaggagaggataaagaatgaagggttagaatttgtactttataacatagagattccattaatccctgtactttactccatggagaagtgggggataaaggtagataaggaatatttaaaacagctttctgatgaattctgcgagagaattaaaaaattggaagaagagatatatgaacttgcaggaaccagatttaatctcaattctccaaaacaactttctgaagttttatttgagaggttaaaacttccttctggtaagaaaggaaaaacaggatattctacgtcgtcttctgtgcttcaaaacttaataaatgctcatcctatagtgagaaaaatcctccaatatagagaactctataaattgaagagtacttatgtggatgctattcctaatctggttaatccacaaacaggtagagttcatacaaaatttaatcctacaggtacagctacaggaagaataagtagtagtgaacctaatcttcagaatattcctataaaaagtgaagaaggtagaaagataagaagagccttcgtgtcagaagatggatattttcttgtatctcttgattattctcagatagagctaaggattatggctcatctttctcaggagcctaaattaatatctgccttccaaaaaggagaggatattcatagaagaacagcatcggagatttttggagtgccagaggaagaagttgatgatcttttaaggtcaagggcaaaggccgttaattttggaattatttatggtatctcttcttttggactttctgagactgtaagtattacaccagaagaggcagagaaatttatagactcgtattttaagcactatccaagagtgaagctttttatagataagactattcatgaggcaagagaaaaactgtacgttaaaaccttatttggcagaaaaagatatatgcctgagattaagagcataaataaacaggtaaggaatgcctatgaaaggatagcaataaatgcgccaattcagggaacagctgctgatattataaaacttgccatgatagaaatttacaaggagattgaaaataaaaatctcaagtcaagaatactccttcaaattcatgatgagcttattcttgaagtgccagaggaggagatggaatttactcctttaatggcaaaggaaaaaatggaaaaggtggtagaactttcggttcctcttgtagttgaaatctcggtaggtaaaaatcttgctgaattaaaatgagctataagattggtcgac

SEQ ID NO: 1960 - DNA, 2673 bp, Artificial Sequence
  Description of Artificial Sequence: Synthetic DNA sequence of Dictyoglomus thermophilum DNA I781F
atgaaatacctgctgccgaccgctgctgctggtctgctgctcctcgctgcccagccggcgatggccatggatatcggaattaattcggatccgaaatctctgtgggatctttttcaagaaaataccgagaaagagtccaaaaggaagattctgattattgatggctcaagcctcatatacagggtttattacgcccttccccctttaaagacaaaaaatggtgaattaactaatgctctttatggcttcataagaatacttttaaaggccgtagaagattttaatcctgatcttgtaggcgttgcctttgatagacctgaacctacttttaggcatgtgatttataaagagtataaggctaagagaccacctatgaaggatgatttgaaagcgcagataccatggataagagaatttctaaggttaaatgatatacctctattggaagagcctggctatgaagcggatgatataatagctactatagtgaataaatataaggatgatttaaaatatattctctctggagatttagatcttttgcaattagtctcggacaaaacctttctaatacatcctcaaaagggaattactgagtttactatttatgatccaaaagctgtaaaggataggtttggagtagagccctataagattcccttatacaaagtattagtaggggacgaatctgataatattccaggagtaaatggaataggtcctaaaaaggcctcaaagattcttgagaaaatttcaagtgtagatgaatttaaaagtaaaataaaagttttggatagtgatttaagggagcttattgagaaaaattggaatattattgaaagaaatttagaacttgttactttaaaaaatatagataaggatcttattcttaaacccttcgagattaaaagagatgaaaaagtaatagattttttgaagagatatgaacttaagagtattcttcaaaagttatttcctgatcttcaagaggaagaaaatatagagattaaagatgtcgaagagatcaattttaatgaggtagaaaaagaaggctactttgcctttaaatgtcttggagatagggcttttgagggtatttctctttccttcaaggagggggaaggatattttatatctccttttgatttcaataatgagataagaaagaagattgaaaatataatttcttcagagaatgttaaaaaaattggctcttatattcaaagagatttacattttttaaactgtaaaataaagggcgatgtatttgatgttagtctcgcatcttatcttttgaaccctgaaagacaaaatcactctcttgatattttgataggagagtatctaaataaaacctcttttattcctcaaaaatacgctggttatctttttccgttaaagtctattcttgaggagaggataaagaatgaagggttagaatttgtactttataacatagagattccattaatccctgtactttactccatggagaagtgggggataaaggtagataaggaatatttaaaacagctttctgatgaattctgcgagagaattaaaaaattggaagaagagatatatgaacttgcaggaaccagatttaatctcaattctccaaaacaactttctgaagttttatttgagaggttaaaacttccttctggtaagaaaggaaaaacaggatattctacgtcgtcttctgtgcttcaaaacttaataaatgctcatcctatagtgagaaaaatcctccaatatagagaactctataaattgaagagtacttatgtggatgctattcctaatctggttaatccacaaacaggtagagttcatacaaaatttaatcctacaggtacagctacaggaagaataagtagtagtgaacctaatcttcagaatattcctataaaaagtgaagaaggtagaaagataagaagagccttcgtgtcagaagatggatattttcttgtatctcttgattattctcagatagagctaaggattatggctcatctttctcaggagcctaaattaatatctgccttccaaaaaggagaggatattcatagaagaacagcatcggagatttttggagtgccagaggaagaagttgatgatcttttaaggtcaagggcaaaggccgttaattttggaattatttatggtatctcttcttttggactttctgagactgtaagtattacaccagaagaggcagagaaatttatagactcgtattttaagcactatccaagagtgaagctttttatagataagactattcatgaggcaagagaaaaactgtacgttaaaaccttatttggcagaaaaagatattttcctgagattaagagcataaataaacaggtaaggaatgcctatgaaaggatagcaataaatgcgccaattcagggaacagctgctgatattataaaacttgccatgatagaaatttacaaggagattgaaaataaaaatctcaagtcaagaatactccttcaaattcatgatgagcttattcttgaagtgccagaggaggagatggaatttactcctttaatggcaaaggaaaaaatggaaaaggtggtagaactttcggttcctcttgtagttgaaatctcggtaggtaaaaatcttgctgaattaaaatgagctataagattggtcgac

SEQ ID NO: 1961 - DNA, 2673 bp, Artificial Sequence
  Description of Artificial Sequence: Synthetic DNA sequence of Dictyoglomus thermophilum DNA I781P
atgaaatacctgctgccgaccgctgctgctggtctgctgctcctcgctgcccagccggcgatggccatggatatcggaattaattcggatccgaaatctctgtgggatctttttcaagaaaataccgagaaagagtccaaaaggaagattctgattattgatggctcaagcctcatatacagggtttattacgcccttccccctttaaagacaaaaaatggtgaattaactaatgctctttatggcttcataagaatacttttaaaggccgtagaagattttaatcctgatcttgtaggcgttgcctttgatagacctgaacctacttttaggcatgtgatttataaagagtataaggctaagagaccacctatgaaggatgatttgaaagcgcagataccatggataagagaatttctaaggttaaatgatatacctctattggaagagcctggctatgaagcggatgatataatagctactatagtgaataaatataaggatgatttaaaatatattctctctggagatttagatcttttgcaattagtctcggacaaaacctttctaatacatcctcaaaagggaattactgagtttactatttatgatccaaaagctgtaaaggataggtttggagtagagccctataagattcccttatacaaagtattagtaggggacgaatctgataatattccaggagtaaatggaataggtcctaaaaaggcctcaaagattcttgagaaaatttcaagtgtagatgaatttaaaagtaaaataaaagttttggatagtgatttaagggagcttattgagaaaaattggaatattattgaaagaaatttagaacttgttactttaaaaaatatagataaggatcttattcttaaacccttcgagattaaaagagatgaaaaagtaatagattttttgaagagatatgaacttaagagtattcttcaaaagttatttcctgatcttcaagaggaagaaaatatagagattaaagatgtcgaagagatcaattttaatgaggtagaaaaagaaggctactttgcctttaaatgtcttggagatagggcttttgagggtatttctctttccttcaaggagggggaaggatattttatatctccttttgatttcaataatgagataagaaagaagattgaaaatataatttcttcagagaatgttaaaaaaattggctcttatattcaaagagatttacattttttaaactgtaaaataaagggcgatgtatttgatgttagtctcgcatcttatcttttgaaccctgaaagacaaaatcactctcttgatattttgataggagagtatctaaataaaacctcttttattcctcaaaaatacgctggttatctttttccgttaaagtctattcttgaggagaggataaagaatgaagggttagaatttgtactttataacatagagattccattaatccctgtactttactccatggagaagtgggggataaaggtagataaggaatatttaaaacagctttctgatgaattctgcgagagaattaaaaaattggaagaagagatatatgaacttgcaggaaccagatttaatctcaattctccaaaacaactttctgaagttttatttgagaggttaaaacttccttctggtaagaaaggaaaaacaggatattctacgtcgtcttctgtgcttcaaaacttaataaatgctcatcctatagtgagaaaaatcctccaatatagagaactctataaattgaagagtacttatgtggatgctattcctaatctggttaatccacaaacaggtagagttcatacaaaatttaatcctacaggtacagctacaggaagaataagtagtagtgaacctaatcttcagaatattcctataaaaagtgaagaaggtagaaagataagaagagccttcgtgtcagaagatggatattttcttgtatctcttgattattctcagatagagctaaggattatggctcatctttctcaggagcctaaattaatatctgccttccaaaaaggagaggatattcatagaagaacagcatcggagatttttggagtgccagaggaagaagttgatgatcttttaaggtcaagggcaaaggccgttaattttggaattatttatggtatctcttcttttggactttctgagactgtaagtattacaccagaagaggcagagaaatttatagactcgtattttaagcactatccaagagtgaagctttttatagataagactattcatgaggcaagagaaaaactgtacgttaaaaccttatttggcagaaaaagatatcctcctgagattaagagcataaataaacaggtaaggaatgcctatgaaaggatagcaataaatgcgccaattcagggaacagctgctgatattataaaacttgccatgatagaaatttacaaggagattgaaaataaaaatctcaagtcaagaatactccttcaaattcatgatgagcttattcttgaagtgccagaggaggagatggaatttactcctttaatggcaaaggaaaaaatggaaaaggtggtagaactttcggttcctcttgtagttgaaatctcggtaggtaaaaatcttgctgaattaaaatgagctataagattggtcgac

SEQ ID NO: 1962 - DNA, 2673 bp, Artificial Sequence
  Description of Artificial Sequence: Synthetic DNA sequence of Dictyoglomus thermophilum DNA I781S
atgaaatacctgctgccgaccgctgctgctggtctgctgctcctcgctgcccagccggcgatggccatggatatcggaattaattcggatccgaaatctctgtgggatctttttcaagaaaataccgagaaagagtccaaaaggaagattctgattattgatggctcaagcctcatatacagggtttattacgcccttccccctttaaagacaaaaaatggtgaattaactaatgctctttatggcttcataagaatacttttaaaggccgtagaagattttaatcctgatcttgtaggcgttgcctttgatagacctgaacctacttttaggcatgtgatttataaagagtataaggctaagagaccacctatgaaggatgatttgaaagcgcagataccatggataagagaatttctaaggttaaatgatatacctctattggaagagcctggctatgaagcggatgatataatagctactatagtgaataaatataaggatgatttaaaatatattctctctggagatttagatcttttgcaattagtctcggacaaaacctttctaatacatcctcaaaagggaattactgagtttactatttatgatccaaaagctgtaaaggataggtttggagtagagccctataagattcccttatacaaagtattagtaggggacgaatctgataatattccaggagtaaatggaataggtcctaaaaaggcctcaaagattcttgagaaaatttcaagtgtagatgaatttaaaagtaaaataaaagttttggatagtgatttaagggagcttattgagaaaaattggaatattattgaaagaaatttagaacttgttactttaaaaaatatagataaggatcttattcttaaacccttcgagattaaaagagatgaaaaagtaatagattttttgaagagatatgaacttaagagtattcttcaaaagttatttcctgatcttcaagaggaagaaaatatagagattaaagatgtcgaagagatcaattttaatgaggtagaaaaagaaggctactttgcctttaaatgtcttggagatagggcttttgagggtatttctctttccttcaaggagggggaaggatattttatatctccttttgatttcaataatgagataagaaagaagattgaaaatataatttcttcagagaatgttaaaaaaattggctcttatattcaaagagatttacattttttaaactgtaaaataaagggcgatgtatttgatgttagtctcgcatcttatcttttgaaccctgaaagacaaaatcactctcttgatattttgataggagagtatctaaataaaacctcttttattcctcaaaaatacgctggttatctttttccgttaaagtctattcttgaggagaggataaagaatgaagggttagaatttgtactttataacatagagattccattaatccctgtactttactccatggagaagtgggggataaaggtagataaggaatatttaaaacagctttctgatgaattctgcgagagaattaaaaaattggaagaagagatatatgaacttgcaggaaccagatttaatctcaattctccaaaacaactttctgaagttttatttgagaggttaaaacttccttctggtaagaaaggaaaaacaggatattctacgtcgtcttctgtgcttcaaaacttaataaatgctcatcctatagtgagaaaaatcctccaatatagagaactctataaattgaagagtacttatgtggatgctattcctaatctggttaatccacaaacaggtagagttcatacaaaatttaatcctacaggtacagctacaggaagaataagtagtagtgaacctaatcttcagaatattcctataaaaagtgaagaaggtagaaagataagaagagccttcgtgtcagaagatggatattttcttgtatctcttgattattctcagatagagctaaggattatggctcatctttctcaggagcctaaattaatatctgccttccaaaaaggagaggatattcatagaagaacagcatcggagatttttggagtgccagaggaagaagttgatgatcttttaaggtcaagggcaaaggccgttaattttggaattatttatggtatctcttcttttggactttctgagactgtaagtattacaccagaagaggcagagaaatttatagactcgtattttaagcactatccaagagtgaagctttttatagataagactattcatgaggcaagagaaaaactgtacgttaaaaccttatttggcagaaaaagatattctcctgagattaagagcataaataaacaggtaaggaatgcctatgaaaggatagcaataaatgcgccaattcagggaacagctgctgatattataaaacttgccatgatagaaatttacaaggagattgaaaataaaaatctcaagtcaagaatactccttcaaattcatgatgagcttattcttgaagtgccagaggaggagatggaatttactcctttaatggcaaaggaaaaaatggaaaaggtggtagaactttcggttcctcttgtagttgaaatctcggtaggtaaaaatcttgctgaattaaaatgagctataagattggtcgac

SEQ ID NO: 1963 - DNA, 2673 bp, Artificial Sequence
  Description of Artificial Sequence: Synthetic DNA sequence of Dictyoglomus thermophilum DNA I781T
atgaaatacctgctgccgaccgctgctgctggtctgctgctcctcgctgcccagccggcgatggccatggatatcggaattaattcggatccgaaatctctgtgggatctttttcaagaaaataccgagaaagagtccaaaaggaagattctgattattgatggctcaagcctcatatacagggtttattacgcccttccccctttaaagacaaaaaatggtgaattaactaatgctctttatggcttcataagaatacttttaaaggccgtagaagattttaatcctgatcttgtaggcgttgcctttgatagacctgaacctacttttaggcatgtgatttataaagagtataaggctaagagaccacctatgaaggatgatttgaaagcgcagataccatggataagagaatttctaaggttaaatgatatacctctattggaagagcctggctatgaagcggatgatataatagctactatagtgaataaatataaggatgatttaaaatatattctctctggagatttagatcttttgcaattagtctcggacaaaacctttctaatacatcctcaaaagggaattactgagtttactatttatgatccaaaagctgtaaaggataggtttggagtagagccctataagattcccttatacaaagtattagtaggggacgaatctgataatattccaggagtaaatggaataggtcctaaaaaggcctcaaagattcttgagaaaatttcaagtgtagatgaatttaaaagtaaaataaaagttttggatagtgatttaagggagcttattgagaaaaattggaatattattgaaagaaatttagaacttgttactttaaaaaatatagataaggatcttattcttaaacccttcgagattaaaagagatgaaaaagtaatagattttttgaagagatatgaacttaagagtattcttcaaaagttatttcctgatcttcaagaggaagaaaatatagagattaaagatgtcgaagagatcaattttaatgaggtagaaaaagaaggctactttgcctttaaatgtcttggagatagggcttttgagggtatttctctttccttcaaggagggggaaggatattttatatctccttttgatttcaataatgagataagaaagaagattgaaaatataatttcttcagagaatgttaaaaaaattggctcttatattcaaagagatttacattttttaaactgtaaaataaagggcgatgtatttgatgttagtctcgcatcttatcttttgaaccctgaaagacaaaatcactctcttgatattttgataggagagtatctaaataaaacctcttttattcctcaaaaatacgctggttatctttttccgttaaagtctattcttgaggagaggataaagaatgaagggttagaatttgtactttataacatagagattccattaatccctgtactttactccatggagaagtgggggataaaggtagataaggaatatttaaaacagctttctgatgaattctgcgagagaattaaaaaattggaagaagagatatatgaacttgcaggaaccagatttaatctcaattctccaaaacaactttctgaagttttatttgagaggttaaaacttccttctggtaagaaaggaaaaacaggatattctacgtcgtcttctgtgcttcaaaacttaataaatgctcatcctatagtgagaaaaatcctccaatatagagaactctataaattgaagagtacttatgtggatgctattcctaatctggttaatccacaaacaggtagagttcatacaaaatttaatcctacaggtacagctacaggaagaataagtagtagtgaacctaatcttcagaatattcctataaaaagtgaagaaggtagaaagataagaagagccttcgtgtcagaagatggatattttcttgtatctcttgattattctcagatagagctaaggattatggctcatctttctcaggagcctaaattaatatctgccttccaaaaaggagaggatattcatagaagaacagcatcggagatttttggagtgccagaggaagaagttgatgatcttttaaggtcaagggcaaaggccgttaattttggaattatttatggtatctcttcttttggactttctgagactgtaagtattacaccagaagaggcagagaaatttatagactcgtattttaagcactatccaagagtgaagctttttatagataagactattcatgaggcaagagaaaaactgtacgttaaaaccttatttggcagaaaaagatatactcctgagattaagagcataaataaacaggtaaggaatgcctatgaaaggatagcaataaatgcgccaattcagggaacagctgctgatattataaaacttgccatgatagaaatttacaaggagattgaaaataaaaatctcaagtcaagaatactccttcaaattcatgatgagcttattcttgaagtgccagaggaggagatggaatttactcctttaatggcaaaggaaaaaatggaaaaggtggtagaactttcggttcctcttgtagttgaaatctcggtaggtaaaaatcttgctgaattaaaatgagctataagattggtcgac

SEQ ID NO: 1964 - DNA, 2673 bp, Artificial Sequence
  Description of Artificial Sequence: Synthetic DNA sequence of Dictyoglomus thermophilum DNA I781W
atgaaatacctgctgccgaccgctgctgctggtctgctgctcctcgctgcccagccggcgatggccatggatatcggaattaattcggatccgaaatctctgtgggatctttttcaagaaaataccgagaaagagtccaaaaggaagattctgattattgatggctcaagcctcatatacagggtttattacgcccttccccctttaaagacaaaaaatggtgaattaactaatgctctttatggcttcataagaatacttttaaaggccgtagaagattttaatcctgatcttgtaggcgttgcctttgatagacctgaacctacttttaggcatgtgatttataaagagtataaggctaagagaccacctatgaaggatgatttgaaagcgcagataccatggataagagaatttctaaggttaaatgatatacctctattggaagagcctggctatgaagcggatgatataatagctactatagtgaataaatataaggatgatttaaaatatattctctctggagatttagatcttttgcaattagtctcggacaaaacctttctaatacatcctcaaaagggaattactgagtttactatttatgatccaaaagctgtaaaggataggtttggagtagagccctataagattcccttatacaaagtattagtaggggacgaatctgataatattccaggagtaaatggaataggtcctaaaaaggcctcaaagattcttgagaaaatttcaagtgtagatgaatttaaaagtaaaataaaagttttggatagtgatttaagggagcttattgagaaaaattggaatattattgaaagaaatttagaacttgttactttaaaaaatatagataaggatcttattcttaaacccttcgagattaaaagagatgaaaaagtaatagattttttgaagagatatgaacttaagagtattcttcaaaagttatttcctgatcttcaagaggaagaaaatatagagattaaagatgtcgaagagatcaattttaatgaggtagaaaaagaaggctactttgcctttaaatgtcttggagatagggcttttgagggtatttctctttccttcaaggagggggaaggatattttatatctccttttgatttcaataatgagataagaaagaagattgaaaatataatttcttcagagaatgttaaaaaaattggctcttatattcaaagagatttacattttttaaactgtaaaataaagggcgatgtatttgatgttagtctcgcatcttatcttttgaaccctgaaagacaaaatcactctcttgatattttgataggagagtatctaaataaaacctcttttattcctcaaaaatacgctggttatctttttccgttaaagtctattcttgaggagaggataaagaatgaagggttagaatttgtactttataacatagagattccattaatccctgtactttactccatggagaagtgggggataaaggtagataaggaatatttaaaacagctttctgatgaattctgcgagagaattaaaaaattggaagaagagatatatgaacttgcaggaaccagatttaatctcaattctccaaaacaactttctgaagttttatttgagaggttaaaacttccttctggtaagaaaggaaaaacaggatattctacgtcgtcttctgtgcttcaaaacttaataaatgctcatcctatagtgagaaaaatcctccaatatagagaactctataaattgaagagtacttatgtggatgctattcctaatctggttaatccacaaacaggtagagttcatacaaaatttaatcctacaggtacagctacaggaagaataagtagtagtgaacctaatcttcagaatattcctataaaaagtgaagaaggtagaaagataagaagagccttcgtgtcagaagatggatattttcttgtatctcttgattattctcagatagagctaaggattatggctcatctttctcaggagcctaaattaatatctgccttccaaaaaggagaggatattcatagaagaacagcatcggagatttttggagtgccagaggaagaagttgatgatcttttaaggtcaagggcaaaggccgttaattttggaattatttatggtatctcttcttttggactttctgagactgtaagtattacaccagaagaggcagagaaatttatagactcgtattttaagcactatccaagagtgaagctttttatagataagactattcatgaggcaagagaaaaactgtacgttaaaaccttatttggcagaaaaagatattggcctgagattaagagcataaataaacaggtaaggaatgcctatgaaaggatagcaataaatgcgccaattcagggaacagctgctgatattataaaacttgccatgatagaaatttacaaggagattgaaaataaaaatctcaagtcaagaatactccttcaaattcatgatgagcttattcttgaagtgccagaggaggagatggaatttactcctttaatggcaaaggaaaaaatggaaaaggtggtagaactttcggttcctcttgtagttgaaatctcggtaggtaaaaatcttgctgaattaaaatgagctataagattggtcgac

SEQ ID NO: 1965 - DNA, 2673 bp, Artificial Sequence
  Description of Artificial Sequence: Synthetic DNA sequence of Dictyoglomus thermophilum DNA I781Y
atgaaatacctgctgccgaccgctgctgctggtctgctgctcctcgctgcccagccggcgatggccatggatatcggaattaattcggatccgaaatctctgtgggatctttttcaagaaaataccgagaaagagtccaaaaggaagattctgattattgatggctcaagcctcatatacagggtttattacgcccttccccctttaaagacaaaaaatggtgaattaactaatgctctttatggcttcataagaatacttttaaaggccgtagaagattttaatcctgatcttgtaggcgttgcctttgatagacctgaacctacttttaggcatgtgatttataaagagtataaggctaagagaccacctatgaaggatgatttgaaagcgcagataccatggataagagaatttctaaggttaaatgatatacctctattggaagagcctggctatgaagcggatgatataatagctactatagtgaataaatataaggatgatttaaaatatattctctctggagatttagatcttttgcaattagtctcggacaaaacctttctaatacatcctcaaaagggaattactgagtttactatttatgatccaaaagctgtaaaggataggtttggagtagagccctataagattcccttatacaaagtattagtaggggacgaatctgataatattccaggagtaaatggaataggtcctaaaaaggcctcaaagattcttgagaaaatttcaagtgtagatgaatttaaaagtaaaataaaagttttggatagtgatttaagggagcttattgagaaaaattggaatattattgaaagaaatttagaacttgttactttaaaaaatatagataaggatcttattcttaaacccttcgagattaaaagagatgaaaaagtaatagattttttgaagagatatgaacttaagagtattcttcaaaagttatttcctgatcttcaagaggaagaaaatatagagattaaagatgtcgaagagatcaattttaatgaggtagaaaaagaaggctactttgcctttaaatgtcttggagatagggcttttgagggtatttctctttccttcaaggagggggaaggatattttatatctccttttgatttcaataatgagataagaaagaagattgaaaatataatttcttcagagaatgttaaaaaaattggctcttatattcaaagagatttacattttttaaactgtaaaataaagggcgatgtatttgatgttagtctcgcatcttatcttttgaaccctgaaagacaaaatcactctcttgatattttgataggagagtatctaaataaaacctcttttattcctcaaaaatacgctggttatctttttccgttaaagtctattcttgaggagaggataaagaatgaagggttagaatttgtactttataacatagagattccattaatccctgtactttactccatggagaagtgggggataaaggtagataaggaatatttaaaacagctttctgatgaattctgcgagagaattaaaaaattggaagaagagatatatgaacttgcaggaaccagatttaatctcaattctccaaaacaactttctgaagttttatttgagaggttaaaacttccttctggtaagaaaggaaaaacaggatattctacgtcgtcttctgtgcttcaaaacttaataaatgctcatcctatagtgagaaaaatcctccaatatagagaactctataaattgaagagtacttatgtggatgctattcctaatctggttaatccacaaacaggtagagttcatacaaaatttaatcctacaggtacagctacaggaagaataagtagtagtgaacctaatcttcagaatattcctataaaaagtgaagaaggtagaaagataagaagagccttcgtgtcagaagatggatattttcttgtatctcttgattattctcagatagagctaaggattatggctcatctttctcaggagcctaaattaatatctgccttccaaaaaggagaggatattcatagaagaacagcatcggagatttttggagtgccagaggaagaagttgatgatcttttaaggtcaagggcaaaggccgttaattttggaattatttatggtatctcttcttttggactttctgagactgtaagtattacaccagaagaggcagagaaatttatagactcgtattttaagcactatccaagagtgaagctttttatagataagactattcatgaggcaagagaaaaactgtacgttaaaaccttatttggcagaaaaagatattatcctgagattaagagcataaataaacaggtaaggaatgcctatgaaaggatagcaataaatgcgccaattcagggaacagctgctgatattataaaacttgccatgatagaaatttacaaggagattgaaaataaaaatctcaagtcaagaatactccttcaaattcatgatgagcttattcttgaagtgccagaggaggagatggaatttactcctttaatggcaaaggaaaaaatggaaaaggtggtagaactttcggttcctcttgtagttgaaatctcggtaggtaaaaatcttgctgaattaaaatgagctataagattggtcgac

SEQ ID NO: 1966 - DNA, 2673 bp, Artificial Sequence
  Description of Artificial Sequence: Synthetic DNA sequence of Dictyoglomus thermophilum DNA I781V
atgaaatacctgctgccgaccgctgctgctggtctgctgctcctcgctgcccagccggcgatggccatggatatcggaattaattcggatccgaaatctctgtgggatctttttcaagaaaataccgagaaagagtccaaaaggaagattctgattattgatggctcaagcctcatatacagggtttattacgcccttccccctttaaagacaaaaaatggtgaattaactaatgctctttatggcttcataagaatacttttaaaggccgtagaagattttaatcctgatcttgtaggcgttgcctttgatagacctgaacctacttttaggcatgtgatttataaagagtataaggctaagagaccacctatgaaggatgatttgaaagcgcagataccatggataagagaatttctaaggttaaatgatatacctctattggaagagcctggctatgaagcggatgatataatagctactatagtgaataaatataaggatgatttaaaatatattctctctggagatttagatcttttgcaattagtctcggacaaaacctttctaatacatcctcaaaagggaattactgagtttactatttatgatccaaaagctgtaaaggataggtttggagtagagccctataagattcccttatacaaagtattagtaggggacgaatctgataatattccaggagtaaatggaataggtcctaaaaaggcctcaaagattcttgagaaaatttcaagtgtagatgaatttaaaagtaaaataaaagttttggatagtgatttaagggagcttattgagaaaaattggaatattattgaaagaaatttagaacttgttactttaaaaaatatagataaggatcttattcttaaacccttcgagattaaaagagatgaaaaagtaatagattttttgaagagatatgaacttaagagtattcttcaaaagttatttcctgatcttcaagaggaagaaaatatagagattaaagatgtcgaagagatcaattttaatgaggtagaaaaagaaggctactttgcctttaaatgtcttggagatagggcttttgagggtatttctctttccttcaaggagggggaaggatattttatatctccttttgatttcaataatgagataagaaagaagattgaaaatataatttcttcagagaatgttaaaaaaattggctcttatattcaaagagatttacattttttaaactgtaaaataaagggcgatgtatttgatgttagtctcgcatcttatcttttgaaccctgaaagacaaaatcactctcttgatattttgataggagagtatctaaataaaacctcttttattcctcaaaaatacgctggttatctttttccgttaaagtctattcttgaggagaggataaagaatgaagggttagaatttgtactttataacatagagattccattaatccctgtactttactccatggagaagtgggggataaaggtagataaggaatatttaaaacagctttctgatgaattctgcgagagaattaaaaaattggaagaagagatatatgaacttgcaggaaccagatttaatctcaattctccaaaacaactttctgaagttttatttgagaggttaaaacttccttctggtaagaaaggaaaaacaggatattctacgtcgtcttctgtgcttcaaaacttaataaatgctcatcctatagtgagaaaaatcctccaatatagagaactctataaattgaagagtacttatgtggatgctattcctaatctggttaatccacaaacaggtagagttcatacaaaatttaatcctacaggtacagctacaggaagaataagtagtagtgaacctaatcttcagaatattcctataaaaagtgaagaaggtagaaagataagaagagccttcgtgtcagaagatggatattttcttgtatctcttgattattctcagatagagctaaggattatggctcatctttctcaggagcctaaattaatatctgccttccaaaaaggagaggatattcatagaagaacagcatcggagatttttggagtgccagaggaagaagttgatgatcttttaaggtcaagggcaaaggccgttaattttggaattatttatggtatctcttcttttggactttctgagactgtaagtattacaccagaagaggcagagaaatttatagactcgtattttaagcactatccaagagtgaagctttttatagataagactattcatgaggcaagagaaaaactgtacgttaaaaccttatttggcagaaaaagatatgttcctgagattaagagcataaataaacaggtaaggaatgcctatgaaaggatagcaataaatgcgccaattcagggaacagctgctgatattataaaacttgccatgatagaaatttacaaggagattgaaaataaaaatctcaagtcaagaatactccttcaaattcatgatgagcttattcttgaagtgccagaggaggagatggaatttactcctttaatggcaaaggaaaaaatggaaaaggtggtagaactttcggttcctcttgtagttgaaatctcggtaggtaaaaatcttgctgaattaaaatgagctataagattggtcgac

SEQ ID NO: 1967 - DNA, 2673 bp, Artificial Sequence
  Description of Artificial Sequence: Synthetic DNA sequence of Dictyoglomus thermophilum DNA P782A
atgaaatacctgctgccgaccgctgctgctggtctgctgctcctcgctgcccagccggcgatggccatggatatcggaattaattcggatccgaaatctctgtgggatctttttcaagaaaataccgagaaagagtccaaaaggaagattctgattattgatggctcaagcctcatatacagggtttattacgcccttccccctttaaagacaaaaaatggtgaattaactaatgctctttatggcttcataagaatacttttaaaggccgtagaagattttaatcctgatcttgtaggcgttgcctttgatagacctgaacctacttttaggcatgtgatttataaagagtataaggctaagagaccacctatgaaggatgatttgaaagcgcagataccatggataagagaatttctaaggttaaatgatatacctctattggaagagcctggctatgaagcggatgatataatagctactatagtgaataaatataaggatgatttaaaatatattctctctggagatttagatcttttgcaattagtctcggacaaaacctttctaatacatcctcaaaagggaattactgagtttactatttatgatccaaaagctgtaaaggataggtttggagtagagccctataagattcccttatacaaagtattagtaggggacgaatctgataatattccaggagtaaatggaataggtcctaaaaaggcctcaaagattcttgagaaaatttcaagtgtagatgaatttaaaagtaaaataaaagttttggatagtgatttaagggagcttattgagaaaaattggaatattattgaaagaaatttagaacttgttactttaaaaaatatagataaggatcttattcttaaacccttcgagattaaaagagatgaaaaagtaatagattttttgaagagatatgaacttaagagtattcttcaaaagttatttcctgatcttcaagaggaagaaaatatagagattaaagatgtcgaagagatcaattttaatgaggtagaaaaagaaggctactttgcctttaaatgtcttggagatagggcttttgagggtatttctctttccttcaaggagggggaaggatattttatatctccttttgatttcaataatgagataagaaagaagattgaaaatataatttcttcagagaatgttaaaaaaattggctcttatattcaaagagatttacattttttaaactgtaaaataaagggcgatgtatttgatgttagtctcgcatcttatcttttgaaccctgaaagacaaaatcactctcttgatattttgataggagagtatctaaataaaacctcttttattcctcaaaaatacgctggttatctttttccgttaaagtctattcttgaggagaggataaagaatgaagggttagaatttgtactttataacatagagattccattaatccctgtactttactccatggagaagtgggggataaaggtagataaggaatatttaaaacagctttctgatgaattctgcgagagaattaaaaaattggaagaagagatatatgaacttgcaggaaccagatttaatctcaattctccaaaacaactttctgaagttttatttgagaggttaaaacttccttctggtaagaaaggaaaaacaggatattctacgtcgtcttctgtgcttcaaaacttaataaatgctcatcctatagtgagaaaaatcctccaatatagagaactctataaattgaagagtacttatgtggatgctattcctaatctggttaatccacaaacaggtagagttcatacaaaatttaatcctacaggtacagctacaggaagaataagtagtagtgaacctaatcttcagaatattcctataaaaagtgaagaaggtagaaagataagaagagccttcgtgtcagaagatggatattttcttgtatctcttgattattctcagatagagctaaggattatggctcatctttctcaggagcctaaattaatatctgccttccaaaaaggagaggatattcatagaagaacagcatcggagatttttggagtgccagaggaagaagttgatgatcttttaaggtcaagggcaaaggccgttaattttggaattatttatggtatctcttcttttggactttctgagactgtaagtattacaccagaagaggcagagaaatttatagactcgtattttaagcactatccaagagtgaagctttttatagataagactattcatgaggcaagagaaaaactgtacgttaaaaccttatttggcagaaaaagatatattgctgagattaagagcataaataaacaggtaaggaatgcctatgaaaggatagcaataaatgcgccaattcagggaacagctgctgatattataaaacttgccatgatagaaatttacaaggagattgaaaataaaaatctcaagtcaagaatactccttcaaattcatgatgagcttattcttgaagtgccagaggaggagatggaatttactcctttaatggcaaaggaaaaaatggaaaaggtggtagaactttcggttcctcttgtagttgaaatctcggtaggtaaaaatcttgctgaattaaaatgagctataagattggtcgac

SEQ ID NO: 1968 - DNA, 2673 bp, Artificial Sequence
  Description of Artificial Sequence: Synthetic DNA sequence of Dictyoglomus thermophilum DNA P782R
atgaaatacctgctgccgaccgctgctgctggtctgctgctcctcgctgcccagccggcgatggccatggatatcggaattaattcggatccgaaatctctgtgggatctttttcaagaaaataccgagaaagagtccaaaaggaagattctgattattgatggctcaagcctcatatacagggtttattacgcccttccccctttaaagacaaaaaatggtgaattaactaatgctctttatggcttcataagaatacttttaaaggccgtagaagattttaatcctgatcttgtaggcgttgcctttgatagacctgaacctacttttaggcatgtgatttataaagagtataaggctaagagaccacctatgaaggatgatttgaaagcgcagataccatggataagagaatttctaaggttaaatgatatacctctattggaagagcctggctatgaagcggatgatataatagctactatagtgaataaatataaggatgatttaaaatatattctctctggagatttagatcttttgcaattagtctcggacaaaacctttctaatacatcctcaaaagggaattactgagtttactatttatgatccaaaagctgtaaaggataggtttggagtagagccctataagattcccttatacaaagtattagtaggggacgaatctgataatattccaggagtaaatggaataggtcctaaaaaggcctcaaagattcttgagaaaatttcaagtgtagatgaatttaaaagtaaaataaaagttttggatagtgatttaagggagcttattgagaaaaattggaatattattgaaagaaatttagaacttgttactttaaaaaatatagataaggatcttattcttaaacccttcgagattaaaagagatgaaaaagtaatagattttttgaagagatatgaacttaagagtattcttcaaaagttatttcctgatcttcaagaggaagaaaatatagagattaaagatgtcgaagagatcaattttaatgaggtagaaaaagaaggctactttgcctttaaatgtcttggagatagggcttttgagggtatttctctttccttcaaggagggggaaggatattttatatctccttttgatttcaataatgagataagaaagaagattgaaaatataatttcttcagagaatgttaaaaaaattggctcttatattcaaagagatttacattttttaaactgtaaaataaagggcgatgtatttgatgttagtctcgcatcttatcttttgaaccctgaaagacaaaatcactctcttgatattttgataggagagtatctaaataaaacctcttttattcctcaaaaatacgctggttatctttttccgttaaagtctattcttgaggagaggataaagaatgaagggttagaatttgtactttataacatagagattccattaatccctgtactttactccatggagaagtgggggataaaggtagataaggaatatttaaaacagctttctgatgaattctgcgagagaattaaaaaattggaagaagagatatatgaacttgcaggaaccagatttaatctcaattctccaaaacaactttctgaagttttatttgagaggttaaaacttccttctggtaagaaaggaaaaacaggatattctacgtcgtcttctgtgcttcaaaacttaataaatgctcatcctatagtgagaaaaatcctccaatatagagaactctataaattgaagagtacttatgtggatgctattcctaatctggttaatccacaaacaggtagagttcatacaaaatttaatcctacaggtacagctacaggaagaataagtagtagtgaacctaatcttcagaatattcctataaaaagtgaagaaggtagaaagataagaagagccttcgtgtcagaagatggatattttcttgtatctcttgattattctcagatagagctaaggattatggctcatctttctcaggagcctaaattaatatctgccttccaaaaaggagaggatattcatagaagaacagcatcggagatttttggagtgccagaggaagaagttgatgatcttttaaggtcaagggcaaaggccgttaattttggaattatttatggtatctcttcttttggactttctgagactgtaagtattacaccagaagaggcagagaaatttatagactcgtattttaagcactatccaagagtgaagctttttatagataagactattcatgaggcaagagaaaaactgtacgttaaaaccttatttggcagaaaaagatatattcgtgagattaagagcataaataaacaggtaaggaatgcctatgaaaggatagcaataaatgcgccaattcagggaacagctgctgatattataaaacttgccatgatagaaatttacaaggagattgaaaataaaaatctcaagtcaagaatactccttcaaattcatgatgagcttattcttgaagtgccagaggaggagatggaatttactcctttaatggcaaaggaaaaaatggaaaaggtggtagaactttcggttcctcttgtagttgaaatctcggtaggtaaaaatcttgctgaattaaaatgagctataagattggtcgac

SEQ ID NO: 1969 - DNA, 2673 bp, Artificial Sequence
  Description of Artificial Sequence: Synthetic DNA sequence of Dictyoglomus thermophilum DNA P782N
atgaaatacctgctgccgaccgctgctgctggtctgctgctcctcgctgcccagccggcgatggccatggatatcggaattaattcggatccgaaatctctgtgggatctttttcaagaaaataccgagaaagagtccaaaaggaagattctgattattgatggctcaagcctcatatacagggtttattacgcccttccccctttaaagacaaaaaatggtgaattaactaatgctctttatggcttcataagaatacttttaaaggccgtagaagattttaatcctgatcttgtaggcgttgcctttgatagacctgaacctacttttaggcatgtgatttataaagagtataaggctaagagaccacctatgaaggatgatttgaaagcgcagataccatggataagagaatttctaaggttaaatgatatacctctattggaagagcctggctatgaagcggatgatataatagctactatagtgaataaatataaggatgatttaaaatatattctctctggagatttagatcttttgcaattagtctcggacaaaacctttctaatacatcctcaaaagggaattactgagtttactatttatgatccaaaagctgtaaaggataggtttggagtagagccctataagattcccttatacaaagtattagtaggggacgaatctgataatattccaggagtaaatggaataggtcctaaaaaggcctcaaagattcttgagaaaatttcaagtgtagatgaatttaaaagtaaaataaaagttttggatagtgatttaagggagcttattgagaaaaattggaatattattgaaagaaatttagaacttgttactttaaaaaatatagataaggatcttattcttaaacccttcgagattaaaagagatgaaaaagtaatagattttttgaagagatatgaacttaagagtattcttcaaaagttatttcctgatcttcaagaggaagaaaatatagagattaaagatgtcgaagagatcaattttaatgaggtagaaaaagaaggctactttgcctttaaatgtcttggagatagggcttttgagggtatttctctttccttcaaggagggggaaggatattttatatctccttttgatttcaataatgagataagaaagaagattgaaaatataatttcttcagagaatgttaaaaaaattggctcttatattcaaagagatttacattttttaaactgtaaaataaagggcgatgtatttgatgttagtctcgcatcttatcttttgaaccctgaaagacaaaatcactctcttgatattttgataggagagtatctaaataaaacctcttttattcctcaaaaatacgctggttatctttttccgttaaagtctattcttgaggagaggataaagaatgaagggttagaatttgtactttataacatagagattccattaatccctgtactttactccatggagaagtgggggataaaggtagataaggaatatttaaaacagctttctgatgaattctgcgagagaattaaaaaattggaagaagagatatatgaacttgcaggaaccagatttaatctcaattctccaaaacaactttctgaagttttatttgagaggttaaaacttccttctggtaagaaaggaaaaacaggatattctacgtcgtcttctgtgcttcaaaacttaataaatgctcatcctatagtgagaaaaatcctccaatatagagaactctataaattgaagagtacttatgtggatgctattcctaatctggttaatccacaaacaggtagagttcatacaaaatttaatcctacaggtacagctacaggaagaataagtagtagtgaacctaatcttcagaatattcctataaaaagtgaagaaggtagaaagataagaagagccttcgtgtcagaagatggatattttcttgtatctcttgattattctcagatagagctaaggattatggctcatctttctcaggagcctaaattaatatctgccttccaaaaaggagaggatattcatagaagaacagcatcggagatttttggagtgccagaggaagaagttgatgatcttttaaggtcaagggcaaaggccgttaattttggaattatttatggtatctcttcttttggactttctgagactgtaagtattacaccagaagaggcagagaaatttatagactcgtattttaagcactatccaagagtgaagctttttatagataagactattcatgaggcaagagaaaaactgtacgttaaaaccttatttggcagaaaaagatatattaatgagattaagagcataaataaacaggtaaggaatgcctatgaaaggatagcaataaatgcgccaattcagggaacagctgctgatattataaaacttgccatgatagaaatttacaaggagattgaaaataaaaatctcaagtcaagaatactccttcaaattcatgatgagcttattcttgaagtgccagaggaggagatggaatttactcctttaatggcaaaggaaaaaatggaaaaggtggtagaactttcggttcctcttgtagttgaaatctcggtaggtaaaaatcttgctgaattaaaatgagctataagattggtcgac

SEQ ID NO: 1970 - DNA, 2673 bp, Artificial Sequence
  Description of Artificial Sequence: Synthetic DNA sequence of Dictyoglomus thermophilum DNA P782D
atgaaatacctgctgccgaccgctgctgctggtctgctgctcctcgctgcccagccggcgatggccatggatatcggaattaattcggatccgaaatctctgtgggatctttttcaagaaaataccgagaaagagtccaaaaggaagattctgattattgatggctcaagcctcatatacagggtttattacgcccttccccctttaaagacaaaaaatggtgaattaactaatgctctttatggcttcataagaatacttttaaaggccgtagaagattttaatcctgatcttgtaggcgttgcctttgatagacctgaacctacttttaggcatgtgatttataaagagtataaggctaagagaccacctatgaaggatgatttgaaagcgcagataccatggataagagaatttctaaggttaaatgatatacctctattggaagagcctggctatgaagcggatgatataatagctactatagtgaataaatataaggatgatttaaaatatattctctctggagatttagatcttttgcaattagtctcggacaaaacctttctaatacatcctcaaaagggaattactgagtttactatttatgatccaaaagctgtaaaggataggtttggagtagagccctataagattcccttatacaaagtattagtaggggacgaatctgataatattccaggagtaaatggaataggtcctaaaaaggcctcaaagattcttgagaaaatttcaagtgtagatgaatttaaaagtaaaataaaagttttggatagtgatttaagggagcttattgagaaaaattggaatattattgaaagaaatttagaacttgttactttaaaaaatatagataaggatcttattcttaaacccttcgagattaaaagagatgaaaaagtaatagattttttgaagagatatgaacttaagagtattcttcaaaagttatttcctgatcttcaagaggaagaaaatatagagattaaagatgtcgaagagatcaattttaatgaggtagaaaaagaaggctactttgcctttaaatgtcttggagatagggcttttgagggtatttctctttccttcaaggagggggaaggatattttatatctccttttgatttcaataatgagataagaaagaagattgaaaatataatttcttcagagaatgttaaaaaaattggctcttatattcaaagagatttacattttttaaactgtaaaataaagggcgatgtatttgatgttagtctcgcatcttatcttttgaaccctgaaagacaaaatcactctcttgatattttgataggagagtatctaaataaaacctcttttattcctcaaaaatacgctggttatctttttccgttaaagtctattcttgaggagaggataaagaatgaagggttagaatttgtactttataacatagagattccattaatccctgtactttactccatggagaagtgggggataaaggtagataaggaatatttaaaacagctttctgatgaattctgcgagagaattaaaaaattggaagaagagatatatgaacttgcaggaaccagatttaatctcaattctccaaaacaactttctgaagttttatttgagaggttaaaacttccttctggtaagaaaggaaaaacaggatattctacgtcgtcttctgtgcttcaaaacttaataaatgctcatcctatagtgagaaaaatcctccaatatagagaactctataaattgaagagtacttatgtggatgctattcctaatctggttaatccacaaacaggtagagttcatacaaaatttaatcctacaggtacagctacaggaagaataagtagtagtgaacctaatcttcagaatattcctataaaaagtgaagaaggtagaaagataagaagagccttcgtgtcagaagatggatattttcttgtatctcttgattattctcagatagagctaaggattatggctcatctttctcaggagcctaaattaatatctgccttccaaaaaggagaggatattcatagaagaacagcatcggagatttttggagtgccagaggaagaagttgatgatcttttaaggtcaagggcaaaggccgttaattttggaattatttatggtatctcttcttttggactttctgagactgtaagtattacaccagaagaggcagagaaatttatagactcgtattttaagcactatccaagagtgaagctttttatagataagactattcatgaggcaagagaaaaactgtacgttaaaaccttatttggcagaaaaagatatattgatgagattaagagcataaataaacaggtaaggaatgcctatgaaaggatagcaataaatgcgccaattcagggaacagctgctgatattataaaacttgccatgatagaaatttacaaggagattgaaaataaaaatctcaagtcaagaatactccttcaaattcatgatgagcttattcttgaagtgccagaggaggagatggaatttactcctttaatggcaaaggaaaaaatggaaaaggtggtagaactttcggttcctcttgtagttgaaatctcggtaggtaaaaatcttgctgaattaaaatgagctataagattggtcgac

SEQ ID NO: 1971 - DNA, 2673 bp, Artificial Sequence
  Description of Artificial Sequence: Synthetic DNA sequence of Dictyoglomus thermophilum DNA P782C
atgaaatacctgctgccgaccgctgctgctggtctgctgctcctcgctgcccagccggcgatggccatggatatcggaattaattcggatccgaaatctctgtgggatctttttcaagaaaataccgagaaagagtccaaaaggaagattctgattattgatggctcaagcctcatatacagggtttattacgcccttccccctttaaagacaaaaaatggtgaattaactaatgctctttatggcttcataagaatacttttaaaggccgtagaagattttaatcctgatcttgtaggcgttgcctttgatagacctgaacctacttttaggcatgtgatttataaagagtataaggctaagagaccacctatgaaggatgatttgaaagcgcagataccatggataagagaatttctaaggttaaatgatatacctctattggaagagcctggctatgaagcggatgatataatagctactatagtgaataaatataaggatgatttaaaatatattctctctggagatttagatcttttgcaattagtctcggacaaaacctttctaatacatcctcaaaagggaattactgagtttactatttatgatccaaaagctgtaaaggataggtttggagtagagccctataagattcccttatacaaagtattagtaggggacgaatctgataatattccaggagtaaatggaataggtcctaaaaaggcctcaaagattcttgagaaaatttcaagtgtagatgaatttaaaagtaaaataaaagttttggatagtgatttaagggagcttattgagaaaaattggaatattattgaaagaaatttagaacttgttactttaaaaaatatagataaggatcttattcttaaacccttcgagattaaaagagatgaaaaagtaatagattttttgaagagatatgaacttaagagtattcttcaaaagttatttcctgatcttcaagaggaagaaaatatagagattaaagatgtcgaagagatcaattttaatgaggtagaaaaagaaggctactttgcctttaaatgtcttggagatagggcttttgagggtatttctctttccttcaaggagggggaaggatattttatatctccttttgatttcaataatgagataagaaagaagattgaaaatataatttcttcagagaatgttaaaaaaattggctcttatattcaaagagatttacattttttaaactgtaaaataaagggcgatgtatttgatgttagtctcgcatcttatcttttgaaccctgaaagacaaaatcactctcttgatattttgataggagagtatctaaataaaacctcttttattcctcaaaaatacgctggttatctttttccgttaaagtctattcttgaggagaggataaagaatgaagggttagaatttgtactttataacatagagattccattaatccctgtactttactccatggagaagtgggggataaaggtagataaggaatatttaaaacagctttctgatgaattctgcgagagaattaaaaaattggaagaagagatatatgaacttgcaggaaccagatttaatctcaattctccaaaacaactttctgaagttttatttgagaggttaaaacttccttctggtaagaaaggaaaaacaggatattctacgtcgtcttctgtgcttcaaaacttaataaatgctcatcctatagtgagaaaaatcctccaatatagagaactctataaattgaagagtacttatgtggatgctattcctaatctggttaatccacaaacaggtagagttcatacaaaatttaatcctacaggtacagctacaggaagaataagtagtagtgaacctaatcttcagaatattcctataaaaagtgaagaaggtagaaagataagaagagccttcgtgtcagaagatggatattttcttgtatctcttgattattctcagatagagctaaggattatggctcatctttctcaggagcctaaattaatatctgccttccaaaaaggagaggatattcatagaagaacagcatcggagatttttggagtgccagaggaagaagttgatgatcttttaaggtcaagggcaaaggccgttaattttggaattatttatggtatctcttcttttggactttctgagactgtaagtattacaccagaagaggcagagaaatttatagactcgtattttaagcactatccaagagtgaagctttttatagataagactattcatgaggcaagagaaaaactgtacgttaaaaccttatttggcagaaaaagatatatttgtgagattaagagcataaataaacaggtaaggaatgcctatgaaaggatagcaataaatgcgccaattcagggaacagctgctgatattataaaacttgccatgatagaaatttacaaggagattgaaaataaaaatctcaagtcaagaatactccttcaaattcatgatgagcttattcttgaagtgccagaggaggagatggaatttactcctttaatggcaaaggaaaaaatggaaaaggtggtagaactttcggttcctcttgtagttgaaatctcggtaggtaaaaatcttgctgaattaaaatgagctataagattggtcgac

SEQ ID NO: 1972 - DNA, 2673 bp, Artificial Sequence
  Description of Artificial Sequence: Synthetic DNA sequence of Dictyoglomus thermophilum DNA P782E
atgaaatacctgctgccgaccgctgctgctggtctgctgctcctcgctgcccagccggcgatggccatggatatcggaattaattcggatccgaaatctctgtgggatctttttcaagaaaataccgagaaagagtccaaaaggaagattctgattattgatggctcaagcctcatatacagggtttattacgcccttccccctttaaagacaaaaaatggtgaattaactaatgctctttatggcttcataagaatacttttaaaggccgtagaagattttaatcctgatcttgtaggcgttgcctttgatagacctgaacctacttttaggcatgtgatttataaagagtataaggctaagagaccacctatgaaggatgatttgaaagcgcagataccatggataagagaatttctaaggttaaatgatatacctctattggaagagcctggctatgaagcggatgatataatagctactatagtgaataaatataaggatgatttaaaatatattctctctggagatttagatcttttgcaattagtctcggacaaaacctttctaatacatcctcaaaagggaattactgagtttactatttatgatccaaaagctgtaaaggataggtttggagtagagccctataagattcccttatacaaagtattagtaggggacgaatctgataatattccaggagtaaatggaataggtcctaaaaaggcctcaaagattcttgagaaaatttcaagtgtagatgaatttaaaagtaaaataaaagttttggatagtgatttaagggagcttattgagaaaaattggaatattattgaaagaaatttagaacttgttactttaaaaaatatagataaggatcttattcttaaacccttcgagattaaaagagatgaaaaagtaatagattttttgaagagatatgaacttaagagtattcttcaaaagttatttcctgatcttcaagaggaagaaaatatagagattaaagatgtcgaagagatcaattttaatgaggtagaaaaagaaggctactttgcctttaaatgtcttggagatagggcttttgagggtatttctctttccttcaaggagggggaaggatattttatatctccttttgatttcaataatgagataagaaagaagattgaaaatataatttcttcagagaatgttaaaaaaattggctcttatattcaaagagatttacattttttaaactgtaaaataaagggcgatgtatttgatgttagtctcgcatcttatcttttgaaccctgaaagacaaaatcactctcttgatattttgataggagagtatctaaataaaacctcttttattcctcaaaaatacgctggttatctttttccgttaaagtctattcttgaggagaggataaagaatgaagggttagaatttgtactttataacatagagattccattaatccctgtactttactccatggagaagtgggggataaaggtagataaggaatatttaaaacagctttctgatgaattctgcgagagaattaaaaaattggaagaagagatatatgaacttgcaggaaccagatttaatctcaattctccaaaacaactttctgaagttttatttgagaggttaaaacttccttctggtaagaaaggaaaaacaggatattctacgtcgtcttctgtgcttcaaaacttaataaatgctcatcctatagtgagaaaaatcctccaatatagagaactctataaattgaagagtacttatgtggatgctattcctaatctggttaatccacaaacaggtagagttcatacaaaatttaatcctacaggtacagctacaggaagaataagtagtagtgaacctaatcttcagaatattcctataaaaagtgaagaaggtagaaagataagaagagccttcgtgtcagaagatggatattttcttgtatctcttgattattctcagatagagctaaggattatggctcatctttctcaggagcctaaattaatatctgccttccaaaaaggagaggatattcatagaagaacagcatcggagatttttggagtgccagaggaagaagttgatgatcttttaaggtcaagggcaaaggccgttaattttggaattatttatggtatctcttcttttggactttctgagactgtaagtattacaccagaagaggcagagaaatttatagactcgtattttaagcactatccaagagtgaagctttttatagataagactattcatgaggcaagagaaaaactgtacgttaaaaccttatttggcagaaaaagatatattgaagagattaagagcataaataaacaggtaaggaatgcctatgaaaggatagcaataaatgcgccaattcagggaacagctgctgatattataaaacttgccatgatagaaatttacaaggagattgaaaataaaaatctcaagtcaagaatactccttcaaattcatgatgagcttattcttgaagtgccagaggaggagatggaatttactcctttaatggcaaaggaaaaaatggaaaaggtggtagaactttcggttcctcttgtagttgaaatctcggtaggtaaaaatcttgctgaattaaaatgagctataagattggtcgac

SEQ ID NO: 1973 - DNA, 2673 bp, Artificial Sequence
  Description of Artificial Sequence: Synthetic DNA sequence of Dictyoglomus thermophilum DNA P782Q
atgaaatacctgctgccgaccgctgctgctggtctgctgctcctcgctgcccagccggcgatggccatggatatcggaattaattcggatccgaaatctctgtgggatctttttcaagaaaataccgagaaagagtccaaaaggaagattctgattattgatggctcaagcctcatatacagggtttattacgcccttccccctttaaagacaaaaaatggtgaattaactaatgctctttatggcttcataagaatacttttaaaggccgtagaagattttaatcctgatcttgtaggcgttgcctttgatagacctgaacctacttttaggcatgtgatttataaagagtataaggctaagagaccacctatgaaggatgatttgaaagcgcagataccatggataagagaatttctaaggttaaatgatatacctctattggaagagcctggctatgaagcggatgatataatagctactatagtgaataaatataaggatgatttaaaatatattctctctggagatttagatcttttgcaattagtctcggacaaaacctttctaatacatcctcaaaagggaattactgagtttactatttatgatccaaaagctgtaaaggataggtttggagtagagccctataagattcccttatacaaagtattagtaggggacgaatctgataatattccaggagtaaatggaataggtcctaaaaaggcctcaaagattcttgagaaaatttcaagtgtagatgaatttaaaagtaaaataaaagttttggatagtgatttaagggagcttattgagaaaaattggaatattattgaaagaaatttagaacttgttactttaaaaaatatagataaggatcttattcttaaacccttcgagattaaaagagatgaaaaagtaatagattttttgaagagatatgaacttaagagtattcttcaaaagttatttcctgatcttcaagaggaagaaaatatagagattaaagatgtcgaagagatcaattttaatgaggtagaaaaagaaggctactttgcctttaaatgtcttggagatagggcttttgagggtatttctctttccttcaaggagggggaaggatattttatatctccttttgatttcaataatgagataagaaagaagattgaaaatataatttcttcagagaatgttaaaaaaattggctcttatattcaaagagatttacattttttaaactgtaaaataaagggcgatgtatttgatgttagtctcgcatcttatcttttgaaccctgaaagacaaaatcactctcttgatattttgataggagagtatctaaataaaacctcttttattcctcaaaaatacgctggttatctttttccgttaaagtctattcttgaggagaggataaagaatgaagggttagaatttgtactttataacatagagattccattaatccctgtactttactccatggagaagtgggggataaaggtagataaggaatatttaaaacagctttctgatgaattctgcgagagaattaaaaaattggaagaagagatatatgaacttgcaggaaccagatttaatctcaattctccaaaacaactttctgaagttttatttgagaggttaaaacttccttctggtaagaaaggaaaaacaggatattctacgtcgtcttctgtgcttcaaaacttaataaatgctcatcctatagtgagaaaaatcctccaatatagagaactctataaattgaagagtacttatgtggatgctattcctaatctggttaatccacaaacaggtagagttcatacaaaatttaatcctacaggtacagctacaggaagaataagtagtagtgaacctaatcttcagaatattcctataaaaagtgaagaaggtagaaagataagaagagccttcgtgtcagaagatggatattttcttgtatctcttgattattctcagatagagctaaggattatggctcatctttctcaggagcctaaattaatatctgccttccaaaaaggagaggatattcatagaagaacagcatcggagatttttggagtgccagaggaagaagttgatgatcttttaaggtcaagggcaaaggccgttaattttggaattatttatggtatctcttcttttggactttctgagactgtaagtattacaccagaagaggcagagaaatttatagactcgtattttaagcactatccaagagtgaagctttttatagataagactattcatgaggcaagagaaaaactgtacgttaaaaccttatttggcagaaaaagatatattcaagagattaagagcataaataaacaggtaaggaatgcctatgaaaggatagcaataaatgcgccaattcagggaacagctgctgatattataaaacttgccatgatagaaatttacaaggagattgaaaataaaaatctcaagtcaagaatactccttcaaattcatgatgagcttattcttgaagtgccagaggaggagatggaatttactcctttaatggcaaaggaaaaaatggaaaaggtggtagaactttcggttcctcttgtagttgaaatctcggtaggtaaaaatcttgctgaattaaaatgagctataagattggtcgac

SEQ ID NO: 1974 - DNA, 2673 bp, Artificial Sequence
  Description of Artificial Sequence: Synthetic DNA sequence of Dictyoglomus thermophilum DNA P782G
atgaaatacctgctgccgaccgctgctgctggtctgctgctcctcgctgcccagccggcgatggccatggatatcggaattaattcggatccgaaatctctgtgggatctttttcaagaaaataccgagaaagagtccaaaaggaagattctgattattgatggctcaagcctcatatacagggtttattacgcccttccccctttaaagacaaaaaatggtgaattaactaatgctctttatggcttcataagaatacttttaaaggccgtagaagattttaatcctgatcttgtaggcgttgcctttgatagacctgaacctacttttaggcatgtgatttataaagagtataaggctaagagaccacctatgaaggatgatttgaaagcgcagataccatggataagagaatttctaaggttaaatgatatacctctattggaagagcctggctatgaagcggatgatataatagctactatagtgaataaatataaggatgatttaaaatatattctctctggagatttagatcttttgcaattagtctcggacaaaacctttctaatacatcctcaaaagggaattactgagtttactatttatgatccaaaagctgtaaaggataggtttggagtagagccctataagattcccttatacaaagtattagtaggggacgaatctgataatattccaggagtaaatggaataggtcctaaaaaggcctcaaagattcttgagaaaatttcaagtgtagatgaatttaaaagtaaaataaaagttttggatagtgatttaagggagcttattgagaaaaattggaatattattgaaagaaatttagaacttgttactttaaaaaatatagataaggatcttattcttaaacccttcgagattaaaagagatgaaaaagtaatagattttttgaagagatatgaacttaagagtattcttcaaaagttatttcctgatcttcaagaggaagaaaatatagagattaaagatgtcgaagagatcaattttaatgaggtagaaaaagaaggctactttgcctttaaatgtcttggagatagggcttttgagggtatttctctttccttcaaggagggggaaggatattttatatctccttttgatttcaataatgagataagaaagaagattgaaaatataatttcttcagagaatgttaaaaaaattggctcttatattcaaagagatttacattttttaaactgtaaaataaagggcgatgtatttgatgttagtctcgcatcttatcttttgaaccctgaaagacaaaatcactctcttgatattttgataggagagtatctaaataaaacctcttttattcctcaaaaatacgctggttatctttttccgttaaagtctattcttgaggagaggataaagaatgaagggttagaatttgtactttataacatagagattccattaatccctgtactttactccatggagaagtgggggataaaggtagataaggaatatttaaaacagctttctgatgaattctgcgagagaattaaaaaattggaagaagagatatatgaacttgcaggaaccagatttaatctcaattctccaaaacaactttctgaagttttatttgagaggttaaaacttccttctggtaagaaaggaaaaacaggatattctacgtcgtcttctgtgcttcaaaacttaataaatgctcatcctatagtgagaaaaatcctccaatatagagaactctataaattgaagagtacttatgtggatgctattcctaatctggttaatccacaaacaggtagagttcatacaaaatttaatcctacaggtacagctacaggaagaataagtagtagtgaacctaatcttcagaatattcctataaaaagtgaagaaggtagaaagataagaagagccttcgtgtcagaagatggatattttcttgtatctcttgattattctcagatagagctaaggattatggctcatctttctcaggagcctaaattaatatctgccttccaaaaaggagaggatattcatagaagaacagcatcggagatttttggagtgccagaggaagaagttgatgatcttttaaggtcaagggcaaaggccgttaattttggaattatttatggtatctcttcttttggactttctgagactgtaagtattacaccagaagaggcagagaaatttatagactcgtattttaagcactatccaagagtgaagctttttatagataagactattcatgaggcaagagaaaaactgtacgttaaaaccttatttggcagaaaaagatatattggtgagattaagagcataaataaacaggtaaggaatgcctatgaaaggatagcaataaatgcgccaattcagggaacagctgctgatattataaaacttgccatgatagaaatttacaaggagattgaaaataaaaatctcaagtcaagaatactccttcaaattcatgatgagcttattcttgaagtgccagaggaggagatggaatttactcctttaatggcaaaggaaaaaatggaaaaggtggtagaactttcggttcctcttgtagttgaaatctcggtaggtaaaaatcttgctgaattaaaatgagctataagattggtcgac

SEQ ID NO: 1975 - DNA, 2673 bp, Artificial Sequence
  Description of Artificial Sequence: Synthetic DNA sequence of Dictyoglomus thermophilum DNA P782H
atgaaatacctgctgccgaccgctgctgctggtctgctgctcctcgctgcccagccggcgatggccatggatatcggaattaattcggatccgaaatctctgtgggatctttttcaagaaaataccgagaaagagtccaaaaggaagattctgattattgatggctcaagcctcatatacagggtttattacgcccttccccctttaaagacaaaaaatggtgaattaactaatgctctttatggcttcataagaatacttttaaaggccgtagaagattttaatcctgatcttgtaggcgttgcctttgatagacctgaacctacttttaggcatgtgatttataaagagtataaggctaagagaccacctatgaaggatgatttgaaagcgcagataccatggataagagaatttctaaggttaaatgatatacctctattggaagagcctggctatgaagcggatgatataatagctactatagtgaataaatataaggatgatttaaaatatattctctctggagatttagatcttttgcaattagtctcggacaaaacctttctaatacatcctcaaaagggaattactgagtttactatttatgatccaaaagctgtaaaggataggtttggagtagagccctataagattcccttatacaaagtattagtaggggacgaatctgataatattccaggagtaaatggaataggtcctaaaaaggcctcaaagattcttgagaaaatttcaagtgtagatgaatttaaaagtaaaataaaagttttggatagtgatttaagggagcttattgagaaaaattggaatattattgaaagaaatttagaacttgttactttaaaaaatatagataaggatcttattcttaaacccttcgagattaaaagagatgaaaaagtaatagattttttgaagagatatgaacttaagagtattcttcaaaagttatttcctgatcttcaagaggaagaaaatatagagattaaagatgtcgaagagatcaattttaatgaggtagaaaaagaaggctactttgcctttaaatgtcttggagatagggcttttgagggtatttctctttccttcaaggagggggaaggatattttatatctccttttgatttcaataatgagataagaaagaagattgaaaatataatttcttcagagaatgttaaaaaaattggctcttatattcaaagagatttacattttttaaactgtaaaataaagggcgatgtatttgatgttagtctcgcatcttatcttttgaaccctgaaagacaaaatcactctcttgatattttgataggagagtatctaaataaaacctcttttattcctcaaaaatacgctggttatctttttccgttaaagtctattcttgaggagaggataaagaatgaagggttagaatttgtactttataacatagagattccattaatccctgtactttactccatggagaagtgggggataaaggtagataaggaatatttaaaacagctttctgatgaattctgcgagagaattaaaaaattggaagaagagatatatgaacttgcaggaaccagatttaatctcaattctccaaaacaactttctgaagttttatttgagaggttaaaacttccttctggtaagaaaggaaaaacaggatattctacgtcgtcttctgtgcttcaaaacttaataaatgctcatcctatagtgagaaaaatcctccaatatagagaactctataaattgaagagtacttatgtggatgctattcctaatctggttaatccacaaacaggtagagttcatacaaaatttaatcctacaggtacagctacaggaagaataagtagtagtgaacctaatcttcagaatattcctataaaaagtgaagaaggtagaaagataagaagagccttcgtgtcagaagatggatattttcttgtatctcttgattattctcagatagagctaaggattatggctcatctttctcaggagcctaaattaatatctgccttccaaaaaggagaggatattcatagaagaacagcatcggagatttttggagtgccagaggaagaagttgatgatcttttaaggtcaagggcaaaggccgttaattttggaattatttatggtatctcttcttttggactttctgagactgtaagtattacaccagaagaggcagagaaatttatagactcgtattttaagcactatccaagagtgaagctttttatagataagactattcatgaggcaagagaaaaactgtacgttaaaaccttatttggcagaaaaagatatattcatgagattaagagcataaataaacaggtaaggaatgcctatgaaaggatagcaataaatgcgccaattcagggaacagctgctgatattataaaacttgccatgatagaaatttacaaggagattgaaaataaaaatctcaagtcaagaatactccttcaaattcatgatgagcttattcttgaagtgccagaggaggagatggaatttactcctttaatggcaaaggaaaaaatggaaaaggtggtagaactttcggttcctcttgtagttgaaatctcggtaggtaaaaatcttgctgaattaaaatgagctataagattggtcgac

SEQ ID NO: 1976 - DNA, 2673 bp, Artificial Sequence
  Description of Artificial Sequence: Synthetic DNA sequence of Dictyoglomus thermophilum DNA P782I
atgaaatacctgctgccgaccgctgctgctggtctgctgctcctcgctgcccagccggcgatggccatggatatcggaattaattcggatccgaaatctctgtgggatctttttcaagaaaataccgagaaagagtccaaaaggaagattctgattattgatggctcaagcctcatatacagggtttattacgcccttccccctttaaagacaaaaaatggtgaattaactaatgctctttatggcttcataagaatacttttaaaggccgtagaagattttaatcctgatcttgtaggcgttgcctttgatagacctgaacctacttttaggcatgtgatttataaagagtataaggctaagagaccacctatgaaggatgatttgaaagcgcagataccatggataagagaatttctaaggttaaatgatatacctctattggaagagcctggctatgaagcggatgatataatagctactatagtgaataaatataaggatgatttaaaatatattctctctggagatttagatcttttgcaattagtctcggacaaaacctttctaatacatcctcaaaagggaattactgagtttactatttatgatccaaaagctgtaaaggataggtttggagtagagccctataagattcccttatacaaagtattagtaggggacgaatctgataatattccaggagtaaatggaataggtcctaaaaaggcctcaaagattcttgagaaaatttcaagtgtagatgaatttaaaagtaaaataaaagttttggatagtgatttaagggagcttattgagaaaaattggaatattattgaaagaaatttagaacttgttactttaaaaaatatagataaggatcttattcttaaacccttcgagattaaaagagatgaaaaagtaatagattttttgaagagatatgaacttaagagtattcttcaaaagttatttcctgatcttcaagaggaagaaaatatagagattaaagatgtcgaagagatcaattttaatgaggtagaaaaagaaggctactttgcctttaaatgtcttggagatagggcttttgagggtatttctctttccttcaaggagggggaaggatattttatatctccttttgatttcaataatgagataagaaagaagattgaaaatataatttcttcagagaatgttaaaaaaattggctcttatattcaaagagatttacattttttaaactgtaaaataaagggcgatgtatttgatgttagtctcgcatcttatcttttgaaccctgaaagacaaaatcactctcttgatattttgataggagagtatctaaataaaacctcttttattcctcaaaaatacgctggttatctttttccgttaaagtctattcttgaggagaggataaagaatgaagggttagaatttgtactttataacatagagattccattaatccctgtactttactccatggagaagtgggggataaaggtagataaggaatatttaaaacagctttctgatgaattctgcgagagaattaaaaaattggaagaagagatatatgaacttgcaggaaccagatttaatctcaattctccaaaacaactttctgaagttttatttgagaggttaaaacttccttctggtaagaaaggaaaaacaggatattctacgtcgtcttctgtgcttcaaaacttaataaatgctcatcctatagtgagaaaaatcctccaatatagagaactctataaattgaagagtacttatgtggatgctattcctaatctggttaatccacaaacaggtagagttcatacaaaatttaatcctacaggtacagctacaggaagaataagtagtagtgaacctaatcttcagaatattcctataaaaagtgaagaaggtagaaagataagaagagccttcgtgtcagaagatggatattttcttgtatctcttgattattctcagatagagctaaggattatggctcatctttctcaggagcctaaattaatatctgccttccaaaaaggagaggatattcatagaagaacagcatcggagatttttggagtgccagaggaagaagttgatgatcttttaaggtcaagggcaaaggccgttaattttggaattatttatggtatctcttcttttggactttctgagactgtaagtattacaccagaagaggcagagaaatttatagactcgtattttaagcactatccaagagtgaagctttttatagataagactattcatgaggcaagagaaaaactgtacgttaaaaccttatttggcagaaaaagatatattattgagattaagagcataaataaacaggtaaggaatgcctatgaaaggatagcaataaatgcgccaattcagggaacagctgctgatattataaaacttgccatgatagaaatttacaaggagattgaaaataaaaatctcaagtcaagaatactccttcaaattcatgatgagcttattcttgaagtgccagaggaggagatggaatttactcctttaatggcaaaggaaaaaatggaaaaggtggtagaactttcggttcctcttgtagttgaaatctcggtaggtaaaaatcttgctgaattaaaatgagctataagattggtcgac

SEQ ID NO: 1977 - DNA, 2673 bp, Artificial Sequence
  Description of Artificial Sequence: Synthetic DNA sequence of Dictyoglomus thermophilum DNA P782L
atgaaatacctgctgccgaccgctgctgctggtctgctgctcctcgctgcccagccggcgatggccatggatatcggaattaattcggatccgaaatctctgtgggatctttttcaagaaaataccgagaaagagtccaaaaggaagattctgattattgatggctcaagcctcatatacagggtttattacgcccttccccctttaaagacaaaaaatggtgaattaactaatgctctttatggcttcataagaatacttttaaaggccgtagaagattttaatcctgatcttgtaggcgttgcctttgatagacctgaacctacttttaggcatgtgatttataaagagtataaggctaagagaccacctatgaaggatgatttgaaagcgcagataccatggataagagaatttctaaggttaaatgatatacctctattggaagagcctggctatgaagcggatgatataatagctactatagtgaataaatataaggatgatttaaaatatattctctctggagatttagatcttttgcaattagtctcggacaaaacctttctaatacatcctcaaaagggaattactgagtttactatttatgatccaaaagctgtaaaggataggtttggagtagagccctataagattcccttatacaaagtattagtaggggacgaatctgataatattccaggagtaaatggaataggtcctaaaaaggcctcaaagattcttgagaaaatttcaagtgtagatgaatttaaaagtaaaataaaagttttggatagtgatttaagggagcttattgagaaaaattggaatattattgaaagaaatttagaacttgttactttaaaaaatatagataaggatcttattcttaaacccttcgagattaaaagagatgaaaaagtaatagattttttgaagagatatgaacttaagagtattcttcaaaagttatttcctgatcttcaagaggaagaaaatatagagattaaagatgtcgaagagatcaattttaatgaggtagaaaaagaaggctactttgcctttaaatgtcttggagatagggcttttgagggtatttctctttccttcaaggagggggaaggatattttatatctccttttgatttcaataatgagataagaaagaagattgaaaatataatttcttcagagaatgttaaaaaaattggctcttatattcaaagagatttacattttttaaactgtaaaataaagggcgatgtatttgatgttagtctcgcatcttatcttttgaaccctgaaagacaaaatcactctcttgatattttgataggagagtatctaaataaaacctcttttattcctcaaaaatacgctggttatctttttccgttaaagtctattcttgaggagaggataaagaatgaagggttagaatttgtactttataacatagagattccattaatccctgtactttactccatggagaagtgggggataaaggtagataaggaatatttaaaacagctttctgatgaattctgcgagagaattaaaaaattggaagaagagatatatgaacttgcaggaaccagatttaatctcaattctccaaaacaactttctgaagttttatttgagaggttaaaacttccttctggtaagaaaggaaaaacaggatattctacgtcgtcttctgtgcttcaaaacttaataaatgctcatcctatagtgagaaaaatcctccaatatagagaactctataaattgaagagtacttatgtggatgctattcctaatctggttaatccacaaacaggtagagttcatacaaaatttaatcctacaggtacagctacaggaagaataagtagtagtgaacctaatcttcagaatattcctataaaaagtgaagaaggtagaaagataagaagagccttcgtgtcagaagatggatattttcttgtatctcttgattattctcagatagagctaaggattatggctcatctttctcaggagcctaaattaatatctgccttccaaaaaggagaggatattcatagaagaacagcatcggagatttttggagtgccagaggaagaagttgatgatcttttaaggtcaagggcaaaggccgttaattttggaattatttatggtatctcttcttttggactttctgagactgtaagtattacaccagaagaggcagagaaatttatagactcgtattttaagcactatccaagagtgaagctttttatagataagactattcatgaggcaagagaaaaactgtacgttaaaaccttatttggcagaaaaagatatattcttgagattaagagcataaataaacaggtaaggaatgcctatgaaaggatagcaataaatgcgccaattcagggaacagctgctgatattataaaacttgccatgatagaaatttacaaggagattgaaaataaaaatctcaagtcaagaatactccttcaaattcatgatgagcttattcttgaagtgccagaggaggagatggaatttactcctttaatggcaaaggaaaaaatggaaaaggtggtagaactttcggttcctcttgtagttgaaatctcggtaggtaaaaatcttgctgaattaaaatgagctataagattggtcgac

SEQ ID NO: 1978 - DNA, 2673 bp, Artificial Sequence
  Description of Artificial Sequence: Synthetic DNA sequence of Dictyoglomus thermophilum DNA P782K
atgaaatacctgctgccgaccgctgctgctggtctgctgctcctcgctgcccagccggcgatggccatggatatcggaattaattcggatccgaaatctctgtgggatctttttcaagaaaataccgagaaagagtccaaaaggaagattctgattattgatggctcaagcctcatatacagggtttattacgcccttccccctttaaagacaaaaaatggtgaattaactaatgctctttatggcttcataagaatacttttaaaggccgtagaagattttaatcctgatcttgtaggcgttgcctttgatagacctgaacctacttttaggcatgtgatttataaagagtataaggctaagagaccacctatgaaggatgatttgaaagcgcagataccatggataagagaatttctaaggttaaatgatatacctctattggaagagcctggctatgaagcggatgatataatagctactatagtgaataaatataaggatgatttaaaatatattctctctggagatttagatcttttgcaattagtctcggacaaaacctttctaatacatcctcaaaagggaattactgagtttactatttatgatccaaaagctgtaaaggataggtttggagtagagccctataagattcccttatacaaagtattagtaggggacgaatctgataatattccaggagtaaatggaataggtcctaaaaaggcctcaaagattcttgagaaaatttcaagtgtagatgaatttaaaagtaaaataaaagttttggatagtgatttaagggagcttattgagaaaaattggaatattattgaaagaaatttagaacttgttactttaaaaaatatagataaggatcttattcttaaacccttcgagattaaaagagatgaaaaagtaatagattttttgaagagatatgaacttaagagtattcttcaaaagttatttcctgatcttcaagaggaagaaaatatagagattaaagatgtcgaagagatcaattttaatgaggtagaaaaagaaggctactttgcctttaaatgtcttggagatagggcttttgagggtatttctctttccttcaaggagggggaaggatattttatatctccttttgatttcaataatgagataagaaagaagattgaaaatataatttcttcagagaatgttaaaaaaattggctcttatattcaaagagatttacattttttaaactgtaaaataaagggcgatgtatttgatgttagtctcgcatcttatcttttgaaccctgaaagacaaaatcactctcttgatattttgataggagagtatctaaataaaacctcttttattcctcaaaaatacgctggttatctttttccgttaaagtctattcttgaggagaggataaagaatgaagggttagaatttgtactttataacatagagattccattaatccctgtactttactccatggagaagtgggggataaaggtagataaggaatatttaaaacagctttctgatgaattctgcgagagaattaaaaaattggaagaagagatatatgaacttgcaggaaccagatttaatctcaattctccaaaacaactttctgaagttttatttgagaggttaaaacttccttctggtaagaaaggaaaaacaggatattctacgtcgtcttctgtgcttcaaaacttaataaatgctcatcctatagtgagaaaaatcctccaatatagagaactctataaattgaagagtacttatgtggatgctattcctaatctggttaatccacaaacaggtagagttcatacaaaatttaatcctacaggtacagctacaggaagaataagtagtagtgaacctaatcttcagaatattcctataaaaagtgaagaaggtagaaagataagaagagccttcgtgtcagaagatggatattttcttgtatctcttgattattctcagatagagctaaggattatggctcatctttctcaggagcctaaattaatatctgccttccaaaaaggagaggatattcatagaagaacagcatcggagatttttggagtgccagaggaagaagttgatgatcttttaaggtcaagggcaaaggccgttaattttggaattatttatggtatctcttcttttggactttctgagactgtaagtattacaccagaagaggcagagaaatttatagactcgtattttaagcactatccaagagtgaagctttttatagataagactattcatgaggcaagagaaaaactgtacgttaaaaccttatttggcagaaaaagatatattaaagagattaagagcataaataaacaggtaaggaatgcctatgaaaggatagcaataaatgcgccaattcagggaacagctgctgatattataaaacttgccatgatagaaatttacaaggagattgaaaataaaaatctcaagtcaagaatactccttcaaattcatgatgagcttattcttgaagtgccagaggaggagatggaatttactcctttaatggcaaaggaaaaaatggaaaaggtggtagaactttcggttcctcttgtagttgaaatctcggtaggtaaaaatcttgctgaattaaaatgagctataagattggtcgac

SEQ ID NO: 1979 - DNA, 2673 bp, Artificial Sequence
  Description of Artificial Sequence: Synthetic DNA sequence of Dictyoglomus thermophilum DNA P782M
atgaaatacctgctgccgaccgctgctgctggtctgctgctcctcgctgcccagccggcgatggccatggatatcggaattaattcggatccgaaatctctgtgggatctttttcaagaaaataccgagaaagagtccaaaaggaagattctgattattgatggctcaagcctcatatacagggtttattacgcccttccccctttaaagacaaaaaatggtgaattaactaatgctctttatggcttcataagaatacttttaaaggccgtagaagattttaatcctgatcttgtaggcgttgcctttgatagacctgaacctacttttaggcatgtgatttataaagagtataaggctaagagaccacctatgaaggatgatttgaaagcgcagataccatggataagagaatttctaaggttaaatgatatacctctattggaagagcctggctatgaagcggatgatataatagctactatagtgaataaatataaggatgatttaaaatatattctctctggagatttagatcttttgcaattagtctcggacaaaacctttctaatacatcctcaaaagggaattactgagtttactatttatgatccaaaagctgtaaaggataggtttggagtagagccctataagattcccttatacaaagtattagtaggggacgaatctgataatattccaggagtaaatggaataggtcctaaaaaggcctcaaagattcttgagaaaatttcaagtgtagatgaatttaaaagtaaaataaaagttttggatagtgatttaagggagcttattgagaaaaattggaatattattgaaagaaatttagaacttgttactttaaaaaatatagataaggatcttattcttaaacccttcgagattaaaagagatgaaaaagtaatagattttttgaagagatatgaacttaagagtattcttcaaaagttatttcctgatcttcaagaggaagaaaatatagagattaaagatgtcgaagagatcaattttaatgaggtagaaaaagaaggctactttgcctttaaatgtcttggagatagggcttttgagggtatttctctttccttcaaggagggggaaggatattttatatctccttttgatttcaataatgagataagaaagaagattgaaaatataatttcttcagagaatgttaaaaaaattggctcttatattcaaagagatttacattttttaaactgtaaaataaagggcgatgtatttgatgttagtctcgcatcttatcttttgaaccctgaaagacaaaatcactctcttgatattttgataggagagtatctaaataaaacctcttttattcctcaaaaatacgctggttatctttttccgttaaagtctattcttgaggagaggataaagaatgaagggttagaatttgtactttataacatagagattccattaatccctgtactttactccatggagaagtgggggataaaggtagataaggaatatttaaaacagctttctgatgaattctgcgagagaattaaaaaattggaagaagagatatatgaacttgcaggaaccagatttaatctcaattctccaaaacaactttctgaagttttatttgagaggttaaaacttccttctggtaagaaaggaaaaacaggatattctacgtcgtcttctgtgcttcaaaacttaataaatgctcatcctatagtgagaaaaatcctccaatatagagaactctataaattgaagagtacttatgtggatgctattcctaatctggttaatccacaaacaggtagagttcatacaaaatttaatcctacaggtacagctacaggaagaataagtagtagtgaacctaatcttcagaatattcctataaaaagtgaagaaggtagaaagataagaagagccttcgtgtcagaagatggatattttcttgtatctcttgattattctcagatagagctaaggattatggctcatctttctcaggagcctaaattaatatctgccttccaaaaaggagaggatattcatagaagaacagcatcggagatttttggagtgccagaggaagaagttgatgatcttttaaggtcaagggcaaaggccgttaattttggaattatttatggtatctcttcttttggactttctgagactgtaagtattacaccagaagaggcagagaaatttatagactcgtattttaagcactatccaagagtgaagctttttatagataagactattcatgaggcaagagaaaaactgtacgttaaaaccttatttggcagaaaaagatatattatggagattaagagcataaataaacaggtaaggaatgcctatgaaaggatagcaataaatgcgccaattcagggaacagctgctgatattataaaacttgccatgatagaaatttacaaggagattgaaaataaaaatctcaagtcaagaatactccttcaaattcatgatgagcttattcttgaagtgccagaggaggagatggaatttactcctttaatggcaaaggaaaaaatggaaaaggtggtagaactttcggttcctcttgtagttgaaatctcggtaggtaaaaatcttgctgaattaaaatgagctataagattggtcgac

SEQ ID NO: 1980 - DNA, 2673 bp, Artificial Sequence
  Description of Artificial Sequence: Synthetic DNA sequence of Dictyoglomus thermophilum DNA P782F
atgaaatacctgctgccgaccgctgctgctggtctgctgctcctcgctgcccagccggcgatggccatggatatcggaattaattcggatccgaaatctctgtgggatctttttcaagaaaataccgagaaagagtccaaaaggaagattctgattattgatggctcaagcctcatatacagggtttattacgcccttccccctttaaagacaaaaaatggtgaattaactaatgctctttatggcttcataagaatacttttaaaggccgtagaagattttaatcctgatcttgtaggcgttgcctttgatagacctgaacctacttttaggcatgtgatttataaagagtataaggctaagagaccacctatgaaggatgatttgaaagcgcagataccatggataagagaatttctaaggttaaatgatatacctctattggaagagcctggctatgaagcggatgatataatagctactatagtgaataaatataaggatgatttaaaatatattctctctggagatttagatcttttgcaattagtctcggacaaaacctttctaatacatcctcaaaagggaattactgagtttactatttatgatccaaaagctgtaaaggataggtttggagtagagccctataagattcccttatacaaagtattagtaggggacgaatctgataatattccaggagtaaatggaataggtcctaaaaaggcctcaaagattcttgagaaaatttcaagtgtagatgaatttaaaagtaaaataaaagttttggatagtgatttaagggagcttattgagaaaaattggaatattattgaaagaaatttagaacttgttactttaaaaaatatagataaggatcttattcttaaacccttcgagattaaaagagatgaaaaagtaatagattttttgaagagatatgaacttaagagtattcttcaaaagttatttcctgatcttcaagaggaagaaaatatagagattaaagatgtcgaagagatcaattttaatgaggtagaaaaagaaggctactttgcctttaaatgtcttggagatagggcttttgagggtatttctctttccttcaaggagggggaaggatattttatatctccttttgatttcaataatgagataagaaagaagattgaaaatataatttcttcagagaatgttaaaaaaattggctcttatattcaaagagatttacattttttaaactgtaaaataaagggcgatgtatttgatgttagtctcgcatcttatcttttgaaccctgaaagacaaaatcactctcttgatattttgataggagagtatctaaataaaacctcttttattcctcaaaaatacgctggttatctttttccgttaaagtctattcttgaggagaggataaagaatgaagggttagaatttgtactttataacatagagattccattaatccctgtactttactccatggagaagtgggggataaaggtagataaggaatatttaaaacagctttctgatgaattctgcgagagaattaaaaaattggaagaagagatatatgaacttgcaggaaccagatttaatctcaattctccaaaacaactttctgaagttttatttgagaggttaaaacttccttctggtaagaaaggaaaaacaggatattctacgtcgtcttctgtgcttcaaaacttaataaatgctcatcctatagtgagaaaaatcctccaatatagagaactctataaattgaagagtacttatgtggatgctattcctaatctggttaatccacaaacaggtagagttcatacaaaatttaatcctacaggtacagctacaggaagaataagtagtagtgaacctaatcttcagaatattcctataaaaagtgaagaaggtagaaagataagaagagccttcgtgtcagaagatggatattttcttgtatctcttgattattctcagatagagctaaggattatggctcatctttctcaggagcctaaattaatatctgccttccaaaaaggagaggatattcatagaagaacagcatcggagatttttggagtgccagaggaagaagttgatgatcttttaaggtcaagggcaaaggccgttaattttggaattatttatggtatctcttcttttggactttctgagactgtaagtattacaccagaagaggcagagaaatttatagactcgtattttaagcactatccaagagtgaagctttttatagataagactattcatgaggcaagagaaaaactgtacgttaaaaccttatttggcagaaaaagatatatttttgagattaagagcataaataaacaggtaaggaatgcctatgaaaggatagcaataaatgcgccaattcagggaacagctgctgatattataaaacttgccatgatagaaatttacaaggagattgaaaataaaaatctcaagtcaagaatactccttcaaattcatgatgagcttattcttgaagtgccagaggaggagatggaatttactcctttaatggcaaaggaaaaaatggaaaaggtggtagaactttcggttcctcttgtagttgaaatctcggtaggtaaaaatcttgctgaattaaaatgagctataagattggtcgac

SEQ ID NO: 1981 - DNA, 2673 bp, Artificial Sequence
  Description of Artificial Sequence: Synthetic DNA sequence of Dictyoglomus thermophilum DNA P782S
atgaaatacctgctgccgaccgctgctgctggtctgctgctcctcgctgcccagccggcgatggccatggatatcggaattaattcggatccgaaatctctgtgggatctttttcaagaaaataccgagaaagagtccaaaaggaagattctgattattgatggctcaagcctcatatacagggtttattacgcccttccccctttaaagacaaaaaatggtgaattaactaatgctctttatggcttcataagaatacttttaaaggccgtagaagattttaatcctgatcttgtaggcgttgcctttgatagacctgaacctacttttaggcatgtgatttataaagagtataaggctaagagaccacctatgaaggatgatttgaaagcgcagataccatggataagagaatttctaaggttaaatgatatacctctattggaagagcctggctatgaagcggatgatataatagctactatagtgaataaatataaggatgatttaaaatatattctctctggagatttagatcttttgcaattagtctcggacaaaacctttctaatacatcctcaaaagggaattactgagtttactatttatgatccaaaagctgtaaaggataggtttggagtagagccctataagattcccttatacaaagtattagtaggggacgaatctgataatattccaggagtaaatggaataggtcctaaaaaggcctcaaagattcttgagaaaatttcaagtgtagatgaatttaaaagtaaaataaaagttttggatagtgatttaagggagcttattgagaaaaattggaatattattgaaagaaatttagaacttgttactttaaaaaatatagataaggatcttattcttaaacccttcgagattaaaagagatgaaaaagtaatagattttttgaagagatatgaacttaagagtattcttcaaaagttatttcctgatcttcaagaggaagaaaatatagagattaaagatgtcgaagagatcaattttaatgaggtagaaaaagaaggctactttgcctttaaatgtcttggagatagggcttttgagggtatttctctttccttcaaggagggggaaggatattttatatctccttttgatttcaataatgagataagaaagaagattgaaaatataatttcttcagagaatgttaaaaaaattggctcttatattcaaagagatttacattttttaaactgtaaaataaagggcgatgtatttgatgttagtctcgcatcttatcttttgaaccctgaaagacaaaatcactctcttgatattttgataggagagtatctaaataaaacctcttttattcctcaaaaatacgctggttatctttttccgttaaagtctattcttgaggagaggataaagaatgaagggttagaatttgtactttataacatagagattccattaatccctgtactttactccatggagaagtgggggataaaggtagataaggaatatttaaaacagctttctgatgaattctgcgagagaattaaaaaattggaagaagagatatatgaacttgcaggaaccagatttaatctcaattctccaaaacaactttctgaagttttatttgagaggttaaaacttccttctggtaagaaaggaaaaacaggatattctacgtcgtcttctgtgcttcaaaacttaataaatgctcatcctatagtgagaaaaatcctccaatatagagaactctataaattgaagagtacttatgtggatgctattcctaatctggttaatccacaaacaggtagagttcatacaaaatttaatcctacaggtacagctacaggaagaataagtagtagtgaacctaatcttcagaatattcctataaaaagtgaagaaggtagaaagataagaagagccttcgtgtcagaagatggatattttcttgtatctcttgattattctcagatagagctaaggattatggctcatctttctcaggagcctaaattaatatctgccttccaaaaaggagaggatattcatagaagaacagcatcggagatttttggagtgccagaggaagaagttgatgatcttttaaggtcaagggcaaaggccgttaattttggaattatttatggtatctcttcttttggactttctgagactgtaagtattacaccagaagaggcagagaaatttatagactcgtattttaagcactatccaagagtgaagctttttatagataagactattcatgaggcaagagaaaaactgtacgttaaaaccttatttggcagaaaaagatatatttctgagattaagagcataaataaacaggtaaggaatgcctatgaaaggatagcaataaatgcgccaattcagggaacagctgctgatattataaaacttgccatgatagaaatttacaaggagattgaaaataaaaatctcaagtcaagaatactccttcaaattcatgatgagcttattcttgaagtgccagaggaggagatggaatttactcctttaatggcaaaggaaaaaatggaaaaggtggtagaactttcggttcctcttgtagttgaaatctcggtaggtaaaaatcttgctgaattaaaatgagctataagattggtcgac

SEQ ID NO: 1982 - DNA, 2673 bp, Artificial Sequence
  Description of Artificial Sequence: Synthetic DNA sequence of Dictyoglomus thermophilum DNA P782T
atgaaatacctgctgccgaccgctgctgctggtctgctgctcctcgctgcccagccggcgatggccatggatatcggaattaattcggatccgaaatctctgtgggatctttttcaagaaaataccgagaaagagtccaaaaggaagattctgattattgatggctcaagcctcatatacagggtttattacgcccttccccctttaaagacaaaaaatggtgaattaactaatgctctttatggcttcataagaatacttttaaaggccgtagaagattttaatcctgatcttgtaggcgttgcctttgatagacctgaacctacttttaggcatgtgatttataaagagtataaggctaagagaccacctatgaaggatgatttgaaagcgcagataccatggataagagaatttctaaggttaaatgatatacctctattggaagagcctggctatgaagcggatgatataatagctactatagtgaataaatataaggatgatttaaaatatattctctctggagatttagatcttttgcaattagtctcggacaaaacctttctaatacatcctcaaaagggaattactgagtttactatttatgatccaaaagctgtaaaggataggtttggagtagagccctataagattcccttatacaaagtattagtaggggacgaatctgataatattccaggagtaaatggaataggtcctaaaaaggcctcaaagattcttgagaaaatttcaagtgtagatgaatttaaaagtaaaataaaagttttggatagtgatttaagggagcttattgagaaaaattggaatattattgaaagaaatttagaacttgttactttaaaaaatatagataaggatcttattcttaaacccttcgagattaaaagagatgaaaaagtaatagattttttgaagagatatgaacttaagagtattcttcaaaagttatttcctgatcttcaagaggaagaaaatatagagattaaagatgtcgaagagatcaattttaatgaggtagaaaaagaaggctactttgcctttaaatgtcttggagatagggcttttgagggtatttctctttccttcaaggagggggaaggatattttatatctccttttgatttcaataatgagataagaaagaagattgaaaatataatttcttcagagaatgttaaaaaaattggctcttatattcaaagagatttacattttttaaactgtaaaataaagggcgatgtatttgatgttagtctcgcatcttatcttttgaaccctgaaagacaaaatcactctcttgatattttgataggagagtatctaaataaaacctcttttattcctcaaaaatacgctggttatctttttccgttaaagtctattcttgaggagaggataaagaatgaagggttagaatttgtactttataacatagagattccattaatccctgtactttactccatggagaagtgggggataaaggtagataaggaatatttaaaacagctttctgatgaattctgcgagagaattaaaaaattggaagaagagatatatgaacttgcaggaaccagatttaatctcaattctccaaaacaactttctgaagttttatttgagaggttaaaacttccttctggtaagaaaggaaaaacaggatattctacgtcgtcttctgtgcttcaaaacttaataaatgctcatcctatagtgagaaaaatcctccaatatagagaactctataaattgaagagtacttatgtggatgctattcctaatctggttaatccacaaacaggtagagttcatacaaaatttaatcctacaggtacagctacaggaagaataagtagtagtgaacctaatcttcagaatattcctataaaaagtgaagaaggtagaaagataagaagagccttcgtgtcagaagatggatattttcttgtatctcttgattattctcagatagagctaaggattatggctcatctttctcaggagcctaaattaatatctgccttccaaaaaggagaggatattcatagaagaacagcatcggagatttttggagtgccagaggaagaagttgatgatcttttaaggtcaagggcaaaggccgttaattttggaattatttatggtatctcttcttttggactttctgagactgtaagtattacaccagaagaggcagagaaatttatagactcgtattttaagcactatccaagagtgaagctttttatagataagactattcatgaggcaagagaaaaactgtacgttaaaaccttatttggcagaaaaagatatattactgagattaagagcataaataaacaggtaaggaatgcctatgaaaggatagcaataaatgcgccaattcagggaacagctgctgatattataaaacttgccatgatagaaatttacaaggagattgaaaataaaaatctcaagtcaagaatactccttcaaattcatgatgagcttattcttgaagtgccagaggaggagatggaatttactcctttaatggcaaaggaaaaaatggaaaaggtggtagaactttcggttcctcttgtagttgaaatctcggtaggtaaaaatcttgctgaattaaaatgagctataagattggtcgac

SEQ ID NO: 1983 - DNA, 2673 bp, Artificial Sequence
  Description of Artificial Sequence: Synthetic DNA sequence of Dictyoglomus thermophilum DNA P782W
atgaaatacctgctgccgaccgctgctgctggtctgctgctcctcgctgcccagccggcgatggccatggatatcggaattaattcggatccgaaatctctgtgggatctttttcaagaaaataccgagaaagagtccaaaaggaagattctgattattgatggctcaagcctcatatacagggtttattacgcccttccccctttaaagacaaaaaatggtgaattaactaatgctctttatggcttcataagaatacttttaaaggccgtagaagattttaatcctgatcttgtaggcgttgcctttgatagacctgaacctacttttaggcatgtgatttataaagagtataaggctaagagaccacctatgaaggatgatttgaaagcgcagataccatggataagagaatttctaaggttaaatgatatacctctattggaagagcctggctatgaagcggatgatataatagctactatagtgaataaatataaggatgatttaaaatatattctctctggagatttagatcttttgcaattagtctcggacaaaacctttctaatacatcctcaaaagggaattactgagtttactatttatgatccaaaagctgtaaaggataggtttggagtagagccctataagattcccttatacaaagtattagtaggggacgaatctgataatattccaggagtaaatggaataggtcctaaaaaggcctcaaagattcttgagaaaatttcaagtgtagatgaatttaaaagtaaaataaaagttttggatagtgatttaagggagcttattgagaaaaattggaatattattgaaagaaatttagaacttgttactttaaaaaatatagataaggatcttattcttaaacccttcgagattaaaagagatgaaaaagtaatagattttttgaagagatatgaacttaagagtattcttcaaaagttatttcctgatcttcaagaggaagaaaatatagagattaaagatgtcgaagagatcaattttaatgaggtagaaaaagaaggctactttgcctttaaatgtcttggagatagggcttttgagggtatttctctttccttcaaggagggggaaggatattttatatctccttttgatttcaataatgagataagaaagaagattgaaaatataatttcttcagagaatgttaaaaaaattggctcttatattcaaagagatttacattttttaaactgtaaaataaagggcgatgtatttgatgttagtctcgcatcttatcttttgaaccctgaaagacaaaatcactctcttgatattttgataggagagtatctaaataaaacctcttttattcctcaaaaatacgctggttatctttttccgttaaagtctattcttgaggagaggataaagaatgaagggttagaatttgtactttataacatagagattccattaatccctgtactttactccatggagaagtgggggataaaggtagataaggaatatttaaaacagctttctgatgaattctgcgagagaattaaaaaattggaagaagagatatatgaacttgcaggaaccagatttaatctcaattctccaaaacaactttctgaagttttatttgagaggttaaaacttccttctggtaagaaaggaaaaacaggatattctacgtcgtcttctgtgcttcaaaacttaataaatgctcatcctatagtgagaaaaatcctccaatatagagaactctataaattgaagagtacttatgtggatgctattcctaatctggttaatccacaaacaggtagagttcatacaaaatttaatcctacaggtacagctacaggaagaataagtagtagtgaacctaatcttcagaatattcctataaaaagtgaagaaggtagaaagataagaagagccttcgtgtcagaagatggatattttcttgtatctcttgattattctcagatagagctaaggattatggctcatctttctcaggagcctaaattaatatctgccttccaaaaaggagaggatattcatagaagaacagcatcggagatttttggagtgccagaggaagaagttgatgatcttttaaggtcaagggcaaaggccgttaattttggaattatttatggtatctcttcttttggactttctgagactgtaagtattacaccagaagaggcagagaaatttatagactcgtattttaagcactatccaagagtgaagctttttatagataagactattcatgaggcaagagaaaaactgtacgttaaaaccttatttggcagaaaaagatatatttgggagattaagagcataaataaacaggtaaggaatgcctatgaaaggatagcaataaatgcgccaattcagggaacagctgctgatattataaaacttgccatgatagaaatttacaaggagattgaaaataaaaatctcaagtcaagaatactccttcaaattcatgatgagcttattcttgaagtgccagaggaggagatggaatttactcctttaatggcaaaggaaaaaatggaaaaggtggtagaactttcggttcctcttgtagttgaaatctcggtaggtaaaaatcttgctgaattaaaatgagctataagattggtcgac

SEQ ID NO: 1984 - DNA, 2673 bp, Artificial Sequence
  Description of Artificial Sequence: Synthetic DNA sequence of Dictyoglomus thermophilum DNA P782Y
atgaaatacctgctgccgaccgctgctgctggtctgctgctcctcgctgcccagccggcgatggccatggatatcggaattaattcggatccgaaatctctgtgggatctttttcaagaaaataccgagaaagagtccaaaaggaagattctgattattgatggctcaagcctcatatacagggtttattacgcccttccccctttaaagacaaaaaatggtgaattaactaatgctctttatggcttcataagaatacttttaaaggccgtagaagattttaatcctgatcttgtaggcgttgcctttgatagacctgaacctacttttaggcatgtgatttataaagagtataaggctaagagaccacctatgaaggatgatttgaaagcgcagataccatggataagagaatttctaaggttaaatgatatacctctattggaagagcctggctatgaagcggatgatataatagctactatagtgaataaatataaggatgatttaaaatatattctctctggagatttagatcttttgcaattagtctcggacaaaacctttctaatacatcctcaaaagggaattactgagtttactatttatgatccaaaagctgtaaaggataggtttggagtagagccctataagattcccttatacaaagtattagtaggggacgaatctgataatattccaggagtaaatggaataggtcctaaaaaggcctcaaagattcttgagaaaatttcaagtgtagatgaatttaaaagtaaaataaaagttttggatagtgatttaagggagcttattgagaaaaattggaatattattgaaagaaatttagaacttgttactttaaaaaatatagataaggatcttattcttaaacccttcgagattaaaagagatgaaaaagtaatagattttttgaagagatatgaacttaagagtattcttcaaaagttatttcctgatcttcaagaggaagaaaatatagagattaaagatgtcgaagagatcaattttaatgaggtagaaaaagaaggctactttgcctttaaatgtcttggagatagggcttttgagggtatttctctttccttcaaggagggggaaggatattttatatctccttttgatttcaataatgagataagaaagaagattgaaaatataatttcttcagagaatgttaaaaaaattggctcttatattcaaagagatttacattttttaaactgtaaaataaagggcgatgtatttgatgttagtctcgcatcttatcttttgaaccctgaaagacaaaatcactctcttgatattttgataggagagtatctaaataaaacctcttttattcctcaaaaatacgctggttatctttttccgttaaagtctattcttgaggagaggataaagaatgaagggttagaatttgtactttataacatagagattccattaatccctgtactttactccatggagaagtgggggataaaggtagataaggaatatttaaaacagctttctgatgaattctgcgagagaattaaaaaattggaagaagagatatatgaacttgcaggaaccagatttaatctcaattctccaaaacaactttctgaagttttatttgagaggttaaaacttccttctggtaagaaaggaaaaacaggatattctacgtcgtcttctgtgcttcaaaacttaataaatgctcatcctatagtgagaaaaatcctccaatatagagaactctataaattgaagagtacttatgtggatgctattcctaatctggttaatccacaaacaggtagagttcatacaaaatttaatcctacaggtacagctacaggaagaataagtagtagtgaacctaatcttcagaatattcctataaaaagtgaagaaggtagaaagataagaagagccttcgtgtcagaagatggatattttcttgtatctcttgattattctcagatagagctaaggattatggctcatctttctcaggagcctaaattaatatctgccttccaaaaaggagaggatattcatagaagaacagcatcggagatttttggagtgccagaggaagaagttgatgatcttttaaggtcaagggcaaaggccgttaattttggaattatttatggtatctcttcttttggactttctgagactgtaagtattacaccagaagaggcagagaaatttatagactcgtattttaagcactatccaagagtgaagctttttatagataagactattcatgaggcaagagaaaaactgtacgttaaaaccttatttggcagaaaaagatatatttatgagattaagagcataaataaacaggtaaggaatgcctatgaaaggatagcaataaatgcgccaattcagggaacagctgctgatattataaaacttgccatgatagaaatttacaaggagattgaaaataaaaatctcaagtcaagaatactccttcaaattcatgatgagcttattcttgaagtgccagaggaggagatggaatttactcctttaatggcaaaggaaaaaatggaaaaggtggtagaactttcggttcctcttgtagttgaaatctcggtaggtaaaaatcttgctgaattaaaatgagctataagattggtcgac

SEQ ID NO: 1985 - DNA, 2673 bp, Artificial Sequence
  Description of Artificial Sequence: Synthetic DNA sequence of Dictyoglomus thermophilum DNA P782V
atgaaatacctgctgccgaccgctgctgctggtctgctgctcctcgctgcccagccggcgatggccatggatatcggaattaattcggatccgaaatctctgtgggatctttttcaagaaaataccgagaaagagtccaaaaggaagattctgattattgatggctcaagcctcatatacagggtttattacgcccttccccctttaaagacaaaaaatggtgaattaactaatgctctttatggcttcataagaatacttttaaaggccgtagaagattttaatcctgatcttgtaggcgttgcctttgatagacctgaacctacttttaggcatgtgatttataaagagtataaggctaagagaccacctatgaaggatgatttgaaagcgcagataccatggataagagaatttctaaggttaaatgatatacctctattggaagagcctggctatgaagcggatgatataatagctactatagtgaataaatataaggatgatttaaaatatattctctctggagatttagatcttttgcaattagtctcggacaaaacctttctaatacatcctcaaaagggaattactgagtttactatttatgatccaaaagctgtaaaggataggtttggagtagagccctataagattcccttatacaaagtattagtaggggacgaatctgataatattccaggagtaaatggaataggtcctaaaaaggcctcaaagattcttgagaaaatttcaagtgtagatgaatttaaaagtaaaataaaagttttggatagtgatttaagggagcttattgagaaaaattggaatattattgaaagaaatttagaacttgttactttaaaaaatatagataaggatcttattcttaaacccttcgagattaaaagagatgaaaaagtaatagattttttgaagagatatgaacttaagagtattcttcaaaagttatttcctgatcttcaagaggaagaaaatatagagattaaagatgtcgaagagatcaattttaatgaggtagaaaaagaaggctactttgcctttaaatgtcttggagatagggcttttgagggtatttctctttccttcaaggagggggaaggatattttatatctccttttgatttcaataatgagataagaaagaagattgaaaatataatttcttcagagaatgttaaaaaaattggctcttatattcaaagagatttacattttttaaactgtaaaataaagggcgatgtatttgatgttagtctcgcatcttatcttttgaaccctgaaagacaaaatcactctcttgatattttgataggagagtatctaaataaaacctcttttattcctcaaaaatacgctggttatctttttccgttaaagtctattcttgaggagaggataaagaatgaagggttagaatttgtactttataacatagagattccattaatccctgtactttactccatggagaagtgggggataaaggtagataaggaatatttaaaacagctttctgatgaattctgcgagagaattaaaaaattggaagaagagatatatgaacttgcaggaaccagatttaatctcaattctccaaaacaactttctgaagttttatttgagaggttaaaacttccttctggtaagaaaggaaaaacaggatattctacgtcgtcttctgtgcttcaaaacttaataaatgctcatcctatagtgagaaaaatcctccaatatagagaactctataaattgaagagtacttatgtggatgctattcctaatctggttaatccacaaacaggtagagttcatacaaaatttaatcctacaggtacagctacaggaagaataagtagtagtgaacctaatcttcagaatattcctataaaaagtgaagaaggtagaaagataagaagagccttcgtgtcagaagatggatattttcttgtatctcttgattattctcagatagagctaaggattatggctcatctttctcaggagcctaaattaatatctgccttccaaaaaggagaggatattcatagaagaacagcatcggagatttttggagtgccagaggaagaagttgatgatcttttaaggtcaagggcaaaggccgttaattttggaattatttatggtatctcttcttttggactttctgagactgtaagtattacaccagaagaggcagagaaatttatagactcgtattttaagcactatccaagagtgaagctttttatagataagactattcatgaggcaagagaaaaactgtacgttaaaaccttatttggcagaaaaagatatattgttgagattaagagcataaataaacaggtaaggaatgcctatgaaaggatagcaataaatgcgccaattcagggaacagctgctgatattataaaacttgccatgatagaaatttacaaggagattgaaaataaaaatctcaagtcaagaatactccttcaaattcatgatgagcttattcttgaagtgccagaggaggagatggaatttactcctttaatggcaaaggaaaaaatggaaaaggtggtagaactttcggttcctcttgtagttgaaatctcggtaggtaaaaatcttgctgaattaaaatgagctataagattggtcgac

SEQ ID NO: 1986 - DNA, 2673 bp, Artificial Sequence
  Description of Artificial Sequence: Synthetic DNA sequence of Dictyoglomus thermophilum DNA E783A
atgaaatacctgctgccgaccgctgctgctggtctgctgctcctcgctgcccagccggcgatggccatggatatcggaattaattcggatccgaaatctctgtgggatctttttcaagaaaataccgagaaagagtccaaaaggaagattctgattattgatggctcaagcctcatatacagggtttattacgcccttccccctttaaagacaaaaaatggtgaattaactaatgctctttatggcttcataagaatacttttaaaggccgtagaagattttaatcctgatcttgtaggcgttgcctttgatagacctgaacctacttttaggcatgtgatttataaagagtataaggctaagagaccacctatgaaggatgatttgaaagcgcagataccatggataagagaatttctaaggttaaatgatatacctctattggaagagcctggctatgaagcggatgatataatagctactatagtgaataaatataaggatgatttaaaatatattctctctggagatttagatcttttgcaattagtctcggacaaaacctttctaatacatcctcaaaagggaattactgagtttactatttatgatccaaaagctgtaaaggataggtttggagtagagccctataagattcccttatacaaagtattagtaggggacgaatctgataatattccaggagtaaatggaataggtcctaaaaaggcctcaaagattcttgagaaaatttcaagtgtagatgaatttaaaagtaaaataaaagttttggatagtgatttaagggagcttattgagaaaaattggaatattattgaaagaaatttagaacttgttactttaaaaaatatagataaggatcttattcttaaacccttcgagattaaaagagatgaaaaagtaatagattttttgaagagatatgaacttaagagtattcttcaaaagttatttcctgatcttcaagaggaagaaaatatagagattaaagatgtcgaagagatcaattttaatgaggtagaaaaagaaggctactttgcctttaaatgtcttggagatagggcttttgagggtatttctctttccttcaaggagggggaaggatattttatatctccttttgatttcaataatgagataagaaagaagattgaaaatataatttcttcagagaatgttaaaaaaattggctcttatattcaaagagatttacattttttaaactgtaaaataaagggcgatgtatttgatgttagtctcgcatcttatcttttgaaccctgaaagacaaaatcactctcttgatattttgataggagagtatctaaataaaacctcttttattcctcaaaaatacgctggttatctttttccgttaaagtctattcttgaggagaggataaagaatgaagggttagaatttgtactttataacatagagattccattaatccctgtactttactccatggagaagtgggggataaaggtagataaggaatatttaaaacagctttctgatgaattctgcgagagaattaaaaaattggaagaagagatatatgaacttgcaggaaccagatttaatctcaattctccaaaacaactttctgaagttttatttgagaggttaaaacttccttctggtaagaaaggaaaaacaggatattctacgtcgtcttctgtgcttcaaaacttaataaatgctcatcctatagtgagaaaaatcctccaatatagagaactctataaattgaagagtacttatgtggatgctattcctaatctggttaatccacaaacaggtagagttcatacaaaatttaatcctacaggtacagctacaggaagaataagtagtagtgaacctaatcttcagaatattcctataaaaagtgaagaaggtagaaagataagaagagccttcgtgtcagaagatggatattttcttgtatctcttgattattctcagatagagctaaggattatggctcatctttctcaggagcctaaattaatatctgccttccaaaaaggagaggatattcatagaagaacagcatcggagatttttggagtgccagaggaagaagttgatgatcttttaaggtcaagggcaaaggccgttaattttggaattatttatggtatctcttcttttggactttctgagactgtaagtattacaccagaagaggcagagaaatttatagactcgtattttaagcactatccaagagtgaagctttttatagataagactattcatgaggcaagagaaaaactgtacgttaaaaccttatttggcagaaaaagatatattcctgctattaagagcataaataaacaggtaaggaatgcctatgaaaggatagcaataaatgcgccaattcagggaacagctgctgatattataaaacttgccatgatagaaatttacaaggagattgaaaataaaaatctcaagtcaagaatactccttcaaattcatgatgagcttattcttgaagtgccagaggaggagatggaatttactcctttaatggcaaaggaaaaaatggaaaaggtggtagaactttcggttcctcttgtagttgaaatctcggtaggtaaaaatcttgctgaattaaaatgagctataagattggtcgac

SEQ ID NO: 1987 - DNA, 2673 bp, Artificial Sequence
  Description of Artificial Sequence: Synthetic DNA sequence of Dictyoglomus thermophilum DNA E783R
atgaaatacctgctgccgaccgctgctgctggtctgctgctcctcgctgcccagccggcgatggccatggatatcggaattaattcggatccgaaatctctgtgggatctttttcaagaaaataccgagaaagagtccaaaaggaagattctgattattgatggctcaagcctcatatacagggtttattacgcccttccccctttaaagacaaaaaatggtgaattaactaatgctctttatggcttcataagaatacttttaaaggccgtagaagattttaatcctgatcttgtaggcgttgcctttgatagacctgaacctacttttaggcatgtgatttataaagagtataaggctaagagaccacctatgaaggatgatttgaaagcgcagataccatggataagagaatttctaaggttaaatgatatacctctattggaagagcctggctatgaagcggatgatataatagctactatagtgaataaatataaggatgatttaaaatatattctctctggagatttagatcttttgcaattagtctcggacaaaacctttctaatacatcctcaaaagggaattactgagtttactatttatgatccaaaagctgtaaaggataggtttggagtagagccctataagattcccttatacaaagtattagtaggggacgaatctgataatattccaggagtaaatggaataggtcctaaaaaggcctcaaagattcttgagaaaatttcaagtgtagatgaatttaaaagtaaaataaaagttttggatagtgatttaagggagcttattgagaaaaattggaatattattgaaagaaatttagaacttgttactttaaaaaatatagataaggatcttattcttaaacccttcgagattaaaagagatgaaaaagtaatagattttttgaagagatatgaacttaagagtattcttcaaaagttatttcctgatcttcaagaggaagaaaatatagagattaaagatgtcgaagagatcaattttaatgaggtagaaaaagaaggctactttgcctttaaatgtcttggagatagggcttttgagggtatttctctttccttcaaggagggggaaggatattttatatctccttttgatttcaataatgagataagaaagaagattgaaaatataatttcttcagagaatgttaaaaaaattggctcttatattcaaagagatttacattttttaaactgtaaaataaagggcgatgtatttgatgttagtctcgcatcttatcttttgaaccctgaaagacaaaatcactctcttgatattttgataggagagtatctaaataaaacctcttttattcctcaaaaatacgctggttatctttttccgttaaagtctattcttgaggagaggataaagaatgaagggttagaatttgtactttataacatagagattccattaatccctgtactttactccatggagaagtgggggataaaggtagataaggaatatttaaaacagctttctgatgaattctgcgagagaattaaaaaattggaagaagagatatatgaacttgcaggaaccagatttaatctcaattctccaaaacaactttctgaagttttatttgagaggttaaaacttccttctggtaagaaaggaaaaacaggatattctacgtcgtcttctgtgcttcaaaacttaataaatgctcatcctatagtgagaaaaatcctccaatatagagaactctataaattgaagagtacttatgtggatgctattcctaatctggttaatccacaaacaggtagagttcatacaaaatttaatcctacaggtacagctacaggaagaataagtagtagtgaacctaatcttcagaatattcctataaaaagtgaagaaggtagaaagataagaagagccttcgtgtcagaagatggatattttcttgtatctcttgattattctcagatagagctaaggattatggctcatctttctcaggagcctaaattaatatctgccttccaaaaaggagaggatattcatagaagaacagcatcggagatttttggagtgccagaggaagaagttgatgatcttttaaggtcaagggcaaaggccgttaattttggaattatttatggtatctcttcttttggactttctgagactgtaagtattacaccagaagaggcagagaaatttatagactcgtattttaagcactatccaagagtgaagctttttatagataagactattcatgaggcaagagaaaaactgtacgttaaaaccttatttggcagaaaaagatatattcctcgtattaagagcataaataaacaggtaaggaatgcctatgaaaggatagcaataaatgcgccaattcagggaacagctgctgatattataaaacttgccatgatagaaatttacaaggagattgaaaataaaaatctcaagtcaagaatactccttcaaattcatgatgagcttattcttgaagtgccagaggaggagatggaatttactcctttaatggcaaaggaaaaaatggaaaaggtggtagaactttcggttcctcttgtagttgaaatctcggtaggtaaaaatcttgctgaattaaaatgagctataagattggtcgac

SEQ ID NO: 1988 - DNA, 2673 bp, Artificial Sequence
  Description of Artificial Sequence: Synthetic DNA sequence of Dictyoglomus thermophilum DNA E783N
atgaaatacctgctgccgaccgctgctgctggtctgctgctcctcgctgcccagccggcgatggccatggatatcggaattaattcggatccgaaatctctgtgggatctttttcaagaaaataccgagaaagagtccaaaaggaagattctgattattgatggctcaagcctcatatacagggtttattacgcccttccccctttaaagacaaaaaatggtgaattaactaatgctctttatggcttcataagaatacttttaaaggccgtagaagattttaatcctgatcttgtaggcgttgcctttgatagacctgaacctacttttaggcatgtgatttataaagagtataaggctaagagaccacctatgaaggatgatttgaaagcgcagataccatggataagagaatttctaaggttaaatgatatacctctattggaagagcctggctatgaagcggatgatataatagctactatagtgaataaatataaggatgatttaaaatatattctctctggagatttagatcttttgcaattagtctcggacaaaacctttctaatacatcctcaaaagggaattactgagtttactatttatgatccaaaagctgtaaaggataggtttggagtagagccctataagattcccttatacaaagtattagtaggggacgaatctgataatattccaggagtaaatggaataggtcctaaaaaggcctcaaagattcttgagaaaatttcaagtgtagatgaatttaaaagtaaaataaaagttttggatagtgatttaagggagcttattgagaaaaattggaatattattgaaagaaatttagaacttgttactttaaaaaatatagataaggatcttattcttaaacccttcgagattaaaagagatgaaaaagtaatagattttttgaagagatatgaacttaagagtattcttcaaaagttatttcctgatcttcaagaggaagaaaatatagagattaaagatgtcgaagagatcaattttaatgaggtagaaaaagaaggctactttgcctttaaatgtcttggagatagggcttttgagggtatttctctttccttcaaggagggggaaggatattttatatctccttttgatttcaataatgagataagaaagaagattgaaaatataatttcttcagagaatgttaaaaaaattggctcttatattcaaagagatttacattttttaaactgtaaaataaagggcgatgtatttgatgttagtctcgcatcttatcttttgaaccctgaaagacaaaatcactctcttgatattttgataggagagtatctaaataaaacctcttttattcctcaaaaatacgctggttatctttttccgttaaagtctattcttgaggagaggataaagaatgaagggttagaatttgtactttataacatagagattccattaatccctgtactttactccatggagaagtgggggataaaggtagataaggaatatttaaaacagctttctgatgaattctgcgagagaattaaaaaattggaagaagagatatatgaacttgcaggaaccagatttaatctcaattctccaaaacaactttctgaagttttatttgagaggttaaaacttccttctggtaagaaaggaaaaacaggatattctacgtcgtcttctgtgcttcaaaacttaataaatgctcatcctatagtgagaaaaatcctccaatatagagaactctataaattgaagagtacttatgtggatgctattcctaatctggttaatccacaaacaggtagagttcatacaaaatttaatcctacaggtacagctacaggaagaataagtagtagtgaacctaatcttcagaatattcctataaaaagtgaagaaggtagaaagataagaagagccttcgtgtcagaagatggatattttcttgtatctcttgattattctcagatagagctaaggattatggctcatctttctcaggagcctaaattaatatctgccttccaaaaaggagaggatattcatagaagaacagcatcggagatttttggagtgccagaggaagaagttgatgatcttttaaggtcaagggcaaaggccgttaattttggaattatttatggtatctcttcttttggactttctgagactgtaagtattacaccagaagaggcagagaaatttatagactcgtattttaagcactatccaagagtgaagctttttatagataagactattcatgaggcaagagaaaaactgtacgttaaaaccttatttggcagaaaaagatatattcctaatattaagagcataaataaacaggtaaggaatgcctatgaaaggatagcaataaatgcgccaattcagggaacagctgctgatattataaaacttgccatgatagaaatttacaaggagattgaaaataaaaatctcaagtcaagaatactccttcaaattcatgatgagcttattcttgaagtgccagaggaggagatggaatttactcctttaatggcaaaggaaaaaatggaaaaggtggtagaactttcggttcctcttgtagttgaaatctcggtaggtaaaaatcttgctgaattaaaatgagctataagattggtcgac

SEQ ID NO: 1989 - DNA, 2673 bp, Artificial Sequence
  Description of Artificial Sequence: Synthetic DNA sequence of Dictyoglomus thermophilum DNA E783D
atgaaatacctgctgccgaccgctgctgctggtctgctgctcctcgctgcccagccggcgatggccatggatatcggaattaattcggatccgaaatctctgtgggatctttttcaagaaaataccgagaaagagtccaaaaggaagattctgattattgatggctcaagcctcatatacagggtttattacgcccttccccctttaaagacaaaaaatggtgaattaactaatgctctttatggcttcataagaatacttttaaaggccgtagaagattttaatcctgatcttgtaggcgttgcctttgatagacctgaacctacttttaggcatgtgatttataaagagtataaggctaagagaccacctatgaaggatgatttgaaagcgcagataccatggataagagaatttctaaggttaaatgatatacctctattggaagagcctggctatgaagcggatgatataatagctactatagtgaataaatataaggatgatttaaaatatattctctctggagatttagatcttttgcaattagtctcggacaaaacctttctaatacatcctcaaaagggaattactgagtttactatttatgatccaaaagctgtaaaggataggtttggagtagagccctataagattcccttatacaaagtattagtaggggacgaatctgataatattccaggagtaaatggaataggtcctaaaaaggcctcaaagattcttgagaaaatttcaagtgtagatgaatttaaaagtaaaataaaagttttggatagtgatttaagggagcttattgagaaaaattggaatattattgaaagaaatttagaacttgttactttaaaaaatatagataaggatcttattcttaaacccttcgagattaaaagagatgaaaaagtaatagattttttgaagagatatgaacttaagagtattcttcaaaagttatttcctgatcttcaagaggaagaaaatatagagattaaagatgtcgaagagatcaattttaatgaggtagaaaaagaaggctactttgcctttaaatgtcttggagatagggcttttgagggtatttctctttccttcaaggagggggaaggatattttatatctccttttgatttcaataatgagataagaaagaagattgaaaatataatttcttcagagaatgttaaaaaaattggctcttatattcaaagagatttacattttttaaactgtaaaataaagggcgatgtatttgatgttagtctcgcatcttatcttttgaaccctgaaagacaaaatcactctcttgatattttgataggagagtatctaaataaaacctcttttattcctcaaaaatacgctggttatctttttccgttaaagtctattcttgaggagaggataaagaatgaagggttagaatttgtactttataacatagagattccattaatccctgtactttactccatggagaagtgggggataaaggtagataaggaatatttaaaacagctttctgatgaattctgcgagagaattaaaaaattggaagaagagatatatgaacttgcaggaaccagatttaatctcaattctccaaaacaactttctgaagttttatttgagaggttaaaacttccttctggtaagaaaggaaaaacaggatattctacgtcgtcttctgtgcttcaaaacttaataaatgctcatcctatagtgagaaaaatcctccaatatagagaactctataaattgaagagtacttatgtggatgctattcctaatctggttaatccacaaacaggtagagttcatacaaaatttaatcctacaggtacagctacaggaagaataagtagtagtgaacctaatcttcagaatattcctataaaaagtgaagaaggtagaaagataagaagagccttcgtgtcagaagatggatattttcttgtatctcttgattattctcagatagagctaaggattatggctcatctttctcaggagcctaaattaatatctgccttccaaaaaggagaggatattcatagaagaacagcatcggagatttttggagtgccagaggaagaagttgatgatcttttaaggtcaagggcaaaggccgttaattttggaattatttatggtatctcttcttttggactttctgagactgtaagtattacaccagaagaggcagagaaatttatagactcgtattttaagcactatccaagagtgaagctttttatagataagactattcatgaggcaagagaaaaactgtacgttaaaaccttatttggcagaaaaagatatattcctgatattaagagcataaataaacaggtaaggaatgcctatgaaaggatagcaataaatgcgccaattcagggaacagctgctgatattataaaacttgccatgatagaaatttacaaggagattgaaaataaaaatctcaagtcaagaatactccttcaaattcatgatgagcttattcttgaagtgccagaggaggagatggaatttactcctttaatggcaaaggaaaaaatggaaaaggtggtagaactttcggttcctcttgtagttgaaatctcggtaggtaaaaatcttgctgaattaaaatgagctataagattggtcgac

SEQ ID NO: 1990 - DNA, 2673 bp, Artificial Sequence
  Description of Artificial Sequence: Synthetic DNA sequence of Dictyoglomus thermophilum DNA E783C
atgaaatacctgctgccgaccgctgctgctggtctgctgctcctcgctgcccagccggcgatggccatggatatcggaattaattcggatccgaaatctctgtgggatctttttcaagaaaataccgagaaagagtccaaaaggaagattctgattattgatggctcaagcctcatatacagggtttattacgcccttccccctttaaagacaaaaaatggtgaattaactaatgctctttatggcttcataagaatacttttaaaggccgtagaagattttaatcctgatcttgtaggcgttgcctttgatagacctgaacctacttttaggcatgtgatttataaagagtataaggctaagagaccacctatgaaggatgatttgaaagcgcagataccatggataagagaatttctaaggttaaatgatatacctctattggaagagcctggctatgaagcggatgatataatagctactatagtgaataaatataaggatgatttaaaatatattctctctggagatttagatcttttgcaattagtctcggacaaaacctttctaatacatcctcaaaagggaattactgagtttactatttatgatccaaaagctgtaaaggataggtttggagtagagccctataagattcccttatacaaagtattagtaggggacgaatctgataatattccaggagtaaatggaataggtcctaaaaaggcctcaaagattcttgagaaaatttcaagtgtagatgaatttaaaagtaaaataaaagttttggatagtgatttaagggagcttattgagaaaaattggaatattattgaaagaaatttagaacttgttactttaaaaaatatagataaggatcttattcttaaacccttcgagattaaaagagatgaaaaagtaatagattttttgaagagatatgaacttaagagtattcttcaaaagttatttcctgatcttcaagaggaagaaaatatagagattaaagatgtcgaagagatcaattttaatgaggtagaaaaagaaggctactttgcctttaaatgtcttggagatagggcttttgagggtatttctctttccttcaaggagggggaaggatattttatatctccttttgatttcaataatgagataagaaagaagattgaaaatataatttcttcagagaatgttaaaaaaattggctcttatattcaaagagatttacattttttaaactgtaaaataaagggcgatgtatttgatgttagtctcgcatcttatcttttgaaccctgaaagacaaaatcactctcttgatattttgataggagagtatctaaataaaacctcttttattcctcaaaaatacgctggttatctttttccgttaaagtctattcttgaggagaggataaagaatgaagggttagaatttgtactttataacatagagattccattaatccctgtactttactccatggagaagtgggggataaaggtagataaggaatatttaaaacagctttctgatgaattctgcgagagaattaaaaaattggaagaagagatatatgaacttgcaggaaccagatttaatctcaattctccaaaacaactttctgaagttttatttgagaggttaaaacttccttctggtaagaaaggaaaaacaggatattctacgtcgtcttctgtgcttcaaaacttaataaatgctcatcctatagtgagaaaaatcctccaatatagagaactctataaattgaagagtacttatgtggatgctattcctaatctggttaatccacaaacaggtagagttcatacaaaatttaatcctacaggtacagctacaggaagaataagtagtagtgaacctaatcttcagaatattcctataaaaagtgaagaaggtagaaagataagaagagccttcgtgtcagaagatggatattttcttgtatctcttgattattctcagatagagctaaggattatggctcatctttctcaggagcctaaattaatatctgccttccaaaaaggagaggatattcatagaagaacagcatcggagatttttggagtgccagaggaagaagttgatgatcttttaaggtcaagggcaaaggccgttaattttggaattatttatggtatctcttcttttggactttctgagactgtaagtattacaccagaagaggcagagaaatttatagactcgtattttaagcactatccaagagtgaagctttttatagataagactattcatgaggcaagagaaaaactgtacgttaaaaccttatttggcagaaaaagatatattccttgtattaagagcataaataaacaggtaaggaatgcctatgaaaggatagcaataaatgcgccaattcagggaacagctgctgatattataaaacttgccatgatagaaatttacaaggagattgaaaataaaaatctcaagtcaagaatactccttcaaattcatgatgagcttattcttgaagtgccagaggaggagatggaatttactcctttaatggcaaaggaaaaaatggaaaaggtggtagaactttcggttcctcttgtagttgaaatctcggtaggtaaaaatcttgctgaattaaaatgagctataagattggtcgac

SEQ ID NO: 1991 - DNA, 2673 bp, Artificial Sequence
  Description of Artificial Sequence: Synthetic DNA sequence of Dictyoglomus thermophilum DNA E783Q
atgaaatacctgctgccgaccgctgctgctggtctgctgctcctcgctgcccagccggcgatggccatggatatcggaattaattcggatccgaaatctctgtgggatctttttcaagaaaataccgagaaagagtccaaaaggaagattctgattattgatggctcaagcctcatatacagggtttattacgcccttccccctttaaagacaaaaaatggtgaattaactaatgctctttatggcttcataagaatacttttaaaggccgtagaagattttaatcctgatcttgtaggcgttgcctttgatagacctgaacctacttttaggcatgtgatttataaagagtataaggctaagagaccacctatgaaggatgatttgaaagcgcagataccatggataagagaatttctaaggttaaatgatatacctctattggaagagcctggctatgaagcggatgatataatagctactatagtgaataaatataaggatgatttaaaatatattctctctggagatttagatcttttgcaattagtctcggacaaaacctttctaatacatcctcaaaagggaattactgagtttactatttatgatccaaaagctgtaaaggataggtttggagtagagccctataagattcccttatacaaagtattagtaggggacgaatctgataatattccaggagtaaatggaataggtcctaaaaaggcctcaaagattcttgagaaaatttcaagtgtagatgaatttaaaagtaaaataaaagttttggatagtgatttaagggagcttattgagaaaaattggaatattattgaaagaaatttagaacttgttactttaaaaaatatagataaggatcttattcttaaacccttcgagattaaaagagatgaaaaagtaatagattttttgaagagatatgaacttaagagtattcttcaaaagttatttcctgatcttcaagaggaagaaaatatagagattaaagatgtcgaagagatcaattttaatgaggtagaaaaagaaggctactttgcctttaaatgtcttggagatagggcttttgagggtatttctctttccttcaaggagggggaaggatattttatatctccttttgatttcaataatgagataagaaagaagattgaaaatataatttcttcagagaatgttaaaaaaattggctcttatattcaaagagatttacattttttaaactgtaaaataaagggcgatgtatttgatgttagtctcgcatcttatcttttgaaccctgaaagacaaaatcactctcttgatattttgataggagagtatctaaataaaacctcttttattcctcaaaaatacgctggttatctttttccgttaaagtctattcttgaggagaggataaagaatgaagggttagaatttgtactttataacatagagattccattaatccctgtactttactccatggagaagtgggggataaaggtagataaggaatatttaaaacagctttctgatgaattctgcgagagaattaaaaaattggaagaagagatatatgaacttgcaggaaccagatttaatctcaattctccaaaacaactttctgaagttttatttgagaggttaaaacttccttctggtaagaaaggaaaaacaggatattctacgtcgtcttctgtgcttcaaaacttaataaatgctcatcctatagtgagaaaaatcctccaatatagagaactctataaattgaagagtacttatgtggatgctattcctaatctggttaatccacaaacaggtagagttcatacaaaatttaatcctacaggtacagctacaggaagaataagtagtagtgaacctaatcttcagaatattcctataaaaagtgaagaaggtagaaagataagaagagccttcgtgtcagaagatggatattttcttgtatctcttgattattctcagatagagctaaggattatggctcatctttctcaggagcctaaattaatatctgccttccaaaaaggagaggatattcatagaagaacagcatcggagatttttggagtgccagaggaagaagttgatgatcttttaaggtcaagggcaaaggccgttaattttggaattatttatggtatctcttcttttggactttctgagactgtaagtattacaccagaagaggcagagaaatttatagactcgtattttaagcactatccaagagtgaagctttttatagataagactattcatgaggcaagagaaaaactgtacgttaaaaccttatttggcagaaaaagatatattcctcaaattaagagcataaataaacaggtaaggaatgcctatgaaaggatagcaataaatgcgccaattcagggaacagctgctgatattataaaacttgccatgatagaaatttacaaggagattgaaaataaaaatctcaagtcaagaatactccttcaaattcatgatgagcttattcttgaagtgccagaggaggagatggaatttactcctttaatggcaaaggaaaaaatggaaaaggtggtagaactttcggttcctcttgtagttgaaatctcggtaggtaaaaatcttgctgaattaaaatgagctataagattggtcgac

SEQ ID NO: 1992 - DNA, 2673 bp, Artificial Sequence
  Description of Artificial Sequence: Synthetic DNA sequence of Dictyoglomus thermophilum DNA E783G
atgaaatacctgctgccgaccgctgctgctggtctgctgctcctcgctgcccagccggcgatggccatggatatcggaattaattcggatccgaaatctctgtgggatctttttcaagaaaataccgagaaagagtccaaaaggaagattctgattattgatggctcaagcctcatatacagggtttattacgcccttccccctttaaagacaaaaaatggtgaattaactaatgctctttatggcttcataagaatacttttaaaggccgtagaagattttaatcctgatcttgtaggcgttgcctttgatagacctgaacctacttttaggcatgtgatttataaagagtataaggctaagagaccacctatgaaggatgatttgaaagcgcagataccatggataagagaatttctaaggttaaatgatatacctctattggaagagcctggctatgaagcggatgatataatagctactatagtgaataaatataaggatgatttaaaatatattctctctggagatttagatcttttgcaattagtctcggacaaaacctttctaatacatcctcaaaagggaattactgagtttactatttatgatccaaaagctgtaaaggataggtttggagtagagccctataagattcccttatacaaagtattagtaggggacgaatctgataatattccaggagtaaatggaataggtcctaaaaaggcctcaaagattcttgagaaaatttcaagtgtagatgaatttaaaagtaaaataaaagttttggatagtgatttaagggagcttattgagaaaaattggaatattattgaaagaaatttagaacttgttactttaaaaaatatagataaggatcttattcttaaacccttcgagattaaaagagatgaaaaagtaatagattttttgaagagatatgaacttaagagtattcttcaaaagttatttcctgatcttcaagaggaagaaaatatagagattaaagatgtcgaagagatcaattttaatgaggtagaaaaagaaggctactttgcctttaaatgtcttggagatagggcttttgagggtatttctctttccttcaaggagggggaaggatattttatatctccttttgatttcaataatgagataagaaagaagattgaaaatataatttcttcagagaatgttaaaaaaattggctcttatattcaaagagatttacattttttaaactgtaaaataaagggcgatgtatttgatgttagtctcgcatcttatcttttgaaccctgaaagacaaaatcactctcttgatattttgataggagagtatctaaataaaacctcttttattcctcaaaaatacgctggttatctttttccgttaaagtctattcttgaggagaggataaagaatgaagggttagaatttgtactttataacatagagattccattaatccctgtactttactccatggagaagtgggggataaaggtagataaggaatatttaaaacagctttctgatgaattctgcgagagaattaaaaaattggaagaagagatatatgaacttgcaggaaccagatttaatctcaattctccaaaacaactttctgaagttttatttgagaggttaaaacttccttctggtaagaaaggaaaaacaggatattctacgtcgtcttctgtgcttcaaaacttaataaatgctcatcctatagtgagaaaaatcctccaatatagagaactctataaattgaagagtacttatgtggatgctattcctaatctggttaatccacaaacaggtagagttcatacaaaatttaatcctacaggtacagctacaggaagaataagtagtagtgaacctaatcttcagaatattcctataaaaagtgaagaaggtagaaagataagaagagccttcgtgtcagaagatggatattttcttgtatctcttgattattctcagatagagctaaggattatggctcatctttctcaggagcctaaattaatatctgccttccaaaaaggagaggatattcatagaagaacagcatcggagatttttggagtgccagaggaagaagttgatgatcttttaaggtcaagggcaaaggccgttaattttggaattatttatggtatctcttcttttggactttctgagactgtaagtattacaccagaagaggcagagaaatttatagactcgtattttaagcactatccaagagtgaagctttttatagataagactattcatgaggcaagagaaaaactgtacgttaaaaccttatttggcagaaaaagatatattcctggtattaagagcataaataaacaggtaaggaatgcctatgaaaggatagcaataaatgcgccaattcagggaacagctgctgatattataaaacttgccatgatagaaatttacaaggagattgaaaataaaaatctcaagtcaagaatactccttcaaattcatgatgagcttattcttgaagtgccagaggaggagatggaatttactcctttaatggcaaaggaaaaaatggaaaaggtggtagaactttcggttcctcttgtagttgaaatctcggtaggtaaaaatcttgctgaattaaaatgagctataagattggtcgac

SEQ ID NO: 1993 - DNA, 2673 bp, Artificial Sequence
  Description of Artificial Sequence: Synthetic DNA sequence of Dictyoglomus thermophilum DNA E783H
atgaaatacctgctgccgaccgctgctgctggtctgctgctcctcgctgcccagccggcgatggccatggatatcggaattaattcggatccgaaatctctgtgggatctttttcaagaaaataccgagaaagagtccaaaaggaagattctgattattgatggctcaagcctcatatacagggtttattacgcccttccccctttaaagacaaaaaatggtgaattaactaatgctctttatggcttcataagaatacttttaaaggccgtagaagattttaatcctgatcttgtaggcgttgcctttgatagacctgaacctacttttaggcatgtgatttataaagagtataaggctaagagaccacctatgaaggatgatttgaaagcgcagataccatggataagagaatttctaaggttaaatgatatacctctattggaagagcctggctatgaagcggatgatataatagctactatagtgaataaatataaggatgatttaaaatatattctctctggagatttagatcttttgcaattagtctcggacaaaacctttctaatacatcctcaaaagggaattactgagtttactatttatgatccaaaagctgtaaaggataggtttggagtagagccctataagattcccttatacaaagtattagtaggggacgaatctgataatattccaggagtaaatggaataggtcctaaaaaggcctcaaagattcttgagaaaatttcaagtgtagatgaatttaaaagtaaaataaaagttttggatagtgatttaagggagcttattgagaaaaattggaatattattgaaagaaatttagaacttgttactttaaaaaatatagataaggatcttattcttaaacccttcgagattaaaagagatgaaaaagtaatagattttttgaagagatatgaacttaagagtattcttcaaaagttatttcctgatcttcaagaggaagaaaatatagagattaaagatgtcgaagagatcaattttaatgaggtagaaaaagaaggctactttgcctttaaatgtcttggagatagggcttttgagggtatttctctttccttcaaggagggggaaggatattttatatctccttttgatttcaataatgagataagaaagaagattgaaaatataatttcttcagagaatgttaaaaaaattggctcttatattcaaagagatttacattttttaaactgtaaaataaagggcgatgtatttgatgttagtctcgcatcttatcttttgaaccctgaaagacaaaatcactctcttgatattttgataggagagtatctaaataaaacctcttttattcctcaaaaatacgctggttatctttttccgttaaagtctattcttgaggagaggataaagaatgaagggttagaatttgtactttataacatagagattccattaatccctgtactttactccatggagaagtgggggataaaggtagataaggaatatttaaaacagctttctgatgaattctgcgagagaattaaaaaattggaagaagagatatatgaacttgcaggaaccagatttaatctcaattctccaaaacaactttctgaagttttatttgagaggttaaaacttccttctggtaagaaaggaaaaacaggatattctacgtcgtcttctgtgcttcaaaacttaataaatgctcatcctatagtgagaaaaatcctccaatatagagaactctataaattgaagagtacttatgtggatgctattcctaatctggttaatccacaaacaggtagagttcatacaaaatttaatcctacaggtacagctacaggaagaataagtagtagtgaacctaatcttcagaatattcctataaaaagtgaagaaggtagaaagataagaagagccttcgtgtcagaagatggatattttcttgtatctcttgattattctcagatagagctaaggattatggctcatctttctcaggagcctaaattaatatctgccttccaaaaaggagaggatattcatagaagaacagcatcggagatttttggagtgccagaggaagaagttgatgatcttttaaggtcaagggcaaaggccgttaattttggaattatttatggtatctcttcttttggactttctgagactgtaagtattacaccagaagaggcagagaaatttatagactcgtattttaagcactatccaagagtgaagctttttatagataagactattcatgaggcaagagaaaaactgtacgttaaaaccttatttggcagaaaaagatatattcctcatattaagagcataaataaacaggtaaggaatgcctatgaaaggatagcaataaatgcgccaattcagggaacagctgctgatattataaaacttgccatgatagaaatttacaaggagattgaaaataaaaatctcaagtcaagaatactccttcaaattcatgatgagcttattcttgaagtgccagaggaggagatggaatttactcctttaatggcaaaggaaaaaatggaaaaggtggtagaactttcggttcctcttgtagttgaaatctcggtaggtaaaaatcttgctgaattaaaatgagctataagattggtcgac

SEQ ID NO: 1994 - DNA, 2673 bp, Artificial Sequence
  Description of Artificial Sequence: Synthetic DNA sequence of Dictyoglomus thermophilum DNA E783I
atgaaatacctgctgccgaccgctgctgctggtctgctgctcctcgctgcccagccggcgatggccatggatatcggaattaattcggatccgaaatctctgtgggatctttttcaagaaaataccgagaaagagtccaaaaggaagattctgattattgatggctcaagcctcatatacagggtttattacgcccttccccctttaaagacaaaaaatggtgaattaactaatgctctttatggcttcataagaatacttttaaaggccgtagaagattttaatcctgatcttgtaggcgttgcctttgatagacctgaacctacttttaggcatgtgatttataaagagtataaggctaagagaccacctatgaaggatgatttgaaagcgcagataccatggataagagaatttctaaggttaaatgatatacctctattggaagagcctggctatgaagcggatgatataatagctactatagtgaataaatataaggatgatttaaaatatattctctctggagatttagatcttttgcaattagtctcggacaaaacctttctaatacatcctcaaaagggaattactgagtttactatttatgatccaaaagctgtaaaggataggtttggagtagagccctataagattcccttatacaaagtattagtaggggacgaatctgataatattccaggagtaaatggaataggtcctaaaaaggcctcaaagattcttgagaaaatttcaagtgtagatgaatttaaaagtaaaataaaagttttggatagtgatttaagggagcttattgagaaaaattggaatattattgaaagaaatttagaacttgttactttaaaaaatatagataaggatcttattcttaaacccttcgagattaaaagagatgaaaaagtaatagattttttgaagagatatgaacttaagagtattcttcaaaagttatttcctgatcttcaagaggaagaaaatatagagattaaagatgtcgaagagatcaattttaatgaggtagaaaaagaaggctactttgcctttaaatgtcttggagatagggcttttgagggtatttctctttccttcaaggagggggaaggatattttatatctccttttgatttcaataatgagataagaaagaagattgaaaatataatttcttcagagaatgttaaaaaaattggctcttatattcaaagagatttacattttttaaactgtaaaataaagggcgatgtatttgatgttagtctcgcatcttatcttttgaaccctgaaagacaaaatcactctcttgatattttgataggagagtatctaaataaaacctcttttattcctcaaaaatacgctggttatctttttccgttaaagtctattcttgaggagaggataaagaatgaagggttagaatttgtactttataacatagagattccattaatccctgtactttactccatggagaagtgggggataaaggtagataaggaatatttaaaacagctttctgatgaattctgcgagagaattaaaaaattggaagaagagatatatgaacttgcaggaaccagatttaatctcaattctccaaaacaactttctgaagttttatttgagaggttaaaacttccttctggtaagaaaggaaaaacaggatattctacgtcgtcttctgtgcttcaaaacttaataaatgctcatcctatagtgagaaaaatcctccaatatagagaactctataaattgaagagtacttatgtggatgctattcctaatctggttaatccacaaacaggtagagttcatacaaaatttaatcctacaggtacagctacaggaagaataagtagtagtgaacctaatcttcagaatattcctataaaaagtgaagaaggtagaaagataagaagagccttcgtgtcagaagatggatattttcttgtatctcttgattattctcagatagagctaaggattatggctcatctttctcaggagcctaaattaatatctgccttccaaaaaggagaggatattcatagaagaacagcatcggagatttttggagtgccagaggaagaagttgatgatcttttaaggtcaagggcaaaggccgttaattttggaattatttatggtatctcttcttttggactttctgagactgtaagtattacaccagaagaggcagagaaatttatagactcgtattttaagcactatccaagagtgaagctttttatagataagactattcatgaggcaagagaaaaactgtacgttaaaaccttatttggcagaaaaagatatattcctattattaagagcataaataaacaggtaaggaatgcctatgaaaggatagcaataaatgcgccaattcagggaacagctgctgatattataaaacttgccatgatagaaatttacaaggagattgaaaataaaaatctcaagtcaagaatactccttcaaattcatgatgagcttattcttgaagtgccagaggaggagatggaatttactcctttaatggcaaaggaaaaaatggaaaaggtggtagaactttcggttcctcttgtagttgaaatctcggtaggtaaaaatcttgctgaattaaaatgagctataagattggtcgac

SEQ ID NO: 1995 - DNA, 2673 bp, Artificial Sequence
  Description of Artificial Sequence: Synthetic DNA sequence of Dictyoglomus thermophilum DNA E783L
atgaaatacctgctgccgaccgctgctgctggtctgctgctcctcgctgcccagccggcgatggccatggatatcggaattaattcggatccgaaatctctgtgggatctttttcaagaaaataccgagaaagagtccaaaaggaagattctgattattgatggctcaagcctcatatacagggtttattacgcccttccccctttaaagacaaaaaatggtgaattaactaatgctctttatggcttcataagaatacttttaaaggccgtagaagattttaatcctgatcttgtaggcgttgcctttgatagacctgaacctacttttaggcatgtgatttataaagagtataaggctaagagaccacctatgaaggatgatttgaaagcgcagataccatggataagagaatttctaaggttaaatgatatacctctattggaagagcctggctatgaagcggatgatataatagctactatagtgaataaatataaggatgatttaaaatatattctctctggagatttagatcttttgcaattagtctcggacaaaacctttctaatacatcctcaaaagggaattactgagtttactatttatgatccaaaagctgtaaaggataggtttggagtagagccctataagattcccttatacaaagtattagtaggggacgaatctgataatattccaggagtaaatggaataggtcctaaaaaggcctcaaagattcttgagaaaatttcaagtgtagatgaatttaaaagtaaaataaaagttttggatagtgatttaagggagcttattgagaaaaattggaatattattgaaagaaatttagaacttgttactttaaaaaatatagataaggatcttattcttaaacccttcgagattaaaagagatgaaaaagtaatagattttttgaagagatatgaacttaagagtattcttcaaaagttatttcctgatcttcaagaggaagaaaatatagagattaaagatgtcgaagagatcaattttaatgaggtagaaaaagaaggctactttgcctttaaatgtcttggagatagggcttttgagggtatttctctttccttcaaggagggggaaggatattttatatctccttttgatttcaataatgagataagaaagaagattgaaaatataatttcttcagagaatgttaaaaaaattggctcttatattcaaagagatttacattttttaaactgtaaaataaagggcgatgtatttgatgttagtctcgcatcttatcttttgaaccctgaaagacaaaatcactctcttgatattttgataggagagtatctaaataaaacctcttttattcctcaaaaatacgctggttatctttttccgttaaagtctattcttgaggagaggataaagaatgaagggttagaatttgtactttataacatagagattccattaatccctgtactttactccatggagaagtgggggataaaggtagataaggaatatttaaaacagctttctgatgaattctgcgagagaattaaaaaattggaagaagagatatatgaacttgcaggaaccagatttaatctcaattctccaaaacaactttctgaagttttatttgagaggttaaaacttccttctggtaagaaaggaaaaacaggatattctacgtcgtcttctgtgcttcaaaacttaataaatgctcatcctatagtgagaaaaatcctccaatatagagaactctataaattgaagagtacttatgtggatgctattcctaatctggttaatccacaaacaggtagagttcatacaaaatttaatcctacaggtacagctacaggaagaataagtagtagtgaacctaatcttcagaatattcctataaaaagtgaagaaggtagaaagataagaagagccttcgtgtcagaagatggatattttcttgtatctcttgattattctcagatagagctaaggattatggctcatctttctcaggagcctaaattaatatctgccttccaaaaaggagaggatattcatagaagaacagcatcggagatttttggagtgccagaggaagaagttgatgatcttttaaggtcaagggcaaaggccgttaattttggaattatttatggtatctcttcttttggactttctgagactgtaagtattacaccagaagaggcagagaaatttatagactcgtattttaagcactatccaagagtgaagctttttatagataagactattcatgaggcaagagaaaaactgtacgttaaaaccttatttggcagaaaaagatatattcctcttattaagagcataaataaacaggtaaggaatgcctatgaaaggatagcaataaatgcgccaattcagggaacagctgctgatattataaaacttgccatgatagaaatttacaaggagattgaaaataaaaatctcaagtcaagaatactccttcaaattcatgatgagcttattcttgaagtgccagaggaggagatggaatttactcctttaatggcaaaggaaaaaatggaaaaggtggtagaactttcggttcctcttgtagttgaaatctcggtaggtaaaaatcttgctgaattaaaatgagctataagattggtcgac

SEQ ID NO: 1996 - DNA, 2673 bp, Artificial Sequence
  Description of Artificial Sequence: Synthetic DNA sequence of Dictyoglomus thermophilum DNA E783K
atgaaatacctgctgccgaccgctgctgctggtctgctgctcctcgctgcccagccggcgatggccatggatatcggaattaattcggatccgaaatctctgtgggatctttttcaagaaaataccgagaaagagtccaaaaggaagattctgattattgatggctcaagcctcatatacagggtttattacgcccttccccctttaaagacaaaaaatggtgaattaactaatgctctttatggcttcataagaatacttttaaaggccgtagaagattttaatcctgatcttgtaggcgttgcctttgatagacctgaacctacttttaggcatgtgatttataaagagtataaggctaagagaccacctatgaaggatgatttgaaagcgcagataccatggataagagaatttctaaggttaaatgatatacctctattggaagagcctggctatgaagcggatgatataatagctactatagtgaataaatataaggatgatttaaaatatattctctctggagatttagatcttttgcaattagtctcggacaaaacctttctaatacatcctcaaaagggaattactgagtttactatttatgatccaaaagctgtaaaggataggtttggagtagagccctataagattcccttatacaaagtattagtaggggacgaatctgataatattccaggagtaaatggaataggtcctaaaaaggcctcaaagattcttgagaaaatttcaagtgtagatgaatttaaaagtaaaataaaagttttggatagtgatttaagggagcttattgagaaaaattggaatattattgaaagaaatttagaacttgttactttaaaaaatatagataaggatcttattcttaaacccttcgagattaaaagagatgaaaaagtaatagattttttgaagagatatgaacttaagagtattcttcaaaagttatttcctgatcttcaagaggaagaaaatatagagattaaagatgtcgaagagatcaattttaatgaggtagaaaaagaaggctactttgcctttaaatgtcttggagatagggcttttgagggtatttctctttccttcaaggagggggaaggatattttatatctccttttgatttcaataatgagataagaaagaagattgaaaatataatttcttcagagaatgttaaaaaaattggctcttatattcaaagagatttacattttttaaactgtaaaataaagggcgatgtatttgatgttagtctcgcatcttatcttttgaaccctgaaagacaaaatcactctcttgatattttgataggagagtatctaaataaaacctcttttattcctcaaaaatacgctggttatctttttccgttaaagtctattcttgaggagaggataaagaatgaagggttagaatttgtactttataacatagagattccattaatccctgtactttactccatggagaagtgggggataaaggtagataaggaatatttaaaacagctttctgatgaattctgcgagagaattaaaaaattggaagaagagatatatgaacttgcaggaaccagatttaatctcaattctccaaaacaactttctgaagttttatttgagaggttaaaacttccttctggtaagaaaggaaaaacaggatattctacgtcgtcttctgtgcttcaaaacttaataaatgctcatcctatagtgagaaaaatcctccaatatagagaactctataaattgaagagtacttatgtggatgctattcctaatctggttaatccacaaacaggtagagttcatacaaaatttaatcctacaggtacagctacaggaagaataagtagtagtgaacctaatcttcagaatattcctataaaaagtgaagaaggtagaaagataagaagagccttcgtgtcagaagatggatattttcttgtatctcttgattattctcagatagagctaaggattatggctcatctttctcaggagcctaaattaatatctgccttccaaaaaggagaggatattcatagaagaacagcatcggagatttttggagtgccagaggaagaagttgatgatcttttaaggtcaagggcaaaggccgttaattttggaattatttatggtatctcttcttttggactttctgagactgtaagtattacaccagaagaggcagagaaatttatagactcgtattttaagcactatccaagagtgaagctttttatagataagactattcatgaggcaagagaaaaactgtacgttaaaaccttatttggcagaaaaagatatattcctaaaattaagagcataaataaacaggtaaggaatgcctatgaaaggatagcaataaatgcgccaattcagggaacagctgctgatattataaaacttgccatgatagaaatttacaaggagattgaaaataaaaatctcaagtcaagaatactccttcaaattcatgatgagcttattcttgaagtgccagaggaggagatggaatttactcctttaatggcaaaggaaaaaatggaaaaggtggtagaactttcggttcctcttgtagttgaaatctcggtaggtaaaaatcttgctgaattaaaatgagctataagattggtcgac

SEQ ID NO: 1997 - DNA, 2673 bp, Artificial Sequence
  Description of Artificial Sequence: Synthetic DNA sequence of Dictyoglomus thermophilum DNA E783M
atgaaatacctgctgccgaccgctgctgctggtctgctgctcctcgctgcccagccggcgatggccatggatatcggaattaattcggatccgaaatctctgtgggatctttttcaagaaaataccgagaaagagtccaaaaggaagattctgattattgatggctcaagcctcatatacagggtttattacgcccttccccctttaaagacaaaaaatggtgaattaactaatgctctttatggcttcataagaatacttttaaaggccgtagaagattttaatcctgatcttgtaggcgttgcctttgatagacctgaacctacttttaggcatgtgatttataaagagtataaggctaagagaccacctatgaaggatgatttgaaagcgcagataccatggataagagaatttctaaggttaaatgatatacctctattggaagagcctggctatgaagcggatgatataatagctactatagtgaataaatataaggatgatttaaaatatattctctctggagatttagatcttttgcaattagtctcggacaaaacctttctaatacatcctcaaaagggaattactgagtttactatttatgatccaaaagctgtaaaggataggtttggagtagagccctataagattcccttatacaaagtattagtaggggacgaatctgataatattccaggagtaaatggaataggtcctaaaaaggcctcaaagattcttgagaaaatttcaagtgtagatgaatttaaaagtaaaataaaagttttggatagtgatttaagggagcttattgagaaaaattggaatattattgaaagaaatttagaacttgttactttaaaaaatatagataaggatcttattcttaaacccttcgagattaaaagagatgaaaaagtaatagattttttgaagagatatgaacttaagagtattcttcaaaagttatttcctgatcttcaagaggaagaaaatatagagattaaagatgtcgaagagatcaattttaatgaggtagaaaaagaaggctactttgcctttaaatgtcttggagatagggcttttgagggtatttctctttccttcaaggagggggaaggatattttatatctccttttgatttcaataatgagataagaaagaagattgaaaatataatttcttcagagaatgttaaaaaaattggctcttatattcaaagagatttacattttttaaactgtaaaataaagggcgatgtatttgatgttagtctcgcatcttatcttttgaaccctgaaagacaaaatcactctcttgatattttgataggagagtatctaaataaaacctcttttattcctcaaaaatacgctggttatctttttccgttaaagtctattcttgaggagaggataaagaatgaagggttagaatttgtactttataacatagagattccattaatccctgtactttactccatggagaagtgggggataaaggtagataaggaatatttaaaacagctttctgatgaattctgcgagagaattaaaaaattggaagaagagatatatgaacttgcaggaaccagatttaatctcaattctccaaaacaactttctgaagttttatttgagaggttaaaacttccttctggtaagaaaggaaaaacaggatattctacgtcgtcttctgtgcttcaaaacttaataaatgctcatcctatagtgagaaaaatcctccaatatagagaactctataaattgaagagtacttatgtggatgctattcctaatctggttaatccacaaacaggtagagttcatacaaaatttaatcctacaggtacagctacaggaagaataagtagtagtgaacctaatcttcagaatattcctataaaaagtgaagaaggtagaaagataagaagagccttcgtgtcagaagatggatattttcttgtatctcttgattattctcagatagagctaaggattatggctcatctttctcaggagcctaaattaatatctgccttccaaaaaggagaggatattcatagaagaacagcatcggagatttttggagtgccagaggaagaagttgatgatcttttaaggtcaagggcaaaggccgttaattttggaattatttatggtatctcttcttttggactttctgagactgtaagtattacaccagaagaggcagagaaatttatagactcgtattttaagcactatccaagagtgaagctttttatagataagactattcatgaggcaagagaaaaactgtacgttaaaaccttatttggcagaaaaagatatattcctatgattaagagcataaataaacaggtaaggaatgcctatgaaaggatagcaataaatgcgccaattcagggaacagctgctgatattataaaacttgccatgatagaaatttacaaggagattgaaaataaaaatctcaagtcaagaatactccttcaaattcatgatgagcttattcttgaagtgccagaggaggagatggaatttactcctttaatggcaaaggaaaaaatggaaaaggtggtagaactttcggttcctcttgtagttgaaatctcggtaggtaaaaatcttgctgaattaaaatgagctataagattggtcgac

SEQ ID NO: 1998 - DNA, 2673 bp, Artificial Sequence
  Description of Artificial Sequence: Synthetic DNA sequence of Dictyoglomus thermophilum DNA E783F
atgaaatacctgctgccgaccgctgctgctggtctgctgctcctcgctgcccagccggcgatggccatggatatcggaattaattcggatccgaaatctctgtgggatctttttcaagaaaataccgagaaagagtccaaaaggaagattctgattattgatggctcaagcctcatatacagggtttattacgcccttccccctttaaagacaaaaaatggtgaattaactaatgctctttatggcttcataagaatacttttaaaggccgtagaagattttaatcctgatcttgtaggcgttgcctttgatagacctgaacctacttttaggcatgtgatttataaagagtataaggctaagagaccacctatgaaggatgatttgaaagcgcagataccatggataagagaatttctaaggttaaatgatatacctctattggaagagcctggctatgaagcggatgatataatagctactatagtgaataaatataaggatgatttaaaatatattctctctggagatttagatcttttgcaattagtctcggacaaaacctttctaatacatcctcaaaagggaattactgagtttactatttatgatccaaaagctgtaaaggataggtttggagtagagccctataagattcccttatacaaagtattagtaggggacgaatctgataatattccaggagtaaatggaataggtcctaaaaaggcctcaaagattcttgagaaaatttcaagtgtagatgaatttaaaagtaaaataaaagttttggatagtgatttaagggagcttattgagaaaaattggaatattattgaaagaaatttagaacttgttactttaaaaaatatagataaggatcttattcttaaacccttcgagattaaaagagatgaaaaagtaatagattttttgaagagatatgaacttaagagtattcttcaaaagttatttcctgatcttcaagaggaagaaaatatagagattaaagatgtcgaagagatcaattttaatgaggtagaaaaagaaggctactttgcctttaaatgtcttggagatagggcttttgagggtatttctctttccttcaaggagggggaaggatattttatatctccttttgatttcaataatgagataagaaagaagattgaaaatataatttcttcagagaatgttaaaaaaattggctcttatattcaaagagatttacattttttaaactgtaaaataaagggcgatgtatttgatgttagtctcgcatcttatcttttgaaccctgaaagacaaaatcactctcttgatattttgataggagagtatctaaataaaacctcttttattcctcaaaaatacgctggttatctttttccgttaaagtctattcttgaggagaggataaagaatgaagggttagaatttgtactttataacatagagattccattaatccctgtactttactccatggagaagtgggggataaaggtagataaggaatatttaaaacagctttctgatgaattctgcgagagaattaaaaaattggaagaagagatatatgaacttgcaggaaccagatttaatctcaattctccaaaacaactttctgaagttttatttgagaggttaaaacttccttctggtaagaaaggaaaaacaggatattctacgtcgtcttctgtgcttcaaaacttaataaatgctcatcctatagtgagaaaaatcctccaatatagagaactctataaattgaagagtacttatgtggatgctattcctaatctggttaatccacaaacaggtagagttcatacaaaatttaatcctacaggtacagctacaggaagaataagtagtagtgaacctaatcttcagaatattcctataaaaagtgaagaaggtagaaagataagaagagccttcgtgtcagaagatggatattttcttgtatctcttgattattctcagatagagctaaggattatggctcatctttctcaggagcctaaattaatatctgccttccaaaaaggagaggatattcatagaagaacagcatcggagatttttggagtgccagaggaagaagttgatgatcttttaaggtcaagggcaaaggccgttaattttggaattatttatggtatctcttcttttggactttctgagactgtaagtattacaccagaagaggcagagaaatttatagactcgtattttaagcactatccaagagtgaagctttttatagataagactattcatgaggcaagagaaaaactgtacgttaaaaccttatttggcagaaaaagatatattccttttattaagagcataaataaacaggtaaggaatgcctatgaaaggatagcaataaatgcgccaattcagggaacagctgctgatattataaaacttgccatgatagaaatttacaaggagattgaaaataaaaatctcaagtcaagaatactccttcaaattcatgatgagcttattcttgaagtgccagaggaggagatggaatttactcctttaatggcaaaggaaaaaatggaaaaggtggtagaactttcggttcctcttgtagttgaaatctcggtaggtaaaaatcttgctgaattaaaatgagctataagattggtcgac

SEQ ID NO: 1999 - DNA, 2673 bp, Artificial Sequence
  Description of Artificial Sequence: Synthetic DNA sequence of Dictyoglomus thermophilum DNA E783P
atgaaatacctgctgccgaccgctgctgctggtctgctgctcctcgctgcccagccggcgatggccatggatatcggaattaattcggatccgaaatctctgtgggatctttttcaagaaaataccgagaaagagtccaaaaggaagattctgattattgatggctcaagcctcatatacagggtttattacgcccttccccctttaaagacaaaaaatggtgaattaactaatgctctttatggcttcataagaatacttttaaaggccgtagaagattttaatcctgatcttgtaggcgttgcctttgatagacctgaacctacttttaggcatgtgatttataaagagtataaggctaagagaccacctatgaaggatgatttgaaagcgcagataccatggataagagaatttctaaggttaaatgatatacctctattggaagagcctggctatgaagcggatgatataatagctactatagtgaataaatataaggatgatttaaaatatattctctctggagatttagatcttttgcaattagtctcggacaaaacctttctaatacatcctcaaaagggaattactgagtttactatttatgatccaaaagctgtaaaggataggtttggagtagagccctataagattcccttatacaaagtattagtaggggacgaatctgataatattccaggagtaaatggaataggtcctaaaaaggcctcaaagattcttgagaaaatttcaagtgtagatgaatttaaaagtaaaataaaagttttggatagtgatttaagggagcttattgagaaaaattggaatattattgaaagaaatttagaacttgttactttaaaaaatatagataaggatcttattcttaaacccttcgagattaaaagagatgaaaaagtaatagattttttgaagagatatgaacttaagagtattcttcaaaagttatttcctgatcttcaagaggaagaaaatatagagattaaagatgtcgaagagatcaattttaatgaggtagaaaaagaaggctactttgcctttaaatgtcttggagatagggcttttgagggtatttctctttccttcaaggagggggaaggatattttatatctccttttgatttcaataatgagataagaaagaagattgaaaatataatttcttcagagaatgttaaaaaaattggctcttatattcaaagagatttacattttttaaactgtaaaataaagggcgatgtatttgatgttagtctcgcatcttatcttttgaaccctgaaagacaaaatcactctcttgatattttgataggagagtatctaaataaaacctcttttattcctcaaaaatacgctggttatctttttccgttaaagtctattcttgaggagaggataaagaatgaagggttagaatttgtactttataacatagagattccattaatccctgtactttactccatggagaagtgggggataaaggtagataaggaatatttaaaacagctttctgatgaattctgcgagagaattaaaaaattggaagaagagatatatgaacttgcaggaaccagatttaatctcaattctccaaaacaactttctgaagttttatttgagaggttaaaacttccttctggtaagaaaggaaaaacaggatattctacgtcgtcttctgtgcttcaaaacttaataaatgctcatcctatagtgagaaaaatcctccaatatagagaactctataaattgaagagtacttatgtggatgctattcctaatctggttaatccacaaacaggtagagttcatacaaaatttaatcctacaggtacagctacaggaagaataagtagtagtgaacctaatcttcagaatattcctataaaaagtgaagaaggtagaaagataagaagagccttcgtgtcagaagatggatattttcttgtatctcttgattattctcagatagagctaaggattatggctcatctttctcaggagcctaaattaatatctgccttccaaaaaggagaggatattcatagaagaacagcatcggagatttttggagtgccagaggaagaagttgatgatcttttaaggtcaagggcaaaggccgttaattttggaattatttatggtatctcttcttttggactttctgagactgtaagtattacaccagaagaggcagagaaatttatagactcgtattttaagcactatccaagagtgaagctttttatagataagactattcatgaggcaagagaaaaactgtacgttaaaaccttatttggcagaaaaagatatattcctcctattaagagcataaataaacaggtaaggaatgcctatgaaaggatagcaataaatgcgccaattcagggaacagctgctgatattataaaacttgccatgatagaaatttacaaggagattgaaaataaaaatctcaagtcaagaatactccttcaaattcatgatgagcttattcttgaagtgccagaggaggagatggaatttactcctttaatggcaaaggaaaaaatggaaaaggtggtagaactttcggttcctcttgtagttgaaatctcggtaggtaaaaatcttgctgaattaaaatgagctataagattggtcgac

SEQ ID NO: 2000 - DNA, 2673 bp, Artificial Sequence
  Description of Artificial Sequence: Synthetic DNA sequence of Dictyoglomus thermophilum DNA E783S
atgaaatacctgctgccgaccgctgctgctggtctgctgctcctcgctgcccagccggcgatggccatggatatcggaattaattcggatccgaaatctctgtgggatctttttcaagaaaataccgagaaagagtccaaaaggaagattctgattattgatggctcaagcctcatatacagggtttattacgcccttccccctttaaagacaaaaaatggtgaattaactaatgctctttatggcttcataagaatacttttaaaggccgtagaagattttaatcctgatcttgtaggcgttgcctttgatagacctgaacctacttttaggcatgtgatttataaagagtataaggctaagagaccacctatgaaggatgatttgaaagcgcagataccatggataagagaatttctaaggttaaatgatatacctctattggaagagcctggctatgaagcggatgatataatagctactatagtgaataaatataaggatgatttaaaatatattctctctggagatttagatcttttgcaattagtctcggacaaaacctttctaatacatcctcaaaagggaattactgagtttactatttatgatccaaaagctgtaaaggataggtttggagtagagccctataagattcccttatacaaagtattagtaggggacgaatctgataatattccaggagtaaatggaataggtcctaaaaaggcctcaaagattcttgagaaaatttcaagtgtagatgaatttaaaagtaaaataaaagttttggatagtgatttaagggagcttattgagaaaaattggaatattattgaaagaaatttagaacttgttactttaaaaaatatagataaggatcttattcttaaacccttcgagattaaaagagatgaaaaagtaatagattttttgaagagatatgaacttaagagtattcttcaaaagttatttcctgatcttcaagaggaagaaaatatagagattaaagatgtcgaagagatcaattttaatgaggtagaaaaagaaggctactttgcctttaaatgtcttggagatagggcttttgagggtatttctctttccttcaaggagggggaaggatattttatatctccttttgatttcaataatgagataagaaagaagattgaaaatataatttcttcagagaatgttaaaaaaattggctcttatattcaaagagatttacattttttaaactgtaaaataaagggcgatgtatttgatgttagtctcgcatcttatcttttgaaccctgaaagacaaaatcactctcttgatattttgataggagagtatctaaataaaacctcttttattcctcaaaaatacgctggttatctttttccgttaaagtctattcttgaggagaggataaagaatgaagggttagaatttgtactttataacatagagattccattaatccctgtactttactccatggagaagtgggggataaaggtagataaggaatatttaaaacagctttctgatgaattctgcgagagaattaaaaaattggaagaagagatatatgaacttgcaggaaccagatttaatctcaattctccaaaacaactttctgaagttttatttgagaggttaaaacttccttctggtaagaaaggaaaaacaggatattctacgtcgtcttctgtgcttcaaaacttaataaatgctcatcctatagtgagaaaaatcctccaatatagagaactctataaattgaagagtacttatgtggatgctattcctaatctggttaatccacaaacaggtagagttcatacaaaatttaatcctacaggtacagctacaggaagaataagtagtagtgaacctaatcttcagaatattcctataaaaagtgaagaaggtagaaagataagaagagccttcgtgtcagaagatggatattttcttgtatctcttgattattctcagatagagctaaggattatggctcatctttctcaggagcctaaattaatatctgccttccaaaaaggagaggatattcatagaagaacagcatcggagatttttggagtgccagaggaagaagttgatgatcttttaaggtcaagggcaaaggccgttaattttggaattatttatggtatctcttcttttggactttctgagactgtaagtattacaccagaagaggcagagaaatttatagactcgtattttaagcactatccaagagtgaagctttttatagataagactattcatgaggcaagagaaaaactgtacgttaaaaccttatttggcagaaaaagatatattccttctattaagagcataaataaacaggtaaggaatgcctatgaaaggatagcaataaatgcgccaattcagggaacagctgctgatattataaaacttgccatgatagaaatttacaaggagattgaaaataaaaatctcaagtcaagaatactccttcaaattcatgatgagcttattcttgaagtgccagaggaggagatggaatttactcctttaatggcaaaggaaaaaatggaaaaggtggtagaactttcggttcctcttgtagttgaaatctcggtaggtaaaaatcttgctgaattaaaatgagctataagattggtcgac

SEQ ID NO: 2001 - DNA, 2673 bp, Artificial Sequence
  Description of Artificial Sequence: Synthetic DNA sequence of Dictyoglomus thermophilum DNA E783T
atgaaatacctgctgccgaccgctgctgctggtctgctgctcctcgctgcccagccggcgatggccatggatatcggaattaattcggatccgaaatctctgtgggatctttttcaagaaaataccgagaaagagtccaaaaggaagattctgattattgatggctcaagcctcatatacagggtttattacgcccttccccctttaaagacaaaaaatggtgaattaactaatgctctttatggcttcataagaatacttttaaaggccgtagaagattttaatcctgatcttgtaggcgttgcctttgatagacctgaacctacttttaggcatgtgatttataaagagtataaggctaagagaccacctatgaaggatgatttgaaagcgcagataccatggataagagaatttctaaggttaaatgatatacctctattggaagagcctggctatgaagcggatgatataatagctactatagtgaataaatataaggatgatttaaaatatattctctctggagatttagatcttttgcaattagtctcggacaaaacctttctaatacatcctcaaaagggaattactgagtttactatttatgatccaaaagctgtaaaggataggtttggagtagagccctataagattcccttatacaaagtattagtaggggacgaatctgataatattccaggagtaaatggaataggtcctaaaaaggcctcaaagattcttgagaaaatttcaagtgtagatgaatttaaaagtaaaataaaagttttggatagtgatttaagggagcttattgagaaaaattggaatattattgaaagaaatttagaacttgttactttaaaaaatatagataaggatcttattcttaaacccttcgagattaaaagagatgaaaaagtaatagattttttgaagagatatgaacttaagagtattcttcaaaagttatttcctgatcttcaagaggaagaaaatatagagattaaagatgtcgaagagatcaattttaatgaggtagaaaaagaaggctactttgcctttaaatgtcttggagatagggcttttgagggtatttctctttccttcaaggagggggaaggatattttatatctccttttgatttcaataatgagataagaaagaagattgaaaatataatttcttcagagaatgttaaaaaaattggctcttatattcaaagagatttacattttttaaactgtaaaataaagggcgatgtatttgatgttagtctcgcatcttatcttttgaaccctgaaagacaaaatcactctcttgatattttgataggagagtatctaaataaaacctcttttattcctcaaaaatacgctggttatctttttccgttaaagtctattcttgaggagaggataaagaatgaagggttagaatttgtactttataacatagagattccattaatccctgtactttactccatggagaagtgggggataaaggtagataaggaatatttaaaacagctttctgatgaattctgcgagagaattaaaaaattggaagaagagatatatgaacttgcaggaaccagatttaatctcaattctccaaaacaactttctgaagttttatttgagaggttaaaacttccttctggtaagaaaggaaaaacaggatattctacgtcgtcttctgtgcttcaaaacttaataaatgctcatcctatagtgagaaaaatcctccaatatagagaactctataaattgaagagtacttatgtggatgctattcctaatctggttaatccacaaacaggtagagttcatacaaaatttaatcctacaggtacagctacaggaagaataagtagtagtgaacctaatcttcagaatattcctataaaaagtgaagaaggtagaaagataagaagagccttcgtgtcagaagatggatattttcttgtatctcttgattattctcagatagagctaaggattatggctcatctttctcaggagcctaaattaatatctgccttccaaaaaggagaggatattcatagaagaacagcatcggagatttttggagtgccagaggaagaagttgatgatcttttaaggtcaagggcaaaggccgttaattttggaattatttatggtatctcttcttttggactttctgagactgtaagtattacaccagaagaggcagagaaatttatagactcgtattttaagcactatccaagagtgaagctttttatagataagactattcatgaggcaagagaaaaactgtacgttaaaaccttatttggcagaaaaagatatattcctactattaagagcataaataaacaggtaaggaatgcctatgaaaggatagcaataaatgcgccaattcagggaacagctgctgatattataaaacttgccatgatagaaatttacaaggagattgaaaataaaaatctcaagtcaagaatactccttcaaattcatgatgagcttattcttgaagtgccagaggaggagatggaatttactcctttaatggcaaaggaaaaaatggaaaaggtggtagaactttcggttcctcttgtagttgaaatctcggtaggtaaaaatcttgctgaattaaaatgagctataagattggtcgac

SEQ ID NO: 2002 - DNA, 2673 bp, Artificial Sequence
  Description of Artificial Sequence: Synthetic DNA sequence of Dictyoglomus thermophilum DNA E783W
atgaaatacctgctgccgaccgctgctgctggtctgctgctcctcgctgcccagccggcgatggccatggatatcggaattaattcggatccgaaatctctgtgggatctttttcaagaaaataccgagaaagagtccaaaaggaagattctgattattgatggctcaagcctcatatacagggtttattacgcccttccccctttaaagacaaaaaatggtgaattaactaatgctctttatggcttcataagaatacttttaaaggccgtagaagattttaatcctgatcttgtaggcgttgcctttgatagacctgaacctacttttaggcatgtgatttataaagagtataaggctaagagaccacctatgaaggatgatttgaaagcgcagataccatggataagagaatttctaaggttaaatgatatacctctattggaagagcctggctatgaagcggatgatataatagctactatagtgaataaatataaggatgatttaaaatatattctctctggagatttagatcttttgcaattagtctcggacaaaacctttctaatacatcctcaaaagggaattactgagtttactatttatgatccaaaagctgtaaaggataggtttggagtagagccctataagattcccttatacaaagtattagtaggggacgaatctgataatattccaggagtaaatggaataggtcctaaaaaggcctcaaagattcttgagaaaatttcaagtgtagatgaatttaaaagtaaaataaaagttttggatagtgatttaagggagcttattgagaaaaattggaatattattgaaagaaatttagaacttgttactttaaaaaatatagataaggatcttattcttaaacccttcgagattaaaagagatgaaaaagtaatagattttttgaagagatatgaacttaagagtattcttcaaaagttatttcctgatcttcaagaggaagaaaatatagagattaaagatgtcgaagagatcaattttaatgaggtagaaaaagaaggctactttgcctttaaatgtcttggagatagggcttttgagggtatttctctttccttcaaggagggggaaggatattttatatctccttttgatttcaataatgagataagaaagaagattgaaaatataatttcttcagagaatgttaaaaaaattggctcttatattcaaagagatttacattttttaaactgtaaaataaagggcgatgtatttgatgttagtctcgcatcttatcttttgaaccctgaaagacaaaatcactctcttgatattttgataggagagtatctaaataaaacctcttttattcctcaaaaatacgctggttatctttttccgttaaagtctattcttgaggagaggataaagaatgaagggttagaatttgtactttataacatagagattccattaatccctgtactttactccatggagaagtgggggataaaggtagataaggaatatttaaaacagctttctgatgaattctgcgagagaattaaaaaattggaagaagagatatatgaacttgcaggaaccagatttaatctcaattctccaaaacaactttctgaagttttatttgagaggttaaaacttccttctggtaagaaaggaaaaacaggatattctacgtcgtcttctgtgcttcaaaacttaataaatgctcatcctatagtgagaaaaatcctccaatatagagaactctataaattgaagagtacttatgtggatgctattcctaatctggttaatccacaaacaggtagagttcatacaaaatttaatcctacaggtacagctacaggaagaataagtagtagtgaacctaatcttcagaatattcctataaaaagtgaagaaggtagaaagataagaagagccttcgtgtcagaagatggatattttcttgtatctcttgattattctcagatagagctaaggattatggctcatctttctcaggagcctaaattaatatctgccttccaaaaaggagaggatattcatagaagaacagcatcggagatttttggagtgccagaggaagaagttgatgatcttttaaggtcaagggcaaaggccgttaattttggaattatttatggtatctcttcttttggactttctgagactgtaagtattacaccagaagaggcagagaaatttatagactcgtattttaagcactatccaagagtgaagctttttatagataagactattcatgaggcaagagaaaaactgtacgttaaaaccttatttggcagaaaaagatatattccttggattaagagcataaataaacaggtaaggaatgcctatgaaaggatagcaataaatgcgccaattcagggaacagctgctgatattataaaacttgccatgatagaaatttacaaggagattgaaaataaaaatctcaagtcaagaatactccttcaaattcatgatgagcttattcttgaagtgccagaggaggagatggaatttactcctttaatggcaaaggaaaaaatggaaaaggtggtagaactttcggttcctcttgtagttgaaatctcggtaggtaaaaatcttgctgaattaaaatgagctataagattggtcgac

SEQ ID NO: 2003 - DNA, 2673 bp, Artificial Sequence
  Description of Artificial Sequence: Synthetic DNA sequence of Dictyoglomus thermophilum DNA E783Y
atgaaatacctgctgccgaccgctgctgctggtctgctgctcctcgctgcccagccggcgatggccatggatatcggaattaattcggatccgaaatctctgtgggatctttttcaagaaaataccgagaaagagtccaaaaggaagattctgattattgatggctcaagcctcatatacagggtttattacgcccttccccctttaaagacaaaaaatggtgaattaactaatgctctttatggcttcataagaatacttttaaaggccgtagaagattttaatcctgatcttgtaggcgttgcctttgatagacctgaacctacttttaggcatgtgatttataaagagtataaggctaagagaccacctatgaaggatgatttgaaagcgcagataccatggataagagaatttctaaggttaaatgatatacctctattggaagagcctggctatgaagcggatgatataatagctactatagtgaataaatataaggatgatttaaaatatattctctctggagatttagatcttttgcaattagtctcggacaaaacctttctaatacatcctcaaaagggaattactgagtttactatttatgatccaaaagctgtaaaggataggtttggagtagagccctataagattcccttatacaaagtattagtaggggacgaatctgataatattccaggagtaaatggaataggtcctaaaaaggcctcaaagattcttgagaaaatttcaagtgtagatgaatttaaaagtaaaataaaagttttggatagtgatttaagggagcttattgagaaaaattggaatattattgaaagaaatttagaacttgttactttaaaaaatatagataaggatcttattcttaaacccttcgagattaaaagagatgaaaaagtaatagattttttgaagagatatgaacttaagagtattcttcaaaagttatttcctgatcttcaagaggaagaaaatatagagattaaagatgtcgaagagatcaattttaatgaggtagaaaaagaaggctactttgcctttaaatgtcttggagatagggcttttgagggtatttctctttccttcaaggagggggaaggatattttatatctccttttgatttcaataatgagataagaaagaagattgaaaatataatttcttcagagaatgttaaaaaaattggctcttatattcaaagagatttacattttttaaactgtaaaataaagggcgatgtatttgatgttagtctcgcatcttatcttttgaaccctgaaagacaaaatcactctcttgatattttgataggagagtatctaaataaaacctcttttattcctcaaaaatacgctggttatctttttccgttaaagtctattcttgaggagaggataaagaatgaagggttagaatttgtactttataacatagagattccattaatccctgtactttactccatggagaagtgggggataaaggtagataaggaatatttaaaacagctttctgatgaattctgcgagagaattaaaaaattggaagaagagatatatgaacttgcaggaaccagatttaatctcaattctccaaaacaactttctgaagttttatttgagaggttaaaacttccttctggtaagaaaggaaaaacaggatattctacgtcgtcttctgtgcttcaaaacttaataaatgctcatcctatagtgagaaaaatcctccaatatagagaactctataaattgaagagtacttatgtggatgctattcctaatctggttaatccacaaacaggtagagttcatacaaaatttaatcctacaggtacagctacaggaagaataagtagtagtgaacctaatcttcagaatattcctataaaaagtgaagaaggtagaaagataagaagagccttcgtgtcagaagatggatattttcttgtatctcttgattattctcagatagagctaaggattatggctcatctttctcaggagcctaaattaatatctgccttccaaaaaggagaggatattcatagaagaacagcatcggagatttttggagtgccagaggaagaagttgatgatcttttaaggtcaagggcaaaggccgttaattttggaattatttatggtatctcttcttttggactttctgagactgtaagtattacaccagaagaggcagagaaatttatagactcgtattttaagcactatccaagagtgaagctttttatagataagactattcatgaggcaagagaaaaactgtacgttaaaaccttatttggcagaaaaagatatattccttatattaagagcataaataaacaggtaaggaatgcctatgaaaggatagcaataaatgcgccaattcagggaacagctgctgatattataaaacttgccatgatagaaatttacaaggagattgaaaataaaaatctcaagtcaagaatactccttcaaattcatgatgagcttattcttgaagtgccagaggaggagatggaatttactcctttaatggcaaaggaaaaaatggaaaaggtggtagaactttcggttcctcttgtagttgaaatctcggtaggtaaaaatcttgctgaattaaaatgagctataagattggtcgac

SEQ ID NO: 2004 - DNA, 2673 bp, Artificial Sequence
  Description of Artificial Sequence: Synthetic DNA sequence of Dictyoglomus thermophilum DNA E783V
atgaaatacctgctgccgaccgctgctgctggtctgctgctcctcgctgcccagccggcgatggccatggatatcggaattaattcggatccgaaatctctgtgggatctttttcaagaaaataccgagaaagagtccaaaaggaagattctgattattgatggctcaagcctcatatacagggtttattacgcccttccccctttaaagacaaaaaatggtgaattaactaatgctctttatggcttcataagaatacttttaaaggccgtagaagattttaatcctgatcttgtaggcgttgcctttgatagacctgaacctacttttaggcatgtgatttataaagagtataaggctaagagaccacctatgaaggatgatttgaaagcgcagataccatggataagagaatttctaaggttaaatgatatacctctattggaagagcctggctatgaagcggatgatataatagctactatagtgaataaatataaggatgatttaaaatatattctctctggagatttagatcttttgcaattagtctcggacaaaacctttctaatacatcctcaaaagggaattactgagtttactatttatgatccaaaagctgtaaaggataggtttggagtagagccctataagattcccttatacaaagtattagtaggggacgaatctgataatattccaggagtaaatggaataggtcctaaaaaggcctcaaagattcttgagaaaatttcaagtgtagatgaatttaaaagtaaaataaaagttttggatagtgatttaagggagcttattgagaaaaattggaatattattgaaagaaatttagaacttgttactttaaaaaatatagataaggatcttattcttaaacccttcgagattaaaagagatgaaaaagtaatagattttttgaagagatatgaacttaagagtattcttcaaaagttatttcctgatcttcaagaggaagaaaatatagagattaaagatgtcgaagagatcaattttaatgaggtagaaaaagaaggctactttgcctttaaatgtcttggagatagggcttttgagggtatttctctttccttcaaggagggggaaggatattttatatctccttttgatttcaataatgagataagaaagaagattgaaaatataatttcttcagagaatgttaaaaaaattggctcttatattcaaagagatttacattttttaaactgtaaaataaagggcgatgtatttgatgttagtctcgcatcttatcttttgaaccctgaaagacaaaatcactctcttgatattttgataggagagtatctaaataaaacctcttttattcctcaaaaatacgctggttatctttttccgttaaagtctattcttgaggagaggataaagaatgaagggttagaatttgtactttataacatagagattccattaatccctgtactttactccatggagaagtgggggataaaggtagataaggaatatttaaaacagctttctgatgaattctgcgagagaattaaaaaattggaagaagagatatatgaacttgcaggaaccagatttaatctcaattctccaaaacaactttctgaagttttatttgagaggttaaaacttccttctggtaagaaaggaaaaacaggatattctacgtcgtcttctgtgcttcaaaacttaataaatgctcatcctatagtgagaaaaatcctccaatatagagaactctataaattgaagagtacttatgtggatgctattcctaatctggttaatccacaaacaggtagagttcatacaaaatttaatcctacaggtacagctacaggaagaataagtagtagtgaacctaatcttcagaatattcctataaaaagtgaagaaggtagaaagataagaagagccttcgtgtcagaagatggatattttcttgtatctcttgattattctcagatagagctaaggattatggctcatctttctcaggagcctaaattaatatctgccttccaaaaaggagaggatattcatagaagaacagcatcggagatttttggagtgccagaggaagaagttgatgatcttttaaggtcaagggcaaaggccgttaattttggaattatttatggtatctcttcttttggactttctgagactgtaagtattacaccagaagaggcagagaaatttatagactcgtattttaagcactatccaagagtgaagctttttatagataagactattcatgaggcaagagaaaaactgtacgttaaaaccttatttggcagaaaaagatatattcctgttattaagagcataaataaacaggtaaggaatgcctatgaaaggatagcaataaatgcgccaattcagggaacagctgctgatattataaaacttgccatgatagaaatttacaaggagattgaaaataaaaatctcaagtcaagaatactccttcaaattcatgatgagcttattcttgaagtgccagaggaggagatggaatttactcctttaatggcaaaggaaaaaatggaaaaggtggtagaactttcggttcctcttgtagttgaaatctcggtaggtaaaaatcttgctgaattaaaatgagctataagattggtcgac

SEQ ID NO: 2005 - DNA, 2673 bp, Artificial Sequence
  Description of Artificial Sequence: Synthetic DNA sequence of Dictyoglomus thermophilum DNA I784A
atgaaatacctgctgccgaccgctgctgctggtctgctgctcctcgctgcccagccggcgatggccatggatatcggaattaattcggatccgaaatctctgtgggatctttttcaagaaaataccgagaaagagtccaaaaggaagattctgattattgatggctcaagcctcatatacagggtttattacgcccttccccctttaaagacaaaaaatggtgaattaactaatgctctttatggcttcataagaatacttttaaaggccgtagaagattttaatcctgatcttgtaggcgttgcctttgatagacctgaacctacttttaggcatgtgatttataaagagtataaggctaagagaccacctatgaaggatgatttgaaagcgcagataccatggataagagaatttctaaggttaaatgatatacctctattggaagagcctggctatgaagcggatgatataatagctactatagtgaataaatataaggatgatttaaaatatattctctctggagatttagatcttttgcaattagtctcggacaaaacctttctaatacatcctcaaaagggaattactgagtttactatttatgatccaaaagctgtaaaggataggtttggagtagagccctataagattcccttatacaaagtattagtaggggacgaatctgataatattccaggagtaaatggaataggtcctaaaaaggcctcaaagattcttgagaaaatttcaagtgtagatgaatttaaaagtaaaataaaagttttggatagtgatttaagggagcttattgagaaaaattggaatattattgaaagaaatttagaacttgttactttaaaaaatatagataaggatcttattcttaaacccttcgagattaaaagagatgaaaaagtaatagattttttgaagagatatgaacttaagagtattcttcaaaagttatttcctgatcttcaagaggaagaaaatatagagattaaagatgtcgaagagatcaattttaatgaggtagaaaaagaaggctactttgcctttaaatgtcttggagatagggcttttgagggtatttctctttccttcaaggagggggaaggatattttatatctccttttgatttcaataatgagataagaaagaagattgaaaatataatttcttcagagaatgttaaaaaaattggctcttatattcaaagagatttacattttttaaactgtaaaataaagggcgatgtatttgatgttagtctcgcatcttatcttttgaaccctgaaagacaaaatcactctcttgatattttgataggagagtatctaaataaaacctcttttattcctcaaaaatacgctggttatctttttccgttaaagtctattcttgaggagaggataaagaatgaagggttagaatttgtactttataacatagagattccattaatccctgtactttactccatggagaagtgggggataaaggtagataaggaatatttaaaacagctttctgatgaattctgcgagagaattaaaaaattggaagaagagatatatgaacttgcaggaaccagatttaatctcaattctccaaaacaactttctgaagttttatttgagaggttaaaacttccttctggtaagaaaggaaaaacaggatattctacgtcgtcttctgtgcttcaaaacttaataaatgctcatcctatagtgagaaaaatcctccaatatagagaactctataaattgaagagtacttatgtggatgctattcctaatctggttaatccacaaacaggtagagttcatacaaaatttaatcctacaggtacagctacaggaagaataagtagtagtgaacctaatcttcagaatattcctataaaaagtgaagaaggtagaaagataagaagagccttcgtgtcagaagatggatattttcttgtatctcttgattattctcagatagagctaaggattatggctcatctttctcaggagcctaaattaatatctgccttccaaaaaggagaggatattcatagaagaacagcatcggagatttttggagtgccagaggaagaagttgatgatcttttaaggtcaagggcaaaggccgttaattttggaattatttatggtatctcttcttttggactttctgagactgtaagtattacaccagaagaggcagagaaatttatagactcgtattttaagcactatccaagagtgaagctttttatagataagactattcatgaggcaagagaaaaactgtacgttaaaaccttatttggcagaaaaagatatattcctgaggctaagagcataaataaacaggtaaggaatgcctatgaaaggatagcaataaatgcgccaattcagggaacagctgctgatattataaaacttgccatgatagaaatttacaaggagattgaaaataaaaatctcaagtcaagaatactccttcaaattcatgatgagcttattcttgaagtgccagaggaggagatggaatttactcctttaatggcaaaggaaaaaatggaaaaggtggtagaactttcggttcctcttgtagttgaaatctcggtaggtaaaaatcttgctgaattaaaatgagctataagattggtcgac

SEQ ID NO: 2006 - DNA, 2673 bp, Artificial Sequence
  Description of Artificial Sequence: Synthetic DNA sequence of Dictyoglomus thermophilum DNA I784R
atgaaatacctgctgccgaccgctgctgctggtctgctgctcctcgctgcccagccggcgatggccatggatatcggaattaattcggatccgaaatctctgtgggatctttttcaagaaaataccgagaaagagtccaaaaggaagattctgattattgatggctcaagcctcatatacagggtttattacgcccttccccctttaaagacaaaaaatggtgaattaactaatgctctttatggcttcataagaatacttttaaaggccgtagaagattttaatcctgatcttgtaggcgttgcctttgatagacctgaacctacttttaggcatgtgatttataaagagtataaggctaagagaccacctatgaaggatgatttgaaagcgcagataccatggataagagaatttctaaggttaaatgatatacctctattggaagagcctggctatgaagcggatgatataatagctactatagtgaataaatataaggatgatttaaaatatattctctctggagatttagatcttttgcaattagtctcggacaaaacctttctaatacatcctcaaaagggaattactgagtttactatttatgatccaaaagctgtaaaggataggtttggagtagagccctataagattcccttatacaaagtattagtaggggacgaatctgataatattccaggagtaaatggaataggtcctaaaaaggcctcaaagattcttgagaaaatttcaagtgtagatgaatttaaaagtaaaataaaagttttggatagtgatttaagggagcttattgagaaaaattggaatattattgaaagaaatttagaacttgttactttaaaaaatatagataaggatcttattcttaaacccttcgagattaaaagagatgaaaaagtaatagattttttgaagagatatgaacttaagagtattcttcaaaagttatttcctgatcttcaagaggaagaaaatatagagattaaagatgtcgaagagatcaattttaatgaggtagaaaaagaaggctactttgcctttaaatgtcttggagatagggcttttgagggtatttctctttccttcaaggagggggaaggatattttatatctccttttgatttcaataatgagataagaaagaagattgaaaatataatttcttcagagaatgttaaaaaaattggctcttatattcaaagagatttacattttttaaactgtaaaataaagggcgatgtatttgatgttagtctcgcatcttatcttttgaaccctgaaagacaaaatcactctcttgatattttgataggagagtatctaaataaaacctcttttattcctcaaaaatacgctggttatctttttccgttaaagtctattcttgaggagaggataaagaatgaagggttagaatttgtactttataacatagagattccattaatccctgtactttactccatggagaagtgggggataaaggtagataaggaatatttaaaacagctttctgatgaattctgcgagagaattaaaaaattggaagaagagatatatgaacttgcaggaaccagatttaatctcaattctccaaaacaactttctgaagttttatttgagaggttaaaacttccttctggtaagaaaggaaaaacaggatattctacgtcgtcttctgtgcttcaaaacttaataaatgctcatcctatagtgagaaaaatcctccaatatagagaactctataaattgaagagtacttatgtggatgctattcctaatctggttaatccacaaacaggtagagttcatacaaaatttaatcctacaggtacagctacaggaagaataagtagtagtgaacctaatcttcagaatattcctataaaaagtgaagaaggtagaaagataagaagagccttcgtgtcagaagatggatattttcttgtatctcttgattattctcagatagagctaaggattatggctcatctttctcaggagcctaaattaatatctgccttccaaaaaggagaggatattcatagaagaacagcatcggagatttttggagtgccagaggaagaagttgatgatcttttaaggtcaagggcaaaggccgttaattttggaattatttatggtatctcttcttttggactttctgagactgtaagtattacaccagaagaggcagagaaatttatagactcgtattttaagcactatccaagagtgaagctttttatagataagactattcatgaggcaagagaaaaactgtacgttaaaaccttatttggcagaaaaagatatattcctgagcgtaagagcataaataaacaggtaaggaatgcctatgaaaggatagcaataaatgcgccaattcagggaacagctgctgatattataaaacttgccatgatagaaatttacaaggagattgaaaataaaaatctcaagtcaagaatactccttcaaattcatgatgagcttattcttgaagtgccagaggaggagatggaatttactcctttaatggcaaaggaaaaaatggaaaaggtggtagaactttcggttcctcttgtagttgaaatctcggtaggtaaaaatcttgctgaattaaaatgagctataagattggtcgac

SEQ ID NO: 2007 - DNA, 2673 bp, Artificial Sequence
  Description of Artificial Sequence: Synthetic DNA sequence of Dictyoglomus thermophilum DNA I784N
atgaaatacctgctgccgaccgctgctgctggtctgctgctcctcgctgcccagccggcgatggccatggatatcggaattaattcggatccgaaatctctgtgggatctttttcaagaaaataccgagaaagagtccaaaaggaagattctgattattgatggctcaagcctcatatacagggtttattacgcccttccccctttaaagacaaaaaatggtgaattaactaatgctctttatggcttcataagaatacttttaaaggccgtagaagattttaatcctgatcttgtaggcgttgcctttgatagacctgaacctacttttaggcatgtgatttataaagagtataaggctaagagaccacctatgaaggatgatttgaaagcgcagataccatggataagagaatttctaaggttaaatgatatacctctattggaagagcctggctatgaagcggatgatataatagctactatagtgaataaatataaggatgatttaaaatatattctctctggagatttagatcttttgcaattagtctcggacaaaacctttctaatacatcctcaaaagggaattactgagtttactatttatgatccaaaagctgtaaaggataggtttggagtagagccctataagattcccttatacaaagtattagtaggggacgaatctgataatattccaggagtaaatggaataggtcctaaaaaggcctcaaagattcttgagaaaatttcaagtgtagatgaatttaaaagtaaaataaaagttttggatagtgatttaagggagcttattgagaaaaattggaatattattgaaagaaatttagaacttgttactttaaaaaatatagataaggatcttattcttaaacccttcgagattaaaagagatgaaaaagtaatagattttttgaagagatatgaacttaagagtattcttcaaaagttatttcctgatcttcaagaggaagaaaatatagagattaaagatgtcgaagagatcaattttaatgaggtagaaaaagaaggctactttgcctttaaatgtcttggagatagggcttttgagggtatttctctttccttcaaggagggggaaggatattttatatctccttttgatttcaataatgagataagaaagaagattgaaaatataatttcttcagagaatgttaaaaaaattggctcttatattcaaagagatttacattttttaaactgtaaaataaagggcgatgtatttgatgttagtctcgcatcttatcttttgaaccctgaaagacaaaatcactctcttgatattttgataggagagtatctaaataaaacctcttttattcctcaaaaatacgctggttatctttttccgttaaagtctattcttgaggagaggataaagaatgaagggttagaatttgtactttataacatagagattccattaatccctgtactttactccatggagaagtgggggataaaggtagataaggaatatttaaaacagctttctgatgaattctgcgagagaattaaaaaattggaagaagagatatatgaacttgcaggaaccagatttaatctcaattctccaaaacaactttctgaagttttatttgagaggttaaaacttccttctggtaagaaaggaaaaacaggatattctacgtcgtcttctgtgcttcaaaacttaataaatgctcatcctatagtgagaaaaatcctccaatatagagaactctataaattgaagagtacttatgtggatgctattcctaatctggttaatccacaaacaggtagagttcatacaaaatttaatcctacaggtacagctacaggaagaataagtagtagtgaacctaatcttcagaatattcctataaaaagtgaagaaggtagaaagataagaagagccttcgtgtcagaagatggatattttcttgtatctcttgattattctcagatagagctaaggattatggctcatctttctcaggagcctaaattaatatctgccttccaaaaaggagaggatattcatagaagaacagcatcggagatttttggagtgccagaggaagaagttgatgatcttttaaggtcaagggcaaaggccgttaattttggaattatttatggtatctcttcttttggactttctgagactgtaagtattacaccagaagaggcagagaaatttatagactcgtattttaagcactatccaagagtgaagctttttatagataagactattcatgaggcaagagaaaaactgtacgttaaaaccttatttggcagaaaaagatatattcctgagaataagagcataaataaacaggtaaggaatgcctatgaaaggatagcaataaatgcgccaattcagggaacagctgctgatattataaaacttgccatgatagaaatttacaaggagattgaaaataaaaatctcaagtcaagaatactccttcaaattcatgatgagcttattcttgaagtgccagaggaggagatggaatttactcctttaatggcaaaggaaaaaatggaaaaggtggtagaactttcggttcctcttgtagttgaaatctcggtaggtaaaaatcttgctgaattaaaatgagctataagattggtcgac

SEQ ID NO: 2008 - DNA, 2673 bp, Artificial Sequence
  Description of Artificial Sequence: Synthetic DNA sequence of Dictyoglomus thermophilum DNA I784D
atgaaatacctgctgccgaccgctgctgctggtctgctgctcctcgctgcccagccggcgatggccatggatatcggaattaattcggatccgaaatctctgtgggatctttttcaagaaaataccgagaaagagtccaaaaggaagattctgattattgatggctcaagcctcatatacagggtttattacgcccttccccctttaaagacaaaaaatggtgaattaactaatgctctttatggcttcataagaatacttttaaaggccgtagaagattttaatcctgatcttgtaggcgttgcctttgatagacctgaacctacttttaggcatgtgatttataaagagtataaggctaagagaccacctatgaaggatgatttgaaagcgcagataccatggataagagaatttctaaggttaaatgatatacctctattggaagagcctggctatgaagcggatgatataatagctactatagtgaataaatataaggatgatttaaaatatattctctctggagatttagatcttttgcaattagtctcggacaaaacctttctaatacatcctcaaaagggaattactgagtttactatttatgatccaaaagctgtaaaggataggtttggagtagagccctataagattcccttatacaaagtattagtaggggacgaatctgataatattccaggagtaaatggaataggtcctaaaaaggcctcaaagattcttgagaaaatttcaagtgtagatgaatttaaaagtaaaataaaagttttggatagtgatttaagggagcttattgagaaaaattggaatattattgaaagaaatttagaacttgttactttaaaaaatatagataaggatcttattcttaaacccttcgagattaaaagagatgaaaaagtaatagattttttgaagagatatgaacttaagagtattcttcaaaagttatttcctgatcttcaagaggaagaaaatatagagattaaagatgtcgaagagatcaattttaatgaggtagaaaaagaaggctactttgcctttaaatgtcttggagatagggcttttgagggtatttctctttccttcaaggagggggaaggatattttatatctccttttgatttcaataatgagataagaaagaagattgaaaatataatttcttcagagaatgttaaaaaaattggctcttatattcaaagagatttacattttttaaactgtaaaataaagggcgatgtatttgatgttagtctcgcatcttatcttttgaaccctgaaagacaaaatcactctcttgatattttgataggagagtatctaaataaaacctcttttattcctcaaaaatacgctggttatctttttccgttaaagtctattcttgaggagaggataaagaatgaagggttagaatttgtactttataacatagagattccattaatccctgtactttactccatggagaagtgggggataaaggtagataaggaatatttaaaacagctttctgatgaattctgcgagagaattaaaaaattggaagaagagatatatgaacttgcaggaaccagatttaatctcaattctccaaaacaactttctgaagttttatttgagaggttaaaacttccttctggtaagaaaggaaaaacaggatattctacgtcgtcttctgtgcttcaaaacttaataaatgctcatcctatagtgagaaaaatcctccaatatagagaactctataaattgaagagtacttatgtggatgctattcctaatctggttaatccacaaacaggtagagttcatacaaaatttaatcctacaggtacagctacaggaagaataagtagtagtgaacctaatcttcagaatattcctataaaaagtgaagaaggtagaaagataagaagagccttcgtgtcagaagatggatattttcttgtatctcttgattattctcagatagagctaaggattatggctcatctttctcaggagcctaaattaatatctgccttccaaaaaggagaggatattcatagaagaacagcatcggagatttttggagtgccagaggaagaagttgatgatcttttaaggtcaagggcaaaggccgttaattttggaattatttatggtatctcttcttttggactttctgagactgtaagtattacaccagaagaggcagagaaatttatagactcgtattttaagcactatccaagagtgaagctttttatagataagactattcatgaggcaagagaaaaactgtacgttaaaaccttatttggcagaaaaagatatattcctgaggataagagcataaataaacaggtaaggaatgcctatgaaaggatagcaataaatgcgccaattcagggaacagctgctgatattataaaacttgccatgatagaaatttacaaggagattgaaaataaaaatctcaagtcaagaatactccttcaaattcatgatgagcttattcttgaagtgccagaggaggagatggaatttactcctttaatggcaaaggaaaaaatggaaaaggtggtagaactttcggttcctcttgtagttgaaatctcggtaggtaaaaatcttgctgaattaaaatgagctataagattggtcgac

SEQ ID NO: 2009 - DNA, 2673 bp, Artificial Sequence
  Description of Artificial Sequence: Synthetic DNA sequence of Dictyoglomus thermophilum DNA I784C
atgaaatacctgctgccgaccgctgctgctggtctgctgctcctcgctgcccagccggcgatggccatggatatcggaattaattcggatccgaaatctctgtgggatctttttcaagaaaataccgagaaagagtccaaaaggaagattctgattattgatggctcaagcctcatatacagggtttattacgcccttccccctttaaagacaaaaaatggtgaattaactaatgctctttatggcttcataagaatacttttaaaggccgtagaagattttaatcctgatcttgtaggcgttgcctttgatagacctgaacctacttttaggcatgtgatttataaagagtataaggctaagagaccacctatgaaggatgatttgaaagcgcagataccatggataagagaatttctaaggttaaatgatatacctctattggaagagcctggctatgaagcggatgatataatagctactatagtgaataaatataaggatgatttaaaatatattctctctggagatttagatcttttgcaattagtctcggacaaaacctttctaatacatcctcaaaagggaattactgagtttactatttatgatccaaaagctgtaaaggataggtttggagtagagccctataagattcccttatacaaagtattagtaggggacgaatctgataatattccaggagtaaatggaataggtcctaaaaaggcctcaaagattcttgagaaaatttcaagtgtagatgaatttaaaagtaaaataaaagttttggatagtgatttaagggagcttattgagaaaaattggaatattattgaaagaaatttagaacttgttactttaaaaaatatagataaggatcttattcttaaacccttcgagattaaaagagatgaaaaagtaatagattttttgaagagatatgaacttaagagtattcttcaaaagttatttcctgatcttcaagaggaagaaaatatagagattaaagatgtcgaagagatcaattttaatgaggtagaaaaagaaggctactttgcctttaaatgtcttggagatagggcttttgagggtatttctctttccttcaaggagggggaaggatattttatatctccttttgatttcaataatgagataagaaagaagattgaaaatataatttcttcagagaatgttaaaaaaattggctcttatattcaaagagatttacattttttaaactgtaaaataaagggcgatgtatttgatgttagtctcgcatcttatcttttgaaccctgaaagacaaaatcactctcttgatattttgataggagagtatctaaataaaacctcttttattcctcaaaaatacgctggttatctttttccgttaaagtctattcttgaggagaggataaagaatgaagggttagaatttgtactttataacatagagattccattaatccctgtactttactccatggagaagtgggggataaaggtagataaggaatatttaaaacagctttctgatgaattctgcgagagaattaaaaaattggaagaagagatatatgaacttgcaggaaccagatttaatctcaattctccaaaacaactttctgaagttttatttgagaggttaaaacttccttctggtaagaaaggaaaaacaggatattctacgtcgtcttctgtgcttcaaaacttaataaatgctcatcctatagtgagaaaaatcctccaatatagagaactctataaattgaagagtacttatgtggatgctattcctaatctggttaatccacaaacaggtagagttcatacaaaatttaatcctacaggtacagctacaggaagaataagtagtagtgaacctaatcttcagaatattcctataaaaagtgaagaaggtagaaagataagaagagccttcgtgtcagaagatggatattttcttgtatctcttgattattctcagatagagctaaggattatggctcatctttctcaggagcctaaattaatatctgccttccaaaaaggagaggatattcatagaagaacagcatcggagatttttggagtgccagaggaagaagttgatgatcttttaaggtcaagggcaaaggccgttaattttggaattatttatggtatctcttcttttggactttctgagactgtaagtattacaccagaagaggcagagaaatttatagactcgtattttaagcactatccaagagtgaagctttttatagataagactattcatgaggcaagagaaaaactgtacgttaaaaccttatttggcagaaaaagatatattcctgagtgtaagagcataaataaacaggtaaggaatgcctatgaaaggatagcaataaatgcgccaattcagggaacagctgctgatattataaaacttgccatgatagaaatttacaaggagattgaaaataaaaatctcaagtcaagaatactccttcaaattcatgatgagcttattcttgaagtgccagaggaggagatggaatttactcctttaatggcaaaggaaaaaatggaaaaggtggtagaactttcggttcctcttgtagttgaaatctcggtaggtaaaaatcttgctgaattaaaatgagctataagattggtcgac

SEQ ID NO: 2010 - DNA, 2673 bp, Artificial Sequence
  Description of Artificial Sequence: Synthetic DNA sequence of Dictyoglomus thermophilum DNA I784E
atgaaatacctgctgccgaccgctgctgctggtctgctgctcctcgctgcccagccggcgatggccatggatatcggaattaattcggatccgaaatctctgtgggatctttttcaagaaaataccgagaaagagtccaaaaggaagattctgattattgatggctcaagcctcatatacagggtttattacgcccttccccctttaaagacaaaaaatggtgaattaactaatgctctttatggcttcataagaatacttttaaaggccgtagaagattttaatcctgatcttgtaggcgttgcctttgatagacctgaacctacttttaggcatgtgatttataaagagtataaggctaagagaccacctatgaaggatgatttgaaagcgcagataccatggataagagaatttctaaggttaaatgatatacctctattggaagagcctggctatgaagcggatgatataatagctactatagtgaataaatataaggatgatttaaaatatattctctctggagatttagatcttttgcaattagtctcggacaaaacctttctaatacatcctcaaaagggaattactgagtttactatttatgatccaaaagctgtaaaggataggtttggagtagagccctataagattcccttatacaaagtattagtaggggacgaatctgataatattccaggagtaaatggaataggtcctaaaaaggcctcaaagattcttgagaaaatttcaagtgtagatgaatttaaaagtaaaataaaagttttggatagtgatttaagggagcttattgagaaaaattggaatattattgaaagaaatttagaacttgttactttaaaaaatatagataaggatcttattcttaaacccttcgagattaaaagagatgaaaaagtaatagattttttgaagagatatgaacttaagagtattcttcaaaagttatttcctgatcttcaagaggaagaaaatatagagattaaagatgtcgaagagatcaattttaatgaggtagaaaaagaaggctactttgcctttaaatgtcttggagatagggcttttgagggtatttctctttccttcaaggagggggaaggatattttatatctccttttgatttcaataatgagataagaaagaagattgaaaatataatttcttcagagaatgttaaaaaaattggctcttatattcaaagagatttacattttttaaactgtaaaataaagggcgatgtatttgatgttagtctcgcatcttatcttttgaaccctgaaagacaaaatcactctcttgatattttgataggagagtatctaaataaaacctcttttattcctcaaaaatacgctggttatctttttccgttaaagtctattcttgaggagaggataaagaatgaagggttagaatttgtactttataacatagagattccattaatccctgtactttactccatggagaagtgggggataaaggtagataaggaatatttaaaacagctttctgatgaattctgcgagagaattaaaaaattggaagaagagatatatgaacttgcaggaaccagatttaatctcaattctccaaaacaactttctgaagttttatttgagaggttaaaacttccttctggtaagaaaggaaaaacaggatattctacgtcgtcttctgtgcttcaaaacttaataaatgctcatcctatagtgagaaaaatcctccaatatagagaactctataaattgaagagtacttatgtggatgctattcctaatctggttaatccacaaacaggtagagttcatacaaaatttaatcctacaggtacagctacaggaagaataagtagtagtgaacctaatcttcagaatattcctataaaaagtgaagaaggtagaaagataagaagagccttcgtgtcagaagatggatattttcttgtatctcttgattattctcagatagagctaaggattatggctcatctttctcaggagcctaaattaatatctgccttccaaaaaggagaggatattcatagaagaacagcatcggagatttttggagtgccagaggaagaagttgatgatcttttaaggtcaagggcaaaggccgttaattttggaattatttatggtatctcttcttttggactttctgagactgtaagtattacaccagaagaggcagagaaatttatagactcgtattttaagcactatccaagagtgaagctttttatagataagactattcatgaggcaagagaaaaactgtacgttaaaaccttatttggcagaaaaagatatattcctgaggaaaagagcataaataaacaggtaaggaatgcctatgaaaggatagcaataaatgcgccaattcagggaacagctgctgatattataaaacttgccatgatagaaatttacaaggagattgaaaataaaaatctcaagtcaagaatactccttcaaattcatgatgagcttattcttgaagtgccagaggaggagatggaatttactcctttaatggcaaaggaaaaaatggaaaaggtggtagaactttcggttcctcttgtagttgaaatctcggtaggtaaaaatcttgctgaattaaaatgagctataagattggtcgac

SEQ ID NO: 2011 - DNA, 2673 bp, Artificial Sequence
  Description of Artificial Sequence: Synthetic DNA sequence of Dictyoglomus thermophilum DNA I784Q
atgaaatacctgctgccgaccgctgctgctggtctgctgctcctcgctgcccagccggcgatggccatggatatcggaattaattcggatccgaaatctctgtgggatctttttcaagaaaataccgagaaagagtccaaaaggaagattctgattattgatggctcaagcctcatatacagggtttattacgcccttccccctttaaagacaaaaaatggtgaattaactaatgctctttatggcttcataagaatacttttaaaggccgtagaagattttaatcctgatcttgtaggcgttgcctttgatagacctgaacctacttttaggcatgtgatttataaagagtataaggctaagagaccacctatgaaggatgatttgaaagcgcagataccatggataagagaatttctaaggttaaatgatatacctctattggaagagcctggctatgaagcggatgatataatagctactatagtgaataaatataaggatgatttaaaatatattctctctggagatttagatcttttgcaattagtctcggacaaaacctttctaatacatcctcaaaagggaattactgagtttactatttatgatccaaaagctgtaaaggataggtttggagtagagccctataagattcccttatacaaagtattagtaggggacgaatctgataatattccaggagtaaatggaataggtcctaaaaaggcctcaaagattcttgagaaaatttcaagtgtagatgaatttaaaagtaaaataaaagttttggatagtgatttaagggagcttattgagaaaaattggaatattattgaaagaaatttagaacttgttactttaaaaaatatagataaggatcttattcttaaacccttcgagattaaaagagatgaaaaagtaatagattttttgaagagatatgaacttaagagtattcttcaaaagttatttcctgatcttcaagaggaagaaaatatagagattaaagatgtcgaagagatcaattttaatgaggtagaaaaagaaggctactttgcctttaaatgtcttggagatagggcttttgagggtatttctctttccttcaaggagggggaaggatattttatatctccttttgatttcaataatgagataagaaagaagattgaaaatataatttcttcagagaatgttaaaaaaattggctcttatattcaaagagatttacattttttaaactgtaaaataaagggcgatgtatttgatgttagtctcgcatcttatcttttgaaccctgaaagacaaaatcactctcttgatattttgataggagagtatctaaataaaacctcttttattcctcaaaaatacgctggttatctttttccgttaaagtctattcttgaggagaggataaagaatgaagggttagaatttgtactttataacatagagattccattaatccctgtactttactccatggagaagtgggggataaaggtagataaggaatatttaaaacagctttctgatgaattctgcgagagaattaaaaaattggaagaagagatatatgaacttgcaggaaccagatttaatctcaattctccaaaacaactttctgaagttttatttgagaggttaaaacttccttctggtaagaaaggaaaaacaggatattctacgtcgtcttctgtgcttcaaaacttaataaatgctcatcctatagtgagaaaaatcctccaatatagagaactctataaattgaagagtacttatgtggatgctattcctaatctggttaatccacaaacaggtagagttcatacaaaatttaatcctacaggtacagctacaggaagaataagtagtagtgaacctaatcttcagaatattcctataaaaagtgaagaaggtagaaagataagaagagccttcgtgtcagaagatggatattttcttgtatctcttgattattctcagatagagctaaggattatggctcatctttctcaggagcctaaattaatatctgccttccaaaaaggagaggatattcatagaagaacagcatcggagatttttggagtgccagaggaagaagttgatgatcttttaaggtcaagggcaaaggccgttaattttggaattatttatggtatctcttcttttggactttctgagactgtaagtattacaccagaagaggcagagaaatttatagactcgtattttaagcactatccaagagtgaagctttttatagataagactattcatgaggcaagagaaaaactgtacgttaaaaccttatttggcagaaaaagatatattcctgagcaaaagagcataaataaacaggtaaggaatgcctatgaaaggatagcaataaatgcgccaattcagggaacagctgctgatattataaaacttgccatgatagaaatttacaaggagattgaaaataaaaatctcaagtcaagaatactccttcaaattcatgatgagcttattcttgaagtgccagaggaggagatggaatttactcctttaatggcaaaggaaaaaatggaaaaggtggtagaactttcggttcctcttgtagttgaaatctcggtaggtaaaaatcttgctgaattaaaatgagctataagattggtcgac

SEQ ID NO: 2012 - DNA, 2673 bp, Artificial Sequence
  Description of Artificial Sequence: Synthetic DNA sequence of Dictyoglomus thermophilum DNA I784G
atgaaatacctgctgccgaccgctgctgctggtctgctgctcctcgctgcccagccggcgatggccatggatatcggaattaattcggatccgaaatctctgtgggatctttttcaagaaaataccgagaaagagtccaaaaggaagattctgattattgatggctcaagcctcatatacagggtttattacgcccttccccctttaaagacaaaaaatggtgaattaactaatgctctttatggcttcataagaatacttttaaaggccgtagaagattttaatcctgatcttgtaggcgttgcctttgatagacctgaacctacttttaggcatgtgatttataaagagtataaggctaagagaccacctatgaaggatgatttgaaagcgcagataccatggataagagaatttctaaggttaaatgatatacctctattggaagagcctggctatgaagcggatgatataatagctactatagtgaataaatataaggatgatttaaaatatattctctctggagatttagatcttttgcaattagtctcggacaaaacctttctaatacatcctcaaaagggaattactgagtttactatttatgatccaaaagctgtaaaggataggtttggagtagagccctataagattcccttatacaaagtattagtaggggacgaatctgataatattccaggagtaaatggaataggtcctaaaaaggcctcaaagattcttgagaaaatttcaagtgtagatgaatttaaaagtaaaataaaagttttggatagtgatttaagggagcttattgagaaaaattggaatattattgaaagaaatttagaacttgttactttaaaaaatatagataaggatcttattcttaaacccttcgagattaaaagagatgaaaaagtaatagattttttgaagagatatgaacttaagagtattcttcaaaagttatttcctgatcttcaagaggaagaaaatatagagattaaagatgtcgaagagatcaattttaatgaggtagaaaaagaaggctactttgcctttaaatgtcttggagatagggcttttgagggtatttctctttccttcaaggagggggaaggatattttatatctccttttgatttcaataatgagataagaaagaagattgaaaatataatttcttcagagaatgttaaaaaaattggctcttatattcaaagagatttacattttttaaactgtaaaataaagggcgatgtatttgatgttagtctcgcatcttatcttttgaaccctgaaagacaaaatcactctcttgatattttgataggagagtatctaaataaaacctcttttattcctcaaaaatacgctggttatctttttccgttaaagtctattcttgaggagaggataaagaatgaagggttagaatttgtactttataacatagagattccattaatccctgtactttactccatggagaagtgggggataaaggtagataaggaatatttaaaacagctttctgatgaattctgcgagagaattaaaaaattggaagaagagatatatgaacttgcaggaaccagatttaatctcaattctccaaaacaactttctgaagttttatttgagaggttaaaacttccttctggtaagaaaggaaaaacaggatattctacgtcgtcttctgtgcttcaaaacttaataaatgctcatcctatagtgagaaaaatcctccaatatagagaactctataaattgaagagtacttatgtggatgctattcctaatctggttaatccacaaacaggtagagttcatacaaaatttaatcctacaggtacagctacaggaagaataagtagtagtgaacctaatcttcagaatattcctataaaaagtgaagaaggtagaaagataagaagagccttcgtgtcagaagatggatattttcttgtatctcttgattattctcagatagagctaaggattatggctcatctttctcaggagcctaaattaatatctgccttccaaaaaggagaggatattcatagaagaacagcatcggagatttttggagtgccagaggaagaagttgatgatcttttaaggtcaagggcaaaggccgttaattttggaattatttatggtatctcttcttttggactttctgagactgtaagtattacaccagaagaggcagagaaatttatagactcgtattttaagcactatccaagagtgaagctttttatagataagactattcatgaggcaagagaaaaactgtacgttaaaaccttatttggcagaaaaagatatattcctgagggtaagagcataaataaacaggtaaggaatgcctatgaaaggatagcaataaatgcgccaattcagggaacagctgctgatattataaaacttgccatgatagaaatttacaaggagattgaaaataaaaatctcaagtcaagaatactccttcaaattcatgatgagcttattcttgaagtgccagaggaggagatggaatttactcctttaatggcaaaggaaaaaatggaaaaggtggtagaactttcggttcctcttgtagttgaaatctcggtaggtaaaaatcttgctgaattaaaatgagctataagattggtcgac

SEQ ID NO: 2013 - DNA, 2673 bp, Artificial Sequence
  Description of Artificial Sequence: Synthetic DNA sequence of Dictyoglomus thermophilum DNA I784H
atgaaatacctgctgccgaccgctgctgctggtctgctgctcctcgctgcccagccggcgatggccatggatatcggaattaattcggatccgaaatctctgtgggatctttttcaagaaaataccgagaaagagtccaaaaggaagattctgattattgatggctcaagcctcatatacagggtttattacgcccttccccctttaaagacaaaaaatggtgaattaactaatgctctttatggcttcataagaatacttttaaaggccgtagaagattttaatcctgatcttgtaggcgttgcctttgatagacctgaacctacttttaggcatgtgatttataaagagtataaggctaagagaccacctatgaaggatgatttgaaagcgcagataccatggataagagaatttctaaggttaaatgatatacctctattggaagagcctggctatgaagcggatgatataatagctactatagtgaataaatataaggatgatttaaaatatattctctctggagatttagatcttttgcaattagtctcggacaaaacctttctaatacatcctcaaaagggaattactgagtttactatttatgatccaaaagctgtaaaggataggtttggagtagagccctataagattcccttatacaaagtattagtaggggacgaatctgataatattccaggagtaaatggaataggtcctaaaaaggcctcaaagattcttgagaaaatttcaagtgtagatgaatttaaaagtaaaataaaagttttggatagtgatttaagggagcttattgagaaaaattggaatattattgaaagaaatttagaacttgttactttaaaaaatatagataaggatcttattcttaaacccttcgagattaaaagagatgaaaaagtaatagattttttgaagagatatgaacttaagagtattcttcaaaagttatttcctgatcttcaagaggaagaaaatatagagattaaagatgtcgaagagatcaattttaatgaggtagaaaaagaaggctactttgcctttaaatgtcttggagatagggcttttgagggtatttctctttccttcaaggagggggaaggatattttatatctccttttgatttcaataatgagataagaaagaagattgaaaatataatttcttcagagaatgttaaaaaaattggctcttatattcaaagagatttacattttttaaactgtaaaataaagggcgatgtatttgatgttagtctcgcatcttatcttttgaaccctgaaagacaaaatcactctcttgatattttgataggagagtatctaaataaaacctcttttattcctcaaaaatacgctggttatctttttccgttaaagtctattcttgaggagaggataaagaatgaagggttagaatttgtactttataacatagagattccattaatccctgtactttactccatggagaagtgggggataaaggtagataaggaatatttaaaacagctttctgatgaattctgcgagagaattaaaaaattggaagaagagatatatgaacttgcaggaaccagatttaatctcaattctccaaaacaactttctgaagttttatttgagaggttaaaacttccttctggtaagaaaggaaaaacaggatattctacgtcgtcttctgtgcttcaaaacttaataaatgctcatcctatagtgagaaaaatcctccaatatagagaactctataaattgaagagtacttatgtggatgctattcctaatctggttaatccacaaacaggtagagttcatacaaaatttaatcctacaggtacagctacaggaagaataagtagtagtgaacctaatcttcagaatattcctataaaaagtgaagaaggtagaaagataagaagagccttcgtgtcagaagatggatattttcttgtatctcttgattattctcagatagagctaaggattatggctcatctttctcaggagcctaaattaatatctgccttccaaaaaggagaggatattcatagaagaacagcatcggagatttttggagtgccagaggaagaagttgatgatcttttaaggtcaagggcaaaggccgttaattttggaattatttatggtatctcttcttttggactttctgagactgtaagtattacaccagaagaggcagagaaatttatagactcgtattttaagcactatccaagagtgaagctttttatagataagactattcatgaggcaagagaaaaactgtacgttaaaaccttatttggcagaaaaagatatattcctgagcataagagcataaataaacaggtaaggaatgcctatgaaaggatagcaataaatgcgccaattcagggaacagctgctgatattataaaacttgccatgatagaaatttacaaggagattgaaaataaaaatctcaagtcaagaatactccttcaaattcatgatgagcttattcttgaagtgccagaggaggagatggaatttactcctttaatggcaaaggaaaaaatggaaaaggtggtagaactttcggttcctcttgtagttgaaatctcggtaggtaaaaatcttgctgaattaaaatgagctataagattggtcgac

SEQ ID NO: 2014 - DNA, 2673 bp, Artificial Sequence
  Description of Artificial Sequence: Synthetic DNA sequence of Dictyoglomus thermophilum DNA I784L
atgaaatacctgctgccgaccgctgctgctggtctgctgctcctcgctgcccagccggcgatggccatggatatcggaattaattcggatccgaaatctctgtgggatctttttcaagaaaataccgagaaagagtccaaaaggaagattctgattattgatggctcaagcctcatatacagggtttattacgcccttccccctttaaagacaaaaaatggtgaattaactaatgctctttatggcttcataagaatacttttaaaggccgtagaagattttaatcctgatcttgtaggcgttgcctttgatagacctgaacctacttttaggcatgtgatttataaagagtataaggctaagagaccacctatgaaggatgatttgaaagcgcagataccatggataagagaatttctaaggttaaatgatatacctctattggaagagcctggctatgaagcggatgatataatagctactatagtgaataaatataaggatgatttaaaatatattctctctggagatttagatcttttgcaattagtctcggacaaaacctttctaatacatcctcaaaagggaattactgagtttactatttatgatccaaaagctgtaaaggataggtttggagtagagccctataagattcccttatacaaagtattagtaggggacgaatctgataatattccaggagtaaatggaataggtcctaaaaaggcctcaaagattcttgagaaaatttcaagtgtagatgaatttaaaagtaaaataaaagttttggatagtgatttaagggagcttattgagaaaaattggaatattattgaaagaaatttagaacttgttactttaaaaaatatagataaggatcttattcttaaacccttcgagattaaaagagatgaaaaagtaatagattttttgaagagatatgaacttaagagtattcttcaaaagttatttcctgatcttcaagaggaagaaaatatagagattaaagatgtcgaagagatcaattttaatgaggtagaaaaagaaggctactttgcctttaaatgtcttggagatagggcttttgagggtatttctctttccttcaaggagggggaaggatattttatatctccttttgatttcaataatgagataagaaagaagattgaaaatataatttcttcagagaatgttaaaaaaattggctcttatattcaaagagatttacattttttaaactgtaaaataaagggcgatgtatttgatgttagtctcgcatcttatcttttgaaccctgaaagacaaaatcactctcttgatattttgataggagagtatctaaataaaacctcttttattcctcaaaaatacgctggttatctttttccgttaaagtctattcttgaggagaggataaagaatgaagggttagaatttgtactttataacatagagattccattaatccctgtactttactccatggagaagtgggggataaaggtagataaggaatatttaaaacagctttctgatgaattctgcgagagaattaaaaaattggaagaagagatatatgaacttgcaggaaccagatttaatctcaattctccaaaacaactttctgaagttttatttgagaggttaaaacttccttctggtaagaaaggaaaaacaggatattctacgtcgtcttctgtgcttcaaaacttaataaatgctcatcctatagtgagaaaaatcctccaatatagagaactctataaattgaagagtacttatgtggatgctattcctaatctggttaatccacaaacaggtagagttcatacaaaatttaatcctacaggtacagctacaggaagaataagtagtagtgaacctaatcttcagaatattcctataaaaagtgaagaaggtagaaagataagaagagccttcgtgtcagaagatggatattttcttgtatctcttgattattctcagatagagctaaggattatggctcatctttctcaggagcctaaattaatatctgccttccaaaaaggagaggatattcatagaagaacagcatcggagatttttggagtgccagaggaagaagttgatgatcttttaaggtcaagggcaaaggccgttaattttggaattatttatggtatctcttcttttggactttctgagactgtaagtattacaccagaagaggcagagaaatttatagactcgtattttaagcactatccaagagtgaagctttttatagataagactattcatgaggcaagagaaaaactgtacgttaaaaccttatttggcagaaaaagatatattcctgagcttaagagcataaataaacaggtaaggaatgcctatgaaaggatagcaataaatgcgccaattcagggaacagctgctgatattataaaacttgccatgatagaaatttacaaggagattgaaaataaaaatctcaagtcaagaatactccttcaaattcatgatgagcttattcttgaagtgccagaggaggagatggaatttactcctttaatggcaaaggaaaaaatggaaaaggtggtagaactttcggttcctcttgtagttgaaatctcggtaggtaaaaatcttgctgaattaaaatgagctataagattggtcgac

SEQ ID NO: 2015 - DNA, 2673 bp, Artificial Sequence
  Description of Artificial Sequence: Synthetic DNA sequence of Dictyoglomus thermophilum DNA I784K
atgaaatacctgctgccgaccgctgctgctggtctgctgctcctcgctgcccagccggcgatggccatggatatcggaattaattcggatccgaaatctctgtgggatctttttcaagaaaataccgagaaagagtccaaaaggaagattctgattattgatggctcaagcctcatatacagggtttattacgcccttccccctttaaagacaaaaaatggtgaattaactaatgctctttatggcttcataagaatacttttaaaggccgtagaagattttaatcctgatcttgtaggcgttgcctttgatagacctgaacctacttttaggcatgtgatttataaagagtataaggctaagagaccacctatgaaggatgatttgaaagcgcagataccatggataagagaatttctaaggttaaatgatatacctctattggaagagcctggctatgaagcggatgatataatagctactatagtgaataaatataaggatgatttaaaatatattctctctggagatttagatcttttgcaattagtctcggacaaaacctttctaatacatcctcaaaagggaattactgagtttactatttatgatccaaaagctgtaaaggataggtttggagtagagccctataagattcccttatacaaagtattagtaggggacgaatctgataatattccaggagtaaatggaataggtcctaaaaaggcctcaaagattcttgagaaaatttcaagtgtagatgaatttaaaagtaaaataaaagttttggatagtgatttaagggagcttattgagaaaaattggaatattattgaaagaaatttagaacttgttactttaaaaaatatagataaggatcttattcttaaacccttcgagattaaaagagatgaaaaagtaatagattttttgaagagatatgaacttaagagtattcttcaaaagttatttcctgatcttcaagaggaagaaaatatagagattaaagatgtcgaagagatcaattttaatgaggtagaaaaagaaggctactttgcctttaaatgtcttggagatagggcttttgagggtatttctctttccttcaaggagggggaaggatattttatatctccttttgatttcaataatgagataagaaagaagattgaaaatataatttcttcagagaatgttaaaaaaattggctcttatattcaaagagatttacattttttaaactgtaaaataaagggcgatgtatttgatgttagtctcgcatcttatcttttgaaccctgaaagacaaaatcactctcttgatattttgataggagagtatctaaataaaacctcttttattcctcaaaaatacgctggttatctttttccgttaaagtctattcttgaggagaggataaagaatgaagggttagaatttgtactttataacatagagattccattaatccctgtactttactccatggagaagtgggggataaaggtagataaggaatatttaaaacagctttctgatgaattctgcgagagaattaaaaaattggaagaagagatatatgaacttgcaggaaccagatttaatctcaattctccaaaacaactttctgaagttttatttgagaggttaaaacttccttctggtaagaaaggaaaaacaggatattctacgtcgtcttctgtgcttcaaaacttaataaatgctcatcctatagtgagaaaaatcctccaatatagagaactctataaattgaagagtacttatgtggatgctattcctaatctggttaatccacaaacaggtagagttcatacaaaatttaatcctacaggtacagctacaggaagaataagtagtagtgaacctaatcttcagaatattcctataaaaagtgaagaaggtagaaagataagaagagccttcgtgtcagaagatggatattttcttgtatctcttgattattctcagatagagctaaggattatggctcatctttctcaggagcctaaattaatatctgccttccaaaaaggagaggatattcatagaagaacagcatcggagatttttggagtgccagaggaagaagttgatgatcttttaaggtcaagggcaaaggccgttaattttggaattatttatggtatctcttcttttggactttctgagactgtaagtattacaccagaagaggcagagaaatttatagactcgtattttaagcactatccaagagtgaagctttttatagataagactattcatgaggcaagagaaaaactgtacgttaaaaccttatttggcagaaaaagatatattcctgagaaaaagagcataaataaacaggtaaggaatgcctatgaaaggatagcaataaatgcgccaattcagggaacagctgctgatattataaaacttgccatgatagaaatttacaaggagattgaaaataaaaatctcaagtcaagaatactccttcaaattcatgatgagcttattcttgaagtgccagaggaggagatggaatttactcctttaatggcaaaggaaaaaatggaaaaggtggtagaactttcggttcctcttgtagttgaaatctcggtaggtaaaaatcttgctgaattaaaatgagctataagattggtcgac

SEQ ID NO: 2016 - DNA, 2673 bp, Artificial Sequence
  Description of Artificial Sequence: Synthetic DNA sequence of Dictyoglomus thermophilum DNA I784M
atgaaatacctgctgccgaccgctgctgctggtctgctgctcctcgctgcccagccggcgatggccatggatatcggaattaattcggatccgaaatctctgtgggatctttttcaagaaaataccgagaaagagtccaaaaggaagattctgattattgatggctcaagcctcatatacagggtttattacgcccttccccctttaaagacaaaaaatggtgaattaactaatgctctttatggcttcataagaatacttttaaaggccgtagaagattttaatcctgatcttgtaggcgttgcctttgatagacctgaacctacttttaggcatgtgatttataaagagtataaggctaagagaccacctatgaaggatgatttgaaagcgcagataccatggataagagaatttctaaggttaaatgatatacctctattggaagagcctggctatgaagcggatgatataatagctactatagtgaataaatataaggatgatttaaaatatattctctctggagatttagatcttttgcaattagtctcggacaaaacctttctaatacatcctcaaaagggaattactgagtttactatttatgatccaaaagctgtaaaggataggtttggagtagagccctataagattcccttatacaaagtattagtaggggacgaatctgataatattccaggagtaaatggaataggtcctaaaaaggcctcaaagattcttgagaaaatttcaagtgtagatgaatttaaaagtaaaataaaagttttggatagtgatttaagggagcttattgagaaaaattggaatattattgaaagaaatttagaacttgttactttaaaaaatatagataaggatcttattcttaaacccttcgagattaaaagagatgaaaaagtaatagattttttgaagagatatgaacttaagagtattcttcaaaagttatttcctgatcttcaagaggaagaaaatatagagattaaagatgtcgaagagatcaattttaatgaggtagaaaaagaaggctactttgcctttaaatgtcttggagatagggcttttgagggtatttctctttccttcaaggagggggaaggatattttatatctccttttgatttcaataatgagataagaaagaagattgaaaatataatttcttcagagaatgttaaaaaaattggctcttatattcaaagagatttacattttttaaactgtaaaataaagggcgatgtatttgatgttagtctcgcatcttatcttttgaaccctgaaagacaaaatcactctcttgatattttgataggagagtatctaaataaaacctcttttattcctcaaaaatacgctggttatctttttccgttaaagtctattcttgaggagaggataaagaatgaagggttagaatttgtactttataacatagagattccattaatccctgtactttactccatggagaagtgggggataaaggtagataaggaatatttaaaacagctttctgatgaattctgcgagagaattaaaaaattggaagaagagatatatgaacttgcaggaaccagatttaatctcaattctccaaaacaactttctgaagttttatttgagaggttaaaacttccttctggtaagaaaggaaaaacaggatattctacgtcgtcttctgtgcttcaaaacttaataaatgctcatcctatagtgagaaaaatcctccaatatagagaactctataaattgaagagtacttatgtggatgctattcctaatctggttaatccacaaacaggtagagttcatacaaaatttaatcctacaggtacagctacaggaagaataagtagtagtgaacctaatcttcagaatattcctataaaaagtgaagaaggtagaaagataagaagagccttcgtgtcagaagatggatattttcttgtatctcttgattattctcagatagagctaaggattatggctcatctttctcaggagcctaaattaatatctgccttccaaaaaggagaggatattcatagaagaacagcatcggagatttttggagtgccagaggaagaagttgatgatcttttaaggtcaagggcaaaggccgttaattttggaattatttatggtatctcttcttttggactttctgagactgtaagtattacaccagaagaggcagagaaatttatagactcgtattttaagcactatccaagagtgaagctttttatagataagactattcatgaggcaagagaaaaactgtacgttaaaaccttatttggcagaaaaagatatattcctgagatgaagagcataaataaacaggtaaggaatgcctatgaaaggatagcaataaatgcgccaattcagggaacagctgctgatattataaaacttgccatgatagaaatttacaaggagattgaaaataaaaatctcaagtcaagaatactccttcaaattcatgatgagcttattcttgaagtgccagaggaggagatggaatttactcctttaatggcaaaggaaaaaatggaaaaggtggtagaactttcggttcctcttgtagttgaaatctcggtaggtaaaaatcttgctgaattaaaatgagctataagattggtcgac

SEQ ID NO: 2017 - DNA, 2673 bp, Artificial Sequence
  Description of Artificial Sequence: Synthetic DNA sequence of Dictyoglomus thermophilum DNA I784F
atgaaatacctgctgccgaccgctgctgctggtctgctgctcctcgctgcccagccggcgatggccatggatatcggaattaattcggatccgaaatctctgtgggatctttttcaagaaaataccgagaaagagtccaaaaggaagattctgattattgatggctcaagcctcatatacagggtttattacgcccttccccctttaaagacaaaaaatggtgaattaactaatgctctttatggcttcataagaatacttttaaaggccgtagaagattttaatcctgatcttgtaggcgttgcctttgatagacctgaacctacttttaggcatgtgatttataaagagtataaggctaagagaccacctatgaaggatgatttgaaagcgcagataccatggataagagaatttctaaggttaaatgatatacctctattggaagagcctggctatgaagcggatgatataatagctactatagtgaataaatataaggatgatttaaaatatattctctctggagatttagatcttttgcaattagtctcggacaaaacctttctaatacatcctcaaaagggaattactgagtttactatttatgatccaaaagctgtaaaggataggtttggagtagagccctataagattcccttatacaaagtattagtaggggacgaatctgataatattccaggagtaaatggaataggtcctaaaaaggcctcaaagattcttgagaaaatttcaagtgtagatgaatttaaaagtaaaataaaagttttggatagtgatttaagggagcttattgagaaaaattggaatattattgaaagaaatttagaacttgttactttaaaaaatatagataaggatcttattcttaaacccttcgagattaaaagagatgaaaaagtaatagattttttgaagagatatgaacttaagagtattcttcaaaagttatttcctgatcttcaagaggaagaaaatatagagattaaagatgtcgaagagatcaattttaatgaggtagaaaaagaaggctactttgcctttaaatgtcttggagatagggcttttgagggtatttctctttccttcaaggagggggaaggatattttatatctccttttgatttcaataatgagataagaaagaagattgaaaatataatttcttcagagaatgttaaaaaaattggctcttatattcaaagagatttacattttttaaactgtaaaataaagggcgatgtatttgatgttagtctcgcatcttatcttttgaaccctgaaagacaaaatcactctcttgatattttgataggagagtatctaaataaaacctcttttattcctcaaaaatacgctggttatctttttccgttaaagtctattcttgaggagaggataaagaatgaagggttagaatttgtactttataacatagagattccattaatccctgtactttactccatggagaagtgggggataaaggtagataaggaatatttaaaacagctttctgatgaattctgcgagagaattaaaaaattggaagaagagatatatgaacttgcaggaaccagatttaatctcaattctccaaaacaactttctgaagttttatttgagaggttaaaacttccttctggtaagaaaggaaaaacaggatattctacgtcgtcttctgtgcttcaaaacttaataaatgctcatcctatagtgagaaaaatcctccaatatagagaactctataaattgaagagtacttatgtggatgctattcctaatctggttaatccacaaacaggtagagttcatacaaaatttaatcctacaggtacagctacaggaagaataagtagtagtgaacctaatcttcagaatattcctataaaaagtgaagaaggtagaaagataagaagagccttcgtgtcagaagatggatattttcttgtatctcttgattattctcagatagagctaaggattatggctcatctttctcaggagcctaaattaatatctgccttccaaaaaggagaggatattcatagaagaacagcatcggagatttttggagtgccagaggaagaagttgatgatcttttaaggtcaagggcaaaggccgttaattttggaattatttatggtatctcttcttttggactttctgagactgtaagtattacaccagaagaggcagagaaatttatagactcgtattttaagcactatccaagagtgaagctttttatagataagactattcatgaggcaagagaaaaactgtacgttaaaaccttatttggcagaaaaagatatattcctgagtttaagagcataaataaacaggtaaggaatgcctatgaaaggatagcaataaatgcgccaattcagggaacagctgctgatattataaaacttgccatgatagaaatttacaaggagattgaaaataaaaatctcaagtcaagaatactccttcaaattcatgatgagcttattcttgaagtgccagaggaggagatggaatttactcctttaatggcaaaggaaaaaatggaaaaggtggtagaactttcggttcctcttgtagttgaaatctcggtaggtaaaaatcttgctgaattaaaatgagctataagattggtcgac

SEQ ID NO: 2018 - DNA, 2673 bp, Artificial Sequence
  Description of Artificial Sequence: Synthetic DNA sequence of Dictyoglomus thermophilum DNA I784P
atgaaatacctgctgccgaccgctgctgctggtctgctgctcctcgctgcccagccggcgatggccatggatatcggaattaattcggatccgaaatctctgtgggatctttttcaagaaaataccgagaaagagtccaaaaggaagattctgattattgatggctcaagcctcatatacagggtttattacgcccttccccctttaaagacaaaaaatggtgaattaactaatgctctttatggcttcataagaatacttttaaaggccgtagaagattttaatcctgatcttgtaggcgttgcctttgatagacctgaacctacttttaggcatgtgatttataaagagtataaggctaagagaccacctatgaaggatgatttgaaagcgcagataccatggataagagaatttctaaggttaaatgatatacctctattggaagagcctggctatgaagcggatgatataatagctactatagtgaataaatataaggatgatttaaaatatattctctctggagatttagatcttttgcaattagtctcggacaaaacctttctaatacatcctcaaaagggaattactgagtttactatttatgatccaaaagctgtaaaggataggtttggagtagagccctataagattcccttatacaaagtattagtaggggacgaatctgataatattccaggagtaaatggaataggtcctaaaaaggcctcaaagattcttgagaaaatttcaagtgtagatgaatttaaaagtaaaataaaagttttggatagtgatttaagggagcttattgagaaaaattggaatattattgaaagaaatttagaacttgttactttaaaaaatatagataaggatcttattcttaaacccttcgagattaaaagagatgaaaaagtaatagattttttgaagagatatgaacttaagagtattcttcaaaagttatttcctgatcttcaagaggaagaaaatatagagattaaagatgtcgaagagatcaattttaatgaggtagaaaaagaaggctactttgcctttaaatgtcttggagatagggcttttgagggtatttctctttccttcaaggagggggaaggatattttatatctccttttgatttcaataatgagataagaaagaagattgaaaatataatttcttcagagaatgttaaaaaaattggctcttatattcaaagagatttacattttttaaactgtaaaataaagggcgatgtatttgatgttagtctcgcatcttatcttttgaaccctgaaagacaaaatcactctcttgatattttgataggagagtatctaaataaaacctcttttattcctcaaaaatacgctggttatctttttccgttaaagtctattcttgaggagaggataaagaatgaagggttagaatttgtactttataacatagagattccattaatccctgtactttactccatggagaagtgggggataaaggtagataaggaatatttaaaacagctttctgatgaattctgcgagagaattaaaaaattggaagaagagatatatgaacttgcaggaaccagatttaatctcaattctccaaaacaactttctgaagttttatttgagaggttaaaacttccttctggtaagaaaggaaaaacaggatattctacgtcgtcttctgtgcttcaaaacttaataaatgctcatcctatagtgagaaaaatcctccaatatagagaactctataaattgaagagtacttatgtggatgctattcctaatctggttaatccacaaacaggtagagttcatacaaaatttaatcctacaggtacagctacaggaagaataagtagtagtgaacctaatcttcagaatattcctataaaaagtgaagaaggtagaaagataagaagagccttcgtgtcagaagatggatattttcttgtatctcttgattattctcagatagagctaaggattatggctcatctttctcaggagcctaaattaatatctgccttccaaaaaggagaggatattcatagaagaacagcatcggagatttttggagtgccagaggaagaagttgatgatcttttaaggtcaagggcaaaggccgttaattttggaattatttatggtatctcttcttttggactttctgagactgtaagtattacaccagaagaggcagagaaatttatagactcgtattttaagcactatccaagagtgaagctttttatagataagactattcatgaggcaagagaaaaactgtacgttaaaaccttatttggcagaaaaagatatattcctgagcctaagagcataaataaacaggtaaggaatgcctatgaaaggatagcaataaatgcgccaattcagggaacagctgctgatattataaaacttgccatgatagaaatttacaaggagattgaaaataaaaatctcaagtcaagaatactccttcaaattcatgatgagcttattcttgaagtgccagaggaggagatggaatttactcctttaatggcaaaggaaaaaatggaaaaggtggtagaactttcggttcctcttgtagttgaaatctcggtaggtaaaaatcttgctgaattaaaatgagctataagattggtcgac

SEQ ID NO: 2019 - DNA, 2673 bp, Artificial Sequence
  Description of Artificial Sequence: Synthetic DNA sequence of Dictyoglomus thermophilum DNA I784S
atgaaatacctgctgccgaccgctgctgctggtctgctgctcctcgctgcccagccggcgatggccatggatatcggaattaattcggatccgaaatctctgtgggatctttttcaagaaaataccgagaaagagtccaaaaggaagattctgattattgatggctcaagcctcatatacagggtttattacgcccttccccctttaaagacaaaaaatggtgaattaactaatgctctttatggcttcataagaatacttttaaaggccgtagaagattttaatcctgatcttgtaggcgttgcctttgatagacctgaacctacttttaggcatgtgatttataaagagtataaggctaagagaccacctatgaaggatgatttgaaagcgcagataccatggataagagaatttctaaggttaaatgatatacctctattggaagagcctggctatgaagcggatgatataatagctactatagtgaataaatataaggatgatttaaaatatattctctctggagatttagatcttttgcaattagtctcggacaaaacctttctaatacatcctcaaaagggaattactgagtttactatttatgatccaaaagctgtaaaggataggtttggagtagagccctataagattcccttatacaaagtattagtaggggacgaatctgataatattccaggagtaaatggaataggtcctaaaaaggcctcaaagattcttgagaaaatttcaagtgtagatgaatttaaaagtaaaataaaagttttggatagtgatttaagggagcttattgagaaaaattggaatattattgaaagaaatttagaacttgttactttaaaaaatatagataaggatcttattcttaaacccttcgagattaaaagagatgaaaaagtaatagattttttgaagagatatgaacttaagagtattcttcaaaagttatttcctgatcttcaagaggaagaaaatatagagattaaagatgtcgaagagatcaattttaatgaggtagaaaaagaaggctactttgcctttaaatgtcttggagatagggcttttgagggtatttctctttccttcaaggagggggaaggatattttatatctccttttgatttcaataatgagataagaaagaagattgaaaatataatttcttcagagaatgttaaaaaaattggctcttatattcaaagagatttacattttttaaactgtaaaataaagggcgatgtatttgatgttagtctcgcatcttatcttttgaaccctgaaagacaaaatcactctcttgatattttgataggagagtatctaaataaaacctcttttattcctcaaaaatacgctggttatctttttccgttaaagtctattcttgaggagaggataaagaatgaagggttagaatttgtactttataacatagagattccattaatccctgtactttactccatggagaagtgggggataaaggtagataaggaatatttaaaacagctttctgatgaattctgcgagagaattaaaaaattggaagaagagatatatgaacttgcaggaaccagatttaatctcaattctccaaaacaactttctgaagttttatttgagaggttaaaacttccttctggtaagaaaggaaaaacaggatattctacgtcgtcttctgtgcttcaaaacttaataaatgctcatcctatagtgagaaaaatcctccaatatagagaactctataaattgaagagtacttatgtggatgctattcctaatctggttaatccacaaacaggtagagttcatacaaaatttaatcctacaggtacagctacaggaagaataagtagtagtgaacctaatcttcagaatattcctataaaaagtgaagaaggtagaaagataagaagagccttcgtgtcagaagatggatattttcttgtatctcttgattattctcagatagagctaaggattatggctcatctttctcaggagcctaaattaatatctgccttccaaaaaggagaggatattcatagaagaacagcatcggagatttttggagtgccagaggaagaagttgatgatcttttaaggtcaagggcaaaggccgttaattttggaattatttatggtatctcttcttttggactttctgagactgtaagtattacaccagaagaggcagagaaatttatagactcgtattttaagcactatccaagagtgaagctttttatagataagactattcatgaggcaagagaaaaactgtacgttaaaaccttatttggcagaaaaagatatattcctgagtctaagagcataaataaacaggtaaggaatgcctatgaaaggatagcaataaatgcgccaattcagggaacagctgctgatattataaaacttgccatgatagaaatttacaaggagattgaaaataaaaatctcaagtcaagaatactccttcaaattcatgatgagcttattcttgaagtgccagaggaggagatggaatttactcctttaatggcaaaggaaaaaatggaaaaggtggtagaactttcggttcctcttgtagttgaaatctcggtaggtaaaaatcttgctgaattaaaatgagctataagattggtcgac

SEQ ID NO: 2020 - DNA, 2673 bp, Artificial Sequence
  Description of Artificial Sequence: Synthetic DNA sequence of Dictyoglomus thermophilum DNA I784T
atgaaatacctgctgccgaccgctgctgctggtctgctgctcctcgctgcccagccggcgatggccatggatatcggaattaattcggatccgaaatctctgtgggatctttttcaagaaaataccgagaaagagtccaaaaggaagattctgattattgatggctcaagcctcatatacagggtttattacgcccttccccctttaaagacaaaaaatggtgaattaactaatgctctttatggcttcataagaatacttttaaaggccgtagaagattttaatcctgatcttgtaggcgttgcctttgatagacctgaacctacttttaggcatgtgatttataaagagtataaggctaagagaccacctatgaaggatgatttgaaagcgcagataccatggataagagaatttctaaggttaaatgatatacctctattggaagagcctggctatgaagcggatgatataatagctactatagtgaataaatataaggatgatttaaaatatattctctctggagatttagatcttttgcaattagtctcggacaaaacctttctaatacatcctcaaaagggaattactgagtttactatttatgatccaaaagctgtaaaggataggtttggagtagagccctataagattcccttatacaaagtattagtaggggacgaatctgataatattccaggagtaaatggaataggtcctaaaaaggcctcaaagattcttgagaaaatttcaagtgtagatgaatttaaaagtaaaataaaagttttggatagtgatttaagggagcttattgagaaaaattggaatattattgaaagaaatttagaacttgttactttaaaaaatatagataaggatcttattcttaaacccttcgagattaaaagagatgaaaaagtaatagattttttgaagagatatgaacttaagagtattcttcaaaagttatttcctgatcttcaagaggaagaaaatatagagattaaagatgtcgaagagatcaattttaatgaggtagaaaaagaaggctactttgcctttaaatgtcttggagatagggcttttgagggtatttctctttccttcaaggagggggaaggatattttatatctccttttgatttcaataatgagataagaaagaagattgaaaatataatttcttcagagaatgttaaaaaaattggctcttatattcaaagagatttacattttttaaactgtaaaataaagggcgatgtatttgatgttagtctcgcatcttatcttttgaaccctgaaagacaaaatcactctcttgatattttgataggagagtatctaaataaaacctcttttattcctcaaaaatacgctggttatctttttccgttaaagtctattcttgaggagaggataaagaatgaagggttagaatttgtactttataacatagagattccattaatccctgtactttactccatggagaagtgggggataaaggtagataaggaatatttaaaacagctttctgatgaattctgcgagagaattaaaaaattggaagaagagatatatgaacttgcaggaaccagatttaatctcaattctccaaaacaactttctgaagttttatttgagaggttaaaacttccttctggtaagaaaggaaaaacaggatattctacgtcgtcttctgtgcttcaaaacttaataaatgctcatcctatagtgagaaaaatcctccaatatagagaactctataaattgaagagtacttatgtggatgctattcctaatctggttaatccacaaacaggtagagttcatacaaaatttaatcctacaggtacagctacaggaagaataagtagtagtgaacctaatcttcagaatattcctataaaaagtgaagaaggtagaaagataagaagagccttcgtgtcagaagatggatattttcttgtatctcttgattattctcagatagagctaaggattatggctcatctttctcaggagcctaaattaatatctgccttccaaaaaggagaggatattcatagaagaacagcatcggagatttttggagtgccagaggaagaagttgatgatcttttaaggtcaagggcaaaggccgttaattttggaattatttatggtatctcttcttttggactttctgagactgtaagtattacaccagaagaggcagagaaatttatagactcgtattttaagcactatccaagagtgaagctttttatagataagactattcatgaggcaagagaaaaactgtacgttaaaaccttatttggcagaaaaagatatattcctgagactaagagcataaataaacaggtaaggaatgcctatgaaaggatagcaataaatgcgccaattcagggaacagctgctgatattataaaacttgccatgatagaaatttacaaggagattgaaaataaaaatctcaagtcaagaatactccttcaaattcatgatgagcttattcttgaagtgccagaggaggagatggaatttactcctttaatggcaaaggaaaaaatggaaaaggtggtagaactttcggttcctcttgtagttgaaatctcggtaggtaaaaatcttgctgaattaaaatgagctataagattggtcgac

SEQ ID NO: 2021 - DNA, 2673 bp, Artificial Sequence
  Description of Artificial Sequence: Synthetic DNA sequence of Dictyoglomus thermophilum DNA I784W
atgaaatacctgctgccgaccgctgctgctggtctgctgctcctcgctgcccagccggcgatggccatggatatcggaattaattcggatccgaaatctctgtgggatctttttcaagaaaataccgagaaagagtccaaaaggaagattctgattattgatggctcaagcctcatatacagggtttattacgcccttccccctttaaagacaaaaaatggtgaattaactaatgctctttatggcttcataagaatacttttaaaggccgtagaagattttaatcctgatcttgtaggcgttgcctttgatagacctgaacctacttttaggcatgtgatttataaagagtataaggctaagagaccacctatgaaggatgatttgaaagcgcagataccatggataagagaatttctaaggttaaatgatatacctctattggaagagcctggctatgaagcggatgatataatagctactatagtgaataaatataaggatgatttaaaatatattctctctggagatttagatcttttgcaattagtctcggacaaaacctttctaatacatcctcaaaagggaattactgagtttactatttatgatccaaaagctgtaaaggataggtttggagtagagccctataagattcccttatacaaagtattagtaggggacgaatctgataatattccaggagtaaatggaataggtcctaaaaaggcctcaaagattcttgagaaaatttcaagtgtagatgaatttaaaagtaaaataaaagttttggatagtgatttaagggagcttattgagaaaaattggaatattattgaaagaaatttagaacttgttactttaaaaaatatagataaggatcttattcttaaacccttcgagattaaaagagatgaaaaagtaatagattttttgaagagatatgaacttaagagtattcttcaaaagttatttcctgatcttcaagaggaagaaaatatagagattaaagatgtcgaagagatcaattttaatgaggtagaaaaagaaggctactttgcctttaaatgtcttggagatagggcttttgagggtatttctctttccttcaaggagggggaaggatattttatatctccttttgatttcaataatgagataagaaagaagattgaaaatataatttcttcagagaatgttaaaaaaattggctcttatattcaaagagatttacattttttaaactgtaaaataaagggcgatgtatttgatgttagtctcgcatcttatcttttgaaccctgaaagacaaaatcactctcttgatattttgataggagagtatctaaataaaacctcttttattcctcaaaaatacgctggttatctttttccgttaaagtctattcttgaggagaggataaagaatgaagggttagaatttgtactttataacatagagattccattaatccctgtactttactccatggagaagtgggggataaaggtagataaggaatatttaaaacagctttctgatgaattctgcgagagaattaaaaaattggaagaagagatatatgaacttgcaggaaccagatttaatctcaattctccaaaacaactttctgaagttttatttgagaggttaaaacttccttctggtaagaaaggaaaaacaggatattctacgtcgtcttctgtgcttcaaaacttaataaatgctcatcctatagtgagaaaaatcctccaatatagagaactctataaattgaagagtacttatgtggatgctattcctaatctggttaatccacaaacaggtagagttcatacaaaatttaatcctacaggtacagctacaggaagaataagtagtagtgaacctaatcttcagaatattcctataaaaagtgaagaaggtagaaagataagaagagccttcgtgtcagaagatggatattttcttgtatctcttgattattctcagatagagctaaggattatggctcatctttctcaggagcctaaattaatatctgccttccaaaaaggagaggatattcatagaagaacagcatcggagatttttggagtgccagaggaagaagttgatgatcttttaaggtcaagggcaaaggccgttaattttggaattatttatggtatctcttcttttggactttctgagactgtaagtattacaccagaagaggcagagaaatttatagactcgtattttaagcactatccaagagtgaagctttttatagataagactattcatgaggcaagagaaaaactgtacgttaaaaccttatttggcagaaaaagatatattcctgagtggaagagcataaataaacaggtaaggaatgcctatgaaaggatagcaataaatgcgccaattcagggaacagctgctgatattataaaacttgccatgatagaaatttacaaggagattgaaaataaaaatctcaagtcaagaatactccttcaaattcatgatgagcttattcttgaagtgccagaggaggagatggaatttactcctttaatggcaaaggaaaaaatggaaaaggtggtagaactttcggttcctcttgtagttgaaatctcggtaggtaaaaatcttgctgaattaaaatgagctataagattggtcgac

SEQ ID NO: 2022 - DNA, 2673 bp, Artificial Sequence
  Description of Artificial Sequence: Synthetic DNA sequence of Dictyoglomus thermophilum DNA I784Y
atgaaatacctgctgccgaccgctgctgctggtctgctgctcctcgctgcccagccggcgatggccatggatatcggaattaattcggatccgaaatctctgtgggatctttttcaagaaaataccgagaaagagtccaaaaggaagattctgattattgatggctcaagcctcatatacagggtttattacgcccttccccctttaaagacaaaaaatggtgaattaactaatgctctttatggcttcataagaatacttttaaaggccgtagaagattttaatcctgatcttgtaggcgttgcctttgatagacctgaacctacttttaggcatgtgatttataaagagtataaggctaagagaccacctatgaaggatgatttgaaagcgcagataccatggataagagaatttctaaggttaaatgatatacctctattggaagagcctggctatgaagcggatgatataatagctactatagtgaataaatataaggatgatttaaaatatattctctctggagatttagatcttttgcaattagtctcggacaaaacctttctaatacatcctcaaaagggaattactgagtttactatttatgatccaaaagctgtaaaggataggtttggagtagagccctataagattcccttatacaaagtattagtaggggacgaatctgataatattccaggagtaaatggaataggtcctaaaaaggcctcaaagattcttgagaaaatttcaagtgtagatgaatttaaaagtaaaataaaagttttggatagtgatttaagggagcttattgagaaaaattggaatattattgaaagaaatttagaacttgttactttaaaaaatatagataaggatcttattcttaaacccttcgagattaaaagagatgaaaaagtaatagattttttgaagagatatgaacttaagagtattcttcaaaagttatttcctgatcttcaagaggaagaaaatatagagattaaagatgtcgaagagatcaattttaatgaggtagaaaaagaaggctactttgcctttaaatgtcttggagatagggcttttgagggtatttctctttccttcaaggagggggaaggatattttatatctccttttgatttcaataatgagataagaaagaagattgaaaatataatttcttcagagaatgttaaaaaaattggctcttatattcaaagagatttacattttttaaactgtaaaataaagggcgatgtatttgatgttagtctcgcatcttatcttttgaaccctgaaagacaaaatcactctcttgatattttgataggagagtatctaaataaaacctcttttattcctcaaaaatacgctggttatctttttccgttaaagtctattcttgaggagaggataaagaatgaagggttagaatttgtactttataacatagagattccattaatccctgtactttactccatggagaagtgggggataaaggtagataaggaatatttaaaacagctttctgatgaattctgcgagagaattaaaaaattggaagaagagatatatgaacttgcaggaaccagatttaatctcaattctccaaaacaactttctgaagttttatttgagaggttaaaacttccttctggtaagaaaggaaaaacaggatattctacgtcgtcttctgtgcttcaaaacttaataaatgctcatcctatagtgagaaaaatcctccaatatagagaactctataaattgaagagtacttatgtggatgctattcctaatctggttaatccacaaacaggtagagttcatacaaaatttaatcctacaggtacagctacaggaagaataagtagtagtgaacctaatcttcagaatattcctataaaaagtgaagaaggtagaaagataagaagagccttcgtgtcagaagatggatattttcttgtatctcttgattattctcagatagagctaaggattatggctcatctttctcaggagcctaaattaatatctgccttccaaaaaggagaggatattcatagaagaacagcatcggagatttttggagtgccagaggaagaagttgatgatcttttaaggtcaagggcaaaggccgttaattttggaattatttatggtatctcttcttttggactttctgagactgtaagtattacaccagaagaggcagagaaatttatagactcgtattttaagcactatccaagagtgaagctttttatagataagactattcatgaggcaagagaaaaactgtacgttaaaaccttatttggcagaaaaagatatattcctgagtataagagcataaataaacaggtaaggaatgcctatgaaaggatagcaataaatgcgccaattcagggaacagctgctgatattataaaacttgccatgatagaaatttacaaggagattgaaaataaaaatctcaagtcaagaatactccttcaaattcatgatgagcttattcttgaagtgccagaggaggagatggaatttactcctttaatggcaaaggaaaaaatggaaaaggtggtagaactttcggttcctcttgtagttgaaatctcggtaggtaaaaatcttgctgaattaaaatgagctataagattggtcgac

SEQ ID NO: 2023 - DNA, 2673 bp, Artificial Sequence
  Description of Artificial Sequence: Synthetic DNA sequence of Dictyoglomus thermophilum DNA I784V
atgaaatacctgctgccgaccgctgctgctggtctgctgctcctcgctgcccagccggcgatggccatggatatcggaattaattcggatccgaaatctctgtgggatctttttcaagaaaataccgagaaagagtccaaaaggaagattctgattattgatggctcaagcctcatatacagggtttattacgcccttccccctttaaagacaaaaaatggtgaattaactaatgctctttatggcttcataagaatacttttaaaggccgtagaagattttaatcctgatcttgtaggcgttgcctttgatagacctgaacctacttttaggcatgtgatttataaagagtataaggctaagagaccacctatgaaggatgatttgaaagcgcagataccatggataagagaatttctaaggttaaatgatatacctctattggaagagcctggctatgaagcggatgatataatagctactatagtgaataaatataaggatgatttaaaatatattctctctggagatttagatcttttgcaattagtctcggacaaaacctttctaatacatcctcaaaagggaattactgagtttactatttatgatccaaaagctgtaaaggataggtttggagtagagccctataagattcccttatacaaagtattagtaggggacgaatctgataatattccaggagtaaatggaataggtcctaaaaaggcctcaaagattcttgagaaaatttcaagtgtagatgaatttaaaagtaaaataaaagttttggatagtgatttaagggagcttattgagaaaaattggaatattattgaaagaaatttagaacttgttactttaaaaaatatagataaggatcttattcttaaacccttcgagattaaaagagatgaaaaagtaatagattttttgaagagatatgaacttaagagtattcttcaaaagttatttcctgatcttcaagaggaagaaaatatagagattaaagatgtcgaagagatcaattttaatgaggtagaaaaagaaggctactttgcctttaaatgtcttggagatagggcttttgagggtatttctctttccttcaaggagggggaaggatattttatatctccttttgatttcaataatgagataagaaagaagattgaaaatataatttcttcagagaatgttaaaaaaattggctcttatattcaaagagatttacattttttaaactgtaaaataaagggcgatgtatttgatgttagtctcgcatcttatcttttgaaccctgaaagacaaaatcactctcttgatattttgataggagagtatctaaataaaacctcttttattcctcaaaaatacgctggttatctttttccgttaaagtctattcttgaggagaggataaagaatgaagggttagaatttgtactttataacatagagattccattaatccctgtactttactccatggagaagtgggggataaaggtagataaggaatatttaaaacagctttctgatgaattctgcgagagaattaaaaaattggaagaagagatatatgaacttgcaggaaccagatttaatctcaattctccaaaacaactttctgaagttttatttgagaggttaaaacttccttctggtaagaaaggaaaaacaggatattctacgtcgtcttctgtgcttcaaaacttaataaatgctcatcctatagtgagaaaaatcctccaatatagagaactctataaattgaagagtacttatgtggatgctattcctaatctggttaatccacaaacaggtagagttcatacaaaatttaatcctacaggtacagctacaggaagaataagtagtagtgaacctaatcttcagaatattcctataaaaagtgaagaaggtagaaagataagaagagccttcgtgtcagaagatggatattttcttgtatctcttgattattctcagatagagctaaggattatggctcatctttctcaggagcctaaattaatatctgccttccaaaaaggagaggatattcatagaagaacagcatcggagatttttggagtgccagaggaagaagttgatgatcttttaaggtcaagggcaaaggccgttaattttggaattatttatggtatctcttcttttggactttctgagactgtaagtattacaccagaagaggcagagaaatttatagactcgtattttaagcactatccaagagtgaagctttttatagataagactattcatgaggcaagagaaaaactgtacgttaaaaccttatttggcagaaaaagatatattcctgaggttaagagcataaataaacaggtaaggaatgcctatgaaaggatagcaataaatgcgccaattcagggaacagctgctgatattataaaacttgccatgatagaaatttacaaggagattgaaaataaaaatctcaagtcaagaatactccttcaaattcatgatgagcttattcttgaagtgccagaggaggagatggaatttactcctttaatggcaaaggaaaaaatggaaaaggtggtagaactttcggttcctcttgtagttgaaatctcggtaggtaaaaatcttgctgaattaaaatgagctataagattggtcgac

SEQ ID NO: 2024 - DNA, 2673 bp, Artificial Sequence
  Description of Artificial Sequence: Synthetic DNA sequence of Dictyoglomus thermophilum DNA K785A
atgaaatacctgctgccgaccgctgctgctggtctgctgctcctcgctgcccagccggcgatggccatggatatcggaattaattcggatccgaaatctctgtgggatctttttcaagaaaataccgagaaagagtccaaaaggaagattctgattattgatggctcaagcctcatatacagggtttattacgcccttccccctttaaagacaaaaaatggtgaattaactaatgctctttatggcttcataagaatacttttaaaggccgtagaagattttaatcctgatcttgtaggcgttgcctttgatagacctgaacctacttttaggcatgtgatttataaagagtataaggctaagagaccacctatgaaggatgatttgaaagcgcagataccatggataagagaatttctaaggttaaatgatatacctctattggaagagcctggctatgaagcggatgatataatagctactatagtgaataaatataaggatgatttaaaatatattctctctggagatttagatcttttgcaattagtctcggacaaaacctttctaatacatcctcaaaagggaattactgagtttactatttatgatccaaaagctgtaaaggataggtttggagtagagccctataagattcccttatacaaagtattagtaggggacgaatctgataatattccaggagtaaatggaataggtcctaaaaaggcctcaaagattcttgagaaaatttcaagtgtagatgaatttaaaagtaaaataaaagttttggatagtgatttaagggagcttattgagaaaaattggaatattattgaaagaaatttagaacttgttactttaaaaaatatagataaggatcttattcttaaacccttcgagattaaaagagatgaaaaagtaatagattttttgaagagatatgaacttaagagtattcttcaaaagttatttcctgatcttcaagaggaagaaaatatagagattaaagatgtcgaagagatcaattttaatgaggtagaaaaagaaggctactttgcctttaaatgtcttggagatagggcttttgagggtatttctctttccttcaaggagggggaaggatattttatatctccttttgatttcaataatgagataagaaagaagattgaaaatataatttcttcagagaatgttaaaaaaattggctcttatattcaaagagatttacattttttaaactgtaaaataaagggcgatgtatttgatgttagtctcgcatcttatcttttgaaccctgaaagacaaaatcactctcttgatattttgataggagagtatctaaataaaacctcttttattcctcaaaaatacgctggttatctttttccgttaaagtctattcttgaggagaggataaagaatgaagggttagaatttgtactttataacatagagattccattaatccctgtactttactccatggagaagtgggggataaaggtagataaggaatatttaaaacagctttctgatgaattctgcgagagaattaaaaaattggaagaagagatatatgaacttgcaggaaccagatttaatctcaattctccaaaacaactttctgaagttttatttgagaggttaaaacttccttctggtaagaaaggaaaaacaggatattctacgtcgtcttctgtgcttcaaaacttaataaatgctcatcctatagtgagaaaaatcctccaatatagagaactctataaattgaagagtacttatgtggatgctattcctaatctggttaatccacaaacaggtagagttcatacaaaatttaatcctacaggtacagctacaggaagaataagtagtagtgaacctaatcttcagaatattcctataaaaagtgaagaaggtagaaagataagaagagccttcgtgtcagaagatggatattttcttgtatctcttgattattctcagatagagctaaggattatggctcatctttctcaggagcctaaattaatatctgccttccaaaaaggagaggatattcatagaagaacagcatcggagatttttggagtgccagaggaagaagttgatgatcttttaaggtcaagggcaaaggccgttaattttggaattatttatggtatctcttcttttggactttctgagactgtaagtattacaccagaagaggcagagaaatttatagactcgtattttaagcactatccaagagtgaagctttttatagataagactattcatgaggcaagagaaaaactgtacgttaaaaccttatttggcagaaaaagatatattcctgagattgctagcataaataaacaggtaaggaatgcctatgaaaggatagcaataaatgcgccaattcagggaacagctgctgatattataaaacttgccatgatagaaatttacaaggagattgaaaataaaaatctcaagtcaagaatactccttcaaattcatgatgagcttattcttgaagtgccagaggaggagatggaatttactcctttaatggcaaaggaaaaaatggaaaaggtggtagaactttcggttcctcttgtagttgaaatctcggtaggtaaaaatcttgctgaattaaaatgagctataagattggtcgac

SEQ ID NO: 2025 - DNA, 2673 bp, Artificial Sequence
  Description of Artificial Sequence: Synthetic DNA sequence of Dictyoglomus thermophilum DNA K785R
atgaaatacctgctgccgaccgctgctgctggtctgctgctcctcgctgcccagccggcgatggccatggatatcggaattaattcggatccgaaatctctgtgggatctttttcaagaaaataccgagaaagagtccaaaaggaagattctgattattgatggctcaagcctcatatacagggtttattacgcccttccccctttaaagacaaaaaatggtgaattaactaatgctctttatggcttcataagaatacttttaaaggccgtagaagattttaatcctgatcttgtaggcgttgcctttgatagacctgaacctacttttaggcatgtgatttataaagagtataaggctaagagaccacctatgaaggatgatttgaaagcgcagataccatggataagagaatttctaaggttaaatgatatacctctattggaagagcctggctatgaagcggatgatataatagctactatagtgaataaatataaggatgatttaaaatatattctctctggagatttagatcttttgcaattagtctcggacaaaacctttctaatacatcctcaaaagggaattactgagtttactatttatgatccaaaagctgtaaaggataggtttggagtagagccctataagattcccttatacaaagtattagtaggggacgaatctgataatattccaggagtaaatggaataggtcctaaaaaggcctcaaagattcttgagaaaatttcaagtgtagatgaatttaaaagtaaaataaaagttttggatagtgatttaagggagcttattgagaaaaattggaatattattgaaagaaatttagaacttgttactttaaaaaatatagataaggatcttattcttaaacccttcgagattaaaagagatgaaaaagtaatagattttttgaagagatatgaacttaagagtattcttcaaaagttatttcctgatcttcaagaggaagaaaatatagagattaaagatgtcgaagagatcaattttaatgaggtagaaaaagaaggctactttgcctttaaatgtcttggagatagggcttttgagggtatttctctttccttcaaggagggggaaggatattttatatctccttttgatttcaataatgagataagaaagaagattgaaaatataatttcttcagagaatgttaaaaaaattggctcttatattcaaagagatttacattttttaaactgtaaaataaagggcgatgtatttgatgttagtctcgcatcttatcttttgaaccctgaaagacaaaatcactctcttgatattttgataggagagtatctaaataaaacctcttttattcctcaaaaatacgctggttatctttttccgttaaagtctattcttgaggagaggataaagaatgaagggttagaatttgtactttataacatagagattccattaatccctgtactttactccatggagaagtgggggataaaggtagataaggaatatttaaaacagctttctgatgaattctgcgagagaattaaaaaattggaagaagagatatatgaacttgcaggaaccagatttaatctcaattctccaaaacaactttctgaagttttatttgagaggttaaaacttccttctggtaagaaaggaaaaacaggatattctacgtcgtcttctgtgcttcaaaacttaataaatgctcatcctatagtgagaaaaatcctccaatatagagaactctataaattgaagagtacttatgtggatgctattcctaatctggttaatccacaaacaggtagagttcatacaaaatttaatcctacaggtacagctacaggaagaataagtagtagtgaacctaatcttcagaatattcctataaaaagtgaagaaggtagaaagataagaagagccttcgtgtcagaagatggatattttcttgtatctcttgattattctcagatagagctaaggattatggctcatctttctcaggagcctaaattaatatctgccttccaaaaaggagaggatattcatagaagaacagcatcggagatttttggagtgccagaggaagaagttgatgatcttttaaggtcaagggcaaaggccgttaattttggaattatttatggtatctcttcttttggactttctgagactgtaagtattacaccagaagaggcagagaaatttatagactcgtattttaagcactatccaagagtgaagctttttatagataagactattcatgaggcaagagaaaaactgtacgttaaaaccttatttggcagaaaaagatatattcctgagattcgtagcataaataaacaggtaaggaatgcctatgaaaggatagcaataaatgcgccaattcagggaacagctgctgatattataaaacttgccatgatagaaatttacaaggagattgaaaataaaaatctcaagtcaagaatactccttcaaattcatgatgagcttattcttgaagtgccagaggaggagatggaatttactcctttaatggcaaaggaaaaaatggaaaaggtggtagaactttcggttcctcttgtagttgaaatctcggtaggtaaaaatcttgctgaattaaaatgagctataagattggtcgac

SEQ ID NO: 2026 - DNA, 2673 bp, Artificial Sequence
  Description of Artificial Sequence: Synthetic DNA sequence of Dictyoglomus thermophilum DNA K785N
atgaaatacctgctgccgaccgctgctgctggtctgctgctcctcgctgcccagccggcgatggccatggatatcggaattaattcggatccgaaatctctgtgggatctttttcaagaaaataccgagaaagagtccaaaaggaagattctgattattgatggctcaagcctcatatacagggtttattacgcccttccccctttaaagacaaaaaatggtgaattaactaatgctctttatggcttcataagaatacttttaaaggccgtagaagattttaatcctgatcttgtaggcgttgcctttgatagacctgaacctacttttaggcatgtgatttataaagagtataaggctaagagaccacctatgaaggatgatttgaaagcgcagataccatggataagagaatttctaaggttaaatgatatacctctattggaagagcctggctatgaagcggatgatataatagctactatagtgaataaatataaggatgatttaaaatatattctctctggagatttagatcttttgcaattagtctcggacaaaacctttctaatacatcctcaaaagggaattactgagtttactatttatgatccaaaagctgtaaaggataggtttggagtagagccctataagattcccttatacaaagtattagtaggggacgaatctgataatattccaggagtaaatggaataggtcctaaaaaggcctcaaagattcttgagaaaatttcaagtgtagatgaatttaaaagtaaaataaaagttttggatagtgatttaagggagcttattgagaaaaattggaatattattgaaagaaatttagaacttgttactttaaaaaatatagataaggatcttattcttaaacccttcgagattaaaagagatgaaaaagtaatagattttttgaagagatatgaacttaagagtattcttcaaaagttatttcctgatcttcaagaggaagaaaatatagagattaaagatgtcgaagagatcaattttaatgaggtagaaaaagaaggctactttgcctttaaatgtcttggagatagggcttttgagggtatttctctttccttcaaggagggggaaggatattttatatctccttttgatttcaataatgagataagaaagaagattgaaaatataatttcttcagagaatgttaaaaaaattggctcttatattcaaagagatttacattttttaaactgtaaaataaagggcgatgtatttgatgttagtctcgcatcttatcttttgaaccctgaaagacaaaatcactctcttgatattttgataggagagtatctaaataaaacctcttttattcctcaaaaatacgctggttatctttttccgttaaagtctattcttgaggagaggataaagaatgaagggttagaatttgtactttataacatagagattccattaatccctgtactttactccatggagaagtgggggataaaggtagataaggaatatttaaaacagctttctgatgaattctgcgagagaattaaaaaattggaagaagagatatatgaacttgcaggaaccagatttaatctcaattctccaaaacaactttctgaagttttatttgagaggttaaaacttccttctggtaagaaaggaaaaacaggatattctacgtcgtcttctgtgcttcaaaacttaataaatgctcatcctatagtgagaaaaatcctccaatatagagaactctataaattgaagagtacttatgtggatgctattcctaatctggttaatccacaaacaggtagagttcatacaaaatttaatcctacaggtacagctacaggaagaataagtagtagtgaacctaatcttcagaatattcctataaaaagtgaagaaggtagaaagataagaagagccttcgtgtcagaagatggatattttcttgtatctcttgattattctcagatagagctaaggattatggctcatctttctcaggagcctaaattaatatctgccttccaaaaaggagaggatattcatagaagaacagcatcggagatttttggagtgccagaggaagaagttgatgatcttttaaggtcaagggcaaaggccgttaattttggaattatttatggtatctcttcttttggactttctgagactgtaagtattacaccagaagaggcagagaaatttatagactcgtattttaagcactatccaagagtgaagctttttatagataagactattcatgaggcaagagaaaaactgtacgttaaaaccttatttggcagaaaaagatatattcctgagattaatagcataaataaacaggtaaggaatgcctatgaaaggatagcaataaatgcgccaattcagggaacagctgctgatattataaaacttgccatgatagaaatttacaaggagattgaaaataaaaatctcaagtcaagaatactccttcaaattcatgatgagcttattcttgaagtgccagaggaggagatggaatttactcctttaatggcaaaggaaaaaatggaaaaggtggtagaactttcggttcctcttgtagttgaaatctcggtaggtaaaaatcttgctgaattaaaatgagctataagattggtcgac

SEQ ID NO: 2027 - DNA, 2673 bp, Artificial Sequence
  Description of Artificial Sequence: Synthetic DNA sequence of Dictyoglomus thermophilum DNA K785D
atgaaatacctgctgccgaccgctgctgctggtctgctgctcctcgctgcccagccggcgatggccatggatatcggaattaattcggatccgaaatctctgtgggatctttttcaagaaaataccgagaaagagtccaaaaggaagattctgattattgatggctcaagcctcatatacagggtttattacgcccttccccctttaaagacaaaaaatggtgaattaactaatgctctttatggcttcataagaatacttttaaaggccgtagaagattttaatcctgatcttgtaggcgttgcctttgatagacctgaacctacttttaggcatgtgatttataaagagtataaggctaagagaccacctatgaaggatgatttgaaagcgcagataccatggataagagaatttctaaggttaaatgatatacctctattggaagagcctggctatgaagcggatgatataatagctactatagtgaataaatataaggatgatttaaaatatattctctctggagatttagatcttttgcaattagtctcggacaaaacctttctaatacatcctcaaaagggaattactgagtttactatttatgatccaaaagctgtaaaggataggtttggagtagagccctataagattcccttatacaaagtattagtaggggacgaatctgataatattccaggagtaaatggaataggtcctaaaaaggcctcaaagattcttgagaaaatttcaagtgtagatgaatttaaaagtaaaataaaagttttggatagtgatttaagggagcttattgagaaaaattggaatattattgaaagaaatttagaacttgttactttaaaaaatatagataaggatcttattcttaaacccttcgagattaaaagagatgaaaaagtaatagattttttgaagagatatgaacttaagagtattcttcaaaagttatttcctgatcttcaagaggaagaaaatatagagattaaagatgtcgaagagatcaattttaatgaggtagaaaaagaaggctactttgcctttaaatgtcttggagatagggcttttgagggtatttctctttccttcaaggagggggaaggatattttatatctccttttgatttcaataatgagataagaaagaagattgaaaatataatttcttcagagaatgttaaaaaaattggctcttatattcaaagagatttacattttttaaactgtaaaataaagggcgatgtatttgatgttagtctcgcatcttatcttttgaaccctgaaagacaaaatcactctcttgatattttgataggagagtatctaaataaaacctcttttattcctcaaaaatacgctggttatctttttccgttaaagtctattcttgaggagaggataaagaatgaagggttagaatttgtactttataacatagagattccattaatccctgtactttactccatggagaagtgggggataaaggtagataaggaatatttaaaacagctttctgatgaattctgcgagagaattaaaaaattggaagaagagatatatgaacttgcaggaaccagatttaatctcaattctccaaaacaactttctgaagttttatttgagaggttaaaacttccttctggtaagaaaggaaaaacaggatattctacgtcgtcttctgtgcttcaaaacttaataaatgctcatcctatagtgagaaaaatcctccaatatagagaactctataaattgaagagtacttatgtggatgctattcctaatctggttaatccacaaacaggtagagttcatacaaaatttaatcctacaggtacagctacaggaagaataagtagtagtgaacctaatcttcagaatattcctataaaaagtgaagaaggtagaaagataagaagagccttcgtgtcagaagatggatattttcttgtatctcttgattattctcagatagagctaaggattatggctcatctttctcaggagcctaaattaatatctgccttccaaaaaggagaggatattcatagaagaacagcatcggagatttttggagtgccagaggaagaagttgatgatcttttaaggtcaagggcaaaggccgttaattttggaattatttatggtatctcttcttttggactttctgagactgtaagtattacaccagaagaggcagagaaatttatagactcgtattttaagcactatccaagagtgaagctttttatagataagactattcatgaggcaagagaaaaactgtacgttaaaaccttatttggcagaaaaagatatattcctgagattgatagcataaataaacaggtaaggaatgcctatgaaaggatagcaataaatgcgccaattcagggaacagctgctgatattataaaacttgccatgatagaaatttacaaggagattgaaaataaaaatctcaagtcaagaatactccttcaaattcatgatgagcttattcttgaagtgccagaggaggagatggaatttactcctttaatggcaaaggaaaaaatggaaaaggtggtagaactttcggttcctcttgtagttgaaatctcggtaggtaaaaatcttgctgaattaaaatgagctataagattggtcgac

SEQ ID NO: 2028 - DNA, 2673 bp, Artificial Sequence
  Description of Artificial Sequence: Synthetic DNA sequence of Dictyoglomus thermophilum DNA K785C
atgaaatacctgctgccgaccgctgctgctggtctgctgctcctcgctgcccagccggcgatggccatggatatcggaattaattcggatccgaaatctctgtgggatctttttcaagaaaataccgagaaagagtccaaaaggaagattctgattattgatggctcaagcctcatatacagggtttattacgcccttccccctttaaagacaaaaaatggtgaattaactaatgctctttatggcttcataagaatacttttaaaggccgtagaagattttaatcctgatcttgtaggcgttgcctttgatagacctgaacctacttttaggcatgtgatttataaagagtataaggctaagagaccacctatgaaggatgatttgaaagcgcagataccatggataagagaatttctaaggttaaatgatatacctctattggaagagcctggctatgaagcggatgatataatagctactatagtgaataaatataaggatgatttaaaatatattctctctggagatttagatcttttgcaattagtctcggacaaaacctttctaatacatcctcaaaagggaattactgagtttactatttatgatccaaaagctgtaaaggataggtttggagtagagccctataagattcccttatacaaagtattagtaggggacgaatctgataatattccaggagtaaatggaataggtcctaaaaaggcctcaaagattcttgagaaaatttcaagtgtagatgaatttaaaagtaaaataaaagttttggatagtgatttaagggagcttattgagaaaaattggaatattattgaaagaaatttagaacttgttactttaaaaaatatagataaggatcttattcttaaacccttcgagattaaaagagatgaaaaagtaatagattttttgaagagatatgaacttaagagtattcttcaaaagttatttcctgatcttcaagaggaagaaaatatagagattaaagatgtcgaagagatcaattttaatgaggtagaaaaagaaggctactttgcctttaaatgtcttggagatagggcttttgagggtatttctctttccttcaaggagggggaaggatattttatatctccttttgatttcaataatgagataagaaagaagattgaaaatataatttcttcagagaatgttaaaaaaattggctcttatattcaaagagatttacattttttaaactgtaaaataaagggcgatgtatttgatgttagtctcgcatcttatcttttgaaccctgaaagacaaaatcactctcttgatattttgataggagagtatctaaataaaacctcttttattcctcaaaaatacgctggttatctttttccgttaaagtctattcttgaggagaggataaagaatgaagggttagaatttgtactttataacatagagattccattaatccctgtactttactccatggagaagtgggggataaaggtagataaggaatatttaaaacagctttctgatgaattctgcgagagaattaaaaaattggaagaagagatatatgaacttgcaggaaccagatttaatctcaattctccaaaacaactttctgaagttttatttgagaggttaaaacttccttctggtaagaaaggaaaaacaggatattctacgtcgtcttctgtgcttcaaaacttaataaatgctcatcctatagtgagaaaaatcctccaatatagagaactctataaattgaagagtacttatgtggatgctattcctaatctggttaatccacaaacaggtagagttcatacaaaatttaatcctacaggtacagctacaggaagaataagtagtagtgaacctaatcttcagaatattcctataaaaagtgaagaaggtagaaagataagaagagccttcgtgtcagaagatggatattttcttgtatctcttgattattctcagatagagctaaggattatggctcatctttctcaggagcctaaattaatatctgccttccaaaaaggagaggatattcatagaagaacagcatcggagatttttggagtgccagaggaagaagttgatgatcttttaaggtcaagggcaaaggccgttaattttggaattatttatggtatctcttcttttggactttctgagactgtaagtattacaccagaagaggcagagaaatttatagactcgtattttaagcactatccaagagtgaagctttttatagataagactattcatgaggcaagagaaaaactgtacgttaaaaccttatttggcagaaaaagatatattcctgagatttgtagcataaataaacaggtaaggaatgcctatgaaaggatagcaataaatgcgccaattcagggaacagctgctgatattataaaacttgccatgatagaaatttacaaggagattgaaaataaaaatctcaagtcaagaatactccttcaaattcatgatgagcttattcttgaagtgccagaggaggagatggaatttactcctttaatggcaaaggaaaaaatggaaaaggtggtagaactttcggttcctcttgtagttgaaatctcggtaggtaaaaatcttgctgaattaaaatgagctataagattggtcgac

SEQ ID NO: 2029 - DNA, 2673 bp, Artificial Sequence
  Description of Artificial Sequence: Synthetic DNA sequence of Dictyoglomus thermophilum DNA K785E
atgaaatacctgctgccgaccgctgctgctggtctgctgctcctcgctgcccagccggcgatggccatggatatcggaattaattcggatccgaaatctctgtgggatctttttcaagaaaataccgagaaagagtccaaaaggaagattctgattattgatggctcaagcctcatatacagggtttattacgcccttccccctttaaagacaaaaaatggtgaattaactaatgctctttatggcttcataagaatacttttaaaggccgtagaagattttaatcctgatcttgtaggcgttgcctttgatagacctgaacctacttttaggcatgtgatttataaagagtataaggctaagagaccacctatgaaggatgatttgaaagcgcagataccatggataagagaatttctaaggttaaatgatatacctctattggaagagcctggctatgaagcggatgatataatagctactatagtgaataaatataaggatgatttaaaatatattctctctggagatttagatcttttgcaattagtctcggacaaaacctttctaatacatcctcaaaagggaattactgagtttactatttatgatccaaaagctgtaaaggataggtttggagtagagccctataagattcccttatacaaagtattagtaggggacgaatctgataatattccaggagtaaatggaataggtcctaaaaaggcctcaaagattcttgagaaaatttcaagtgtagatgaatttaaaagtaaaataaaagttttggatagtgatttaagggagcttattgagaaaaattggaatattattgaaagaaatttagaacttgttactttaaaaaatatagataaggatcttattcttaaacccttcgagattaaaagagatgaaaaagtaatagattttttgaagagatatgaacttaagagtattcttcaaaagttatttcctgatcttcaagaggaagaaaatatagagattaaagatgtcgaagagatcaattttaatgaggtagaaaaagaaggctactttgcctttaaatgtcttggagatagggcttttgagggtatttctctttccttcaaggagggggaaggatattttatatctccttttgatttcaataatgagataagaaagaagattgaaaatataatttcttcagagaatgttaaaaaaattggctcttatattcaaagagatttacattttttaaactgtaaaataaagggcgatgtatttgatgttagtctcgcatcttatcttttgaaccctgaaagacaaaatcactctcttgatattttgataggagagtatctaaataaaacctcttttattcctcaaaaatacgctggttatctttttccgttaaagtctattcttgaggagaggataaagaatgaagggttagaatttgtactttataacatagagattccattaatccctgtactttactccatggagaagtgggggataaaggtagataaggaatatttaaaacagctttctgatgaattctgcgagagaattaaaaaattggaagaagagatatatgaacttgcaggaaccagatttaatctcaattctccaaaacaactttctgaagttttatttgagaggttaaaacttccttctggtaagaaaggaaaaacaggatattctacgtcgtcttctgtgcttcaaaacttaataaatgctcatcctatagtgagaaaaatcctccaatatagagaactctataaattgaagagtacttatgtggatgctattcctaatctggttaatccacaaacaggtagagttcatacaaaatttaatcctacaggtacagctacaggaagaataagtagtagtgaacctaatcttcagaatattcctataaaaagtgaagaaggtagaaagataagaagagccttcgtgtcagaagatggatattttcttgtatctcttgattattctcagatagagctaaggattatggctcatctttctcaggagcctaaattaatatctgccttccaaaaaggagaggatattcatagaagaacagcatcggagatttttggagtgccagaggaagaagttgatgatcttttaaggtcaagggcaaaggccgttaattttggaattatttatggtatctcttcttttggactttctgagactgtaagtattacaccagaagaggcagagaaatttatagactcgtattttaagcactatccaagagtgaagctttttatagataagactattcatgaggcaagagaaaaactgtacgttaaaaccttatttggcagaaaaagatatattcctgagattgaaagcataaataaacaggtaaggaatgcctatgaaaggatagcaataaatgcgccaattcagggaacagctgctgatattataaaacttgccatgatagaaatttacaaggagattgaaaataaaaatctcaagtcaagaatactccttcaaattcatgatgagcttattcttgaagtgccagaggaggagatggaatttactcctttaatggcaaaggaaaaaatggaaaaggtggtagaactttcggttcctcttgtagttgaaatctcggtaggtaaaaatcttgctgaattaaaatgagctataagattggtcgac

SEQ ID NO: 2030 - DNA, 2673 bp, Artificial Sequence
  Description of Artificial Sequence: Synthetic DNA sequence of Dictyoglomus thermophilum DNA K785Q
atgaaatacctgctgccgaccgctgctgctggtctgctgctcctcgctgcccagccggcgatggccatggatatcggaattaattcggatccgaaatctctgtgggatctttttcaagaaaataccgagaaagagtccaaaaggaagattctgattattgatggctcaagcctcatatacagggtttattacgcccttccccctttaaagacaaaaaatggtgaattaactaatgctctttatggcttcataagaatacttttaaaggccgtagaagattttaatcctgatcttgtaggcgttgcctttgatagacctgaacctacttttaggcatgtgatttataaagagtataaggctaagagaccacctatgaaggatgatttgaaagcgcagataccatggataagagaatttctaaggttaaatgatatacctctattggaagagcctggctatgaagcggatgatataatagctactatagtgaataaatataaggatgatttaaaatatattctctctggagatttagatcttttgcaattagtctcggacaaaacctttctaatacatcctcaaaagggaattactgagtttactatttatgatccaaaagctgtaaaggataggtttggagtagagccctataagattcccttatacaaagtattagtaggggacgaatctgataatattccaggagtaaatggaataggtcctaaaaaggcctcaaagattcttgagaaaatttcaagtgtagatgaatttaaaagtaaaataaaagttttggatagtgatttaagggagcttattgagaaaaattggaatattattgaaagaaatttagaacttgttactttaaaaaatatagataaggatcttattcttaaacccttcgagattaaaagagatgaaaaagtaatagattttttgaagagatatgaacttaagagtattcttcaaaagttatttcctgatcttcaagaggaagaaaatatagagattaaagatgtcgaagagatcaattttaatgaggtagaaaaagaaggctactttgcctttaaatgtcttggagatagggcttttgagggtatttctctttccttcaaggagggggaaggatattttatatctccttttgatttcaataatgagataagaaagaagattgaaaatataatttcttcagagaatgttaaaaaaattggctcttatattcaaagagatttacattttttaaactgtaaaataaagggcgatgtatttgatgttagtctcgcatcttatcttttgaaccctgaaagacaaaatcactctcttgatattttgataggagagtatctaaataaaacctcttttattcctcaaaaatacgctggttatctttttccgttaaagtctattcttgaggagaggataaagaatgaagggttagaatttgtactttataacatagagattccattaatccctgtactttactccatggagaagtgggggataaaggtagataaggaatatttaaaacagctttctgatgaattctgcgagagaattaaaaaattggaagaagagatatatgaacttgcaggaaccagatttaatctcaattctccaaaacaactttctgaagttttatttgagaggttaaaacttccttctggtaagaaaggaaaaacaggatattctacgtcgtcttctgtgcttcaaaacttaataaatgctcatcctatagtgagaaaaatcctccaatatagagaactctataaattgaagagtacttatgtggatgctattcctaatctggttaatccacaaacaggtagagttcatacaaaatttaatcctacaggtacagctacaggaagaataagtagtagtgaacctaatcttcagaatattcctataaaaagtgaagaaggtagaaagataagaagagccttcgtgtcagaagatggatattttcttgtatctcttgattattctcagatagagctaaggattatggctcatctttctcaggagcctaaattaatatctgccttccaaaaaggagaggatattcatagaagaacagcatcggagatttttggagtgccagaggaagaagttgatgatcttttaaggtcaagggcaaaggccgttaattttggaattatttatggtatctcttcttttggactttctgagactgtaagtattacaccagaagaggcagagaaatttatagactcgtattttaagcactatccaagagtgaagctttttatagataagactattcatgaggcaagagaaaaactgtacgttaaaaccttatttggcagaaaaagatatattcctgagattcaaagcataaataaacaggtaaggaatgcctatgaaaggatagcaataaatgcgccaattcagggaacagctgctgatattataaaacttgccatgatagaaatttacaaggagattgaaaataaaaatctcaagtcaagaatactccttcaaattcatgatgagcttattcttgaagtgccagaggaggagatggaatttactcctttaatggcaaaggaaaaaatggaaaaggtggtagaactttcggttcctcttgtagttgaaatctcggtaggtaaaaatcttgctgaattaaaatgagctataagattggtcgac

SEQ ID NO: 2031 - DNA, 2673 bp, Artificial Sequence
  Description of Artificial Sequence: Synthetic DNA sequence of Dictyoglomus thermophilum DNA K785G
atgaaatacctgctgccgaccgctgctgctggtctgctgctcctcgctgcccagccggcgatggccatggatatcggaattaattcggatccgaaatctctgtgggatctttttcaagaaaataccgagaaagagtccaaaaggaagattctgattattgatggctcaagcctcatatacagggtttattacgcccttccccctttaaagacaaaaaatggtgaattaactaatgctctttatggcttcataagaatacttttaaaggccgtagaagattttaatcctgatcttgtaggcgttgcctttgatagacctgaacctacttttaggcatgtgatttataaagagtataaggctaagagaccacctatgaaggatgatttgaaagcgcagataccatggataagagaatttctaaggttaaatgatatacctctattggaagagcctggctatgaagcggatgatataatagctactatagtgaataaatataaggatgatttaaaatatattctctctggagatttagatcttttgcaattagtctcggacaaaacctttctaatacatcctcaaaagggaattactgagtttactatttatgatccaaaagctgtaaaggataggtttggagtagagccctataagattcccttatacaaagtattagtaggggacgaatctgataatattccaggagtaaatggaataggtcctaaaaaggcctcaaagattcttgagaaaatttcaagtgtagatgaatttaaaagtaaaataaaagttttggatagtgatttaagggagcttattgagaaaaattggaatattattgaaagaaatttagaacttgttactttaaaaaatatagataaggatcttattcttaaacccttcgagattaaaagagatgaaaaagtaatagattttttgaagagatatgaacttaagagtattcttcaaaagttatttcctgatcttcaagaggaagaaaatatagagattaaagatgtcgaagagatcaattttaatgaggtagaaaaagaaggctactttgcctttaaatgtcttggagatagggcttttgagggtatttctctttccttcaaggagggggaaggatattttatatctccttttgatttcaataatgagataagaaagaagattgaaaatataatttcttcagagaatgttaaaaaaattggctcttatattcaaagagatttacattttttaaactgtaaaataaagggcgatgtatttgatgttagtctcgcatcttatcttttgaaccctgaaagacaaaatcactctcttgatattttgataggagagtatctaaataaaacctcttttattcctcaaaaatacgctggttatctttttccgttaaagtctattcttgaggagaggataaagaatgaagggttagaatttgtactttataacatagagattccattaatccctgtactttactccatggagaagtgggggataaaggtagataaggaatatttaaaacagctttctgatgaattctgcgagagaattaaaaaattggaagaagagatatatgaacttgcaggaaccagatttaatctcaattctccaaaacaactttctgaagttttatttgagaggttaaaacttccttctggtaagaaaggaaaaacaggatattctacgtcgtcttctgtgcttcaaaacttaataaatgctcatcctatagtgagaaaaatcctccaatatagagaactctataaattgaagagtacttatgtggatgctattcctaatctggttaatccacaaacaggtagagttcatacaaaatttaatcctacaggtacagctacaggaagaataagtagtagtgaacctaatcttcagaatattcctataaaaagtgaagaaggtagaaagataagaagagccttcgtgtcagaagatggatattttcttgtatctcttgattattctcagatagagctaaggattatggctcatctttctcaggagcctaaattaatatctgccttccaaaaaggagaggatattcatagaagaacagcatcggagatttttggagtgccagaggaagaagttgatgatcttttaaggtcaagggcaaaggccgttaattttggaattatttatggtatctcttcttttggactttctgagactgtaagtattacaccagaagaggcagagaaatttatagactcgtattttaagcactatccaagagtgaagctttttatagataagactattcatgaggcaagagaaaaactgtacgttaaaaccttatttggcagaaaaagatatattcctgagattggtagcataaataaacaggtaaggaatgcctatgaaaggatagcaataaatgcgccaattcagggaacagctgctgatattataaaacttgccatgatagaaatttacaaggagattgaaaataaaaatctcaagtcaagaatactccttcaaattcatgatgagcttattcttgaagtgccagaggaggagatggaatttactcctttaatggcaaaggaaaaaatggaaaaggtggtagaactttcggttcctcttgtagttgaaatctcggtaggtaaaaatcttgctgaattaaaatgagctataagattggtcgac

SEQ ID NO: 2032 - DNA, 2673 bp, Artificial Sequence
  Description of Artificial Sequence: Synthetic DNA sequence of Dictyoglomus thermophilum DNA K785H
atgaaatacctgctgccgaccgctgctgctggtctgctgctcctcgctgcccagccggcgatggccatggatatcggaattaattcggatccgaaatctctgtgggatctttttcaagaaaataccgagaaagagtccaaaaggaagattctgattattgatggctcaagcctcatatacagggtttattacgcccttccccctttaaagacaaaaaatggtgaattaactaatgctctttatggcttcataagaatacttttaaaggccgtagaagattttaatcctgatcttgtaggcgttgcctttgatagacctgaacctacttttaggcatgtgatttataaagagtataaggctaagagaccacctatgaaggatgatttgaaagcgcagataccatggataagagaatttctaaggttaaatgatatacctctattggaagagcctggctatgaagcggatgatataatagctactatagtgaataaatataaggatgatttaaaatatattctctctggagatttagatcttttgcaattagtctcggacaaaacctttctaatacatcctcaaaagggaattactgagtttactatttatgatccaaaagctgtaaaggataggtttggagtagagccctataagattcccttatacaaagtattagtaggggacgaatctgataatattccaggagtaaatggaataggtcctaaaaaggcctcaaagattcttgagaaaatttcaagtgtagatgaatttaaaagtaaaataaaagttttggatagtgatttaagggagcttattgagaaaaattggaatattattgaaagaaatttagaacttgttactttaaaaaatatagataaggatcttattcttaaacccttcgagattaaaagagatgaaaaagtaatagattttttgaagagatatgaacttaagagtattcttcaaaagttatttcctgatcttcaagaggaagaaaatatagagattaaagatgtcgaagagatcaattttaatgaggtagaaaaagaaggctactttgcctttaaatgtcttggagatagggcttttgagggtatttctctttccttcaaggagggggaaggatattttatatctccttttgatttcaataatgagataagaaagaagattgaaaatataatttcttcagagaatgttaaaaaaattggctcttatattcaaagagatttacattttttaaactgtaaaataaagggcgatgtatttgatgttagtctcgcatcttatcttttgaaccctgaaagacaaaatcactctcttgatattttgataggagagtatctaaataaaacctcttttattcctcaaaaatacgctggttatctttttccgttaaagtctattcttgaggagaggataaagaatgaagggttagaatttgtactttataacatagagattccattaatccctgtactttactccatggagaagtgggggataaaggtagataaggaatatttaaaacagctttctgatgaattctgcgagagaattaaaaaattggaagaagagatatatgaacttgcaggaaccagatttaatctcaattctccaaaacaactttctgaagttttatttgagaggttaaaacttccttctggtaagaaaggaaaaacaggatattctacgtcgtcttctgtgcttcaaaacttaataaatgctcatcctatagtgagaaaaatcctccaatatagagaactctataaattgaagagtacttatgtggatgctattcctaatctggttaatccacaaacaggtagagttcatacaaaatttaatcctacaggtacagctacaggaagaataagtagtagtgaacctaatcttcagaatattcctataaaaagtgaagaaggtagaaagataagaagagccttcgtgtcagaagatggatattttcttgtatctcttgattattctcagatagagctaaggattatggctcatctttctcaggagcctaaattaatatctgccttccaaaaaggagaggatattcatagaagaacagcatcggagatttttggagtgccagaggaagaagttgatgatcttttaaggtcaagggcaaaggccgttaattttggaattatttatggtatctcttcttttggactttctgagactgtaagtattacaccagaagaggcagagaaatttatagactcgtattttaagcactatccaagagtgaagctttttatagataagactattcatgaggcaagagaaaaactgtacgttaaaaccttatttggcagaaaaagatatattcctgagattcatagcataaataaacaggtaaggaatgcctatgaaaggatagcaataaatgcgccaattcagggaacagctgctgatattataaaacttgccatgatagaaatttacaaggagattgaaaataaaaatctcaagtcaagaatactccttcaaattcatgatgagcttattcttgaagtgccagaggaggagatggaatttactcctttaatggcaaaggaaaaaatggaaaaggtggtagaactttcggttcctcttgtagttgaaatctcggtaggtaaaaatcttgctgaattaaaatgagctataagattggtcgac

SEQ ID NO: 2033 - DNA, 2673 bp, Artificial Sequence
  Description of Artificial Sequence: Synthetic DNA sequence of Dictyoglomus thermophilum DNA K785I
atgaaatacctgctgccgaccgctgctgctggtctgctgctcctcgctgcccagccggcgatggccatggatatcggaattaattcggatccgaaatctctgtgggatctttttcaagaaaataccgagaaagagtccaaaaggaagattctgattattgatggctcaagcctcatatacagggtttattacgcccttccccctttaaagacaaaaaatggtgaattaactaatgctctttatggcttcataagaatacttttaaaggccgtagaagattttaatcctgatcttgtaggcgttgcctttgatagacctgaacctacttttaggcatgtgatttataaagagtataaggctaagagaccacctatgaaggatgatttgaaagcgcagataccatggataagagaatttctaaggttaaatgatatacctctattggaagagcctggctatgaagcggatgatataatagctactatagtgaataaatataaggatgatttaaaatatattctctctggagatttagatcttttgcaattagtctcggacaaaacctttctaatacatcctcaaaagggaattactgagtttactatttatgatccaaaagctgtaaaggataggtttggagtagagccctataagattcccttatacaaagtattagtaggggacgaatctgataatattccaggagtaaatggaataggtcctaaaaaggcctcaaagattcttgagaaaatttcaagtgtagatgaatttaaaagtaaaataaaagttttggatagtgatttaagggagcttattgagaaaaattggaatattattgaaagaaatttagaacttgttactttaaaaaatatagataaggatcttattcttaaacccttcgagattaaaagagatgaaaaagtaatagattttttgaagagatatgaacttaagagtattcttcaaaagttatttcctgatcttcaagaggaagaaaatatagagattaaagatgtcgaagagatcaattttaatgaggtagaaaaagaaggctactttgcctttaaatgtcttggagatagggcttttgagggtatttctctttccttcaaggagggggaaggatattttatatctccttttgatttcaataatgagataagaaagaagattgaaaatataatttcttcagagaatgttaaaaaaattggctcttatattcaaagagatttacattttttaaactgtaaaataaagggcgatgtatttgatgttagtctcgcatcttatcttttgaaccctgaaagacaaaatcactctcttgatattttgataggagagtatctaaataaaacctcttttattcctcaaaaatacgctggttatctttttccgttaaagtctattcttgaggagaggataaagaatgaagggttagaatttgtactttataacatagagattccattaatccctgtactttactccatggagaagtgggggataaaggtagataaggaatatttaaaacagctttctgatgaattctgcgagagaattaaaaaattggaagaagagatatatgaacttgcaggaaccagatttaatctcaattctccaaaacaactttctgaagttttatttgagaggttaaaacttccttctggtaagaaaggaaaaacaggatattctacgtcgtcttctgtgcttcaaaacttaataaatgctcatcctatagtgagaaaaatcctccaatatagagaactctataaattgaagagtacttatgtggatgctattcctaatctggttaatccacaaacaggtagagttcatacaaaatttaatcctacaggtacagctacaggaagaataagtagtagtgaacctaatcttcagaatattcctataaaaagtgaagaaggtagaaagataagaagagccttcgtgtcagaagatggatattttcttgtatctcttgattattctcagatagagctaaggattatggctcatctttctcaggagcctaaattaatatctgccttccaaaaaggagaggatattcatagaagaacagcatcggagatttttggagtgccagaggaagaagttgatgatcttttaaggtcaagggcaaaggccgttaattttggaattatttatggtatctcttcttttggactttctgagactgtaagtattacaccagaagaggcagagaaatttatagactcgtattttaagcactatccaagagtgaagctttttatagataagactattcatgaggcaagagaaaaactgtacgttaaaaccttatttggcagaaaaagatatattcctgagattattagcataaataaacaggtaaggaatgcctatgaaaggatagcaataaatgcgccaattcagggaacagctgctgatattataaaacttgccatgatagaaatttacaaggagattgaaaataaaaatctcaagtcaagaatactccttcaaattcatgatgagcttattcttgaagtgccagaggaggagatggaatttactcctttaatggcaaaggaaaaaatggaaaaggtggtagaactttcggttcctcttgtagttgaaatctcggtaggtaaaaatcttgctgaattaaaatgagctataagattggtcgac

SEQ ID NO: 2034 - DNA, 2673 bp, Artificial Sequence
  Description of Artificial Sequence: Synthetic DNA sequence of Dictyoglomus thermophilum DNA K785L
atgaaatacctgctgccgaccgctgctgctggtctgctgctcctcgctgcccagccggcgatggccatggatatcggaattaattcggatccgaaatctctgtgggatctttttcaagaaaataccgagaaagagtccaaaaggaagattctgattattgatggctcaagcctcatatacagggtttattacgcccttccccctttaaagacaaaaaatggtgaattaactaatgctctttatggcttcataagaatacttttaaaggccgtagaagattttaatcctgatcttgtaggcgttgcctttgatagacctgaacctacttttaggcatgtgatttataaagagtataaggctaagagaccacctatgaaggatgatttgaaagcgcagataccatggataagagaatttctaaggttaaatgatatacctctattggaagagcctggctatgaagcggatgatataatagctactatagtgaataaatataaggatgatttaaaatatattctctctggagatttagatcttttgcaattagtctcggacaaaacctttctaatacatcctcaaaagggaattactgagtttactatttatgatccaaaagctgtaaaggataggtttggagtagagccctataagattcccttatacaaagtattagtaggggacgaatctgataatattccaggagtaaatggaataggtcctaaaaaggcctcaaagattcttgagaaaatttcaagtgtagatgaatttaaaagtaaaataaaagttttggatagtgatttaagggagcttattgagaaaaattggaatattattgaaagaaatttagaacttgttactttaaaaaatatagataaggatcttattcttaaacccttcgagattaaaagagatgaaaaagtaatagattttttgaagagatatgaacttaagagtattcttcaaaagttatttcctgatcttcaagaggaagaaaatatagagattaaagatgtcgaagagatcaattttaatgaggtagaaaaagaaggctactttgcctttaaatgtcttggagatagggcttttgagggtatttctctttccttcaaggagggggaaggatattttatatctccttttgatttcaataatgagataagaaagaagattgaaaatataatttcttcagagaatgttaaaaaaattggctcttatattcaaagagatttacattttttaaactgtaaaataaagggcgatgtatttgatgttagtctcgcatcttatcttttgaaccctgaaagacaaaatcactctcttgatattttgataggagagtatctaaataaaacctcttttattcctcaaaaatacgctggttatctttttccgttaaagtctattcttgaggagaggataaagaatgaagggttagaatttgtactttataacatagagattccattaatccctgtactttactccatggagaagtgggggataaaggtagataaggaatatttaaaacagctttctgatgaattctgcgagagaattaaaaaattggaagaagagatatatgaacttgcaggaaccagatttaatctcaattctccaaaacaactttctgaagttttatttgagaggttaaaacttccttctggtaagaaaggaaaaacaggatattctacgtcgtcttctgtgcttcaaaacttaataaatgctcatcctatagtgagaaaaatcctccaatatagagaactctataaattgaagagtacttatgtggatgctattcctaatctggttaatccacaaacaggtagagttcatacaaaatttaatcctacaggtacagctacaggaagaataagtagtagtgaacctaatcttcagaatattcctataaaaagtgaagaaggtagaaagataagaagagccttcgtgtcagaagatggatattttcttgtatctcttgattattctcagatagagctaaggattatggctcatctttctcaggagcctaaattaatatctgccttccaaaaaggagaggatattcatagaagaacagcatcggagatttttggagtgccagaggaagaagttgatgatcttttaaggtcaagggcaaaggccgttaattttggaattatttatggtatctcttcttttggactttctgagactgtaagtattacaccagaagaggcagagaaatttatagactcgtattttaagcactatccaagagtgaagctttttatagataagactattcatgaggcaagagaaaaactgtacgttaaaaccttatttggcagaaaaagatatattcctgagattcttagcataaataaacaggtaaggaatgcctatgaaaggatagcaataaatgcgccaattcagggaacagctgctgatattataaaacttgccatgatagaaatttacaaggagattgaaaataaaaatctcaagtcaagaatactccttcaaattcatgatgagcttattcttgaagtgccagaggaggagatggaatttactcctttaatggcaaaggaaaaaatggaaaaggtggtagaactttcggttcctcttgtagttgaaatctcggtaggtaaaaatcttgctgaattaaaatgagctataagattggtcgac

SEQ ID NO: 2035 - DNA, 2673 bp, Artificial Sequence
  Description of Artificial Sequence: Synthetic DNA sequence of Dictyoglomus thermophilum DNA K785M
atgaaatacctgctgccgaccgctgctgctggtctgctgctcctcgctgcccagccggcgatggccatggatatcggaattaattcggatccgaaatctctgtgggatctttttcaagaaaataccgagaaagagtccaaaaggaagattctgattattgatggctcaagcctcatatacagggtttattacgcccttccccctttaaagacaaaaaatggtgaattaactaatgctctttatggcttcataagaatacttttaaaggccgtagaagattttaatcctgatcttgtaggcgttgcctttgatagacctgaacctacttttaggcatgtgatttataaagagtataaggctaagagaccacctatgaaggatgatttgaaagcgcagataccatggataagagaatttctaaggttaaatgatatacctctattggaagagcctggctatgaagcggatgatataatagctactatagtgaataaatataaggatgatttaaaatatattctctctggagatttagatcttttgcaattagtctcggacaaaacctttctaatacatcctcaaaagggaattactgagtttactatttatgatccaaaagctgtaaaggataggtttggagtagagccctataagattcccttatacaaagtattagtaggggacgaatctgataatattccaggagtaaatggaataggtcctaaaaaggcctcaaagattcttgagaaaatttcaagtgtagatgaatttaaaagtaaaataaaagttttggatagtgatttaagggagcttattgagaaaaattggaatattattgaaagaaatttagaacttgttactttaaaaaatatagataaggatcttattcttaaacccttcgagattaaaagagatgaaaaagtaatagattttttgaagagatatgaacttaagagtattcttcaaaagttatttcctgatcttcaagaggaagaaaatatagagattaaagatgtcgaagagatcaattttaatgaggtagaaaaagaaggctactttgcctttaaatgtcttggagatagggcttttgagggtatttctctttccttcaaggagggggaaggatattttatatctccttttgatttcaataatgagataagaaagaagattgaaaatataatttcttcagagaatgttaaaaaaattggctcttatattcaaagagatttacattttttaaactgtaaaataaagggcgatgtatttgatgttagtctcgcatcttatcttttgaaccctgaaagacaaaatcactctcttgatattttgataggagagtatctaaataaaacctcttttattcctcaaaaatacgctggttatctttttccgttaaagtctattcttgaggagaggataaagaatgaagggttagaatttgtactttataacatagagattccattaatccctgtactttactccatggagaagtgggggataaaggtagataaggaatatttaaaacagctttctgatgaattctgcgagagaattaaaaaattggaagaagagatatatgaacttgcaggaaccagatttaatctcaattctccaaaacaactttctgaagttttatttgagaggttaaaacttccttctggtaagaaaggaaaaacaggatattctacgtcgtcttctgtgcttcaaaacttaataaatgctcatcctatagtgagaaaaatcctccaatatagagaactctataaattgaagagtacttatgtggatgctattcctaatctggttaatccacaaacaggtagagttcatacaaaatttaatcctacaggtacagctacaggaagaataagtagtagtgaacctaatcttcagaatattcctataaaaagtgaagaaggtagaaagataagaagagccttcgtgtcagaagatggatattttcttgtatctcttgattattctcagatagagctaaggattatggctcatctttctcaggagcctaaattaatatctgccttccaaaaaggagaggatattcatagaagaacagcatcggagatttttggagtgccagaggaagaagttgatgatcttttaaggtcaagggcaaaggccgttaattttggaattatttatggtatctcttcttttggactttctgagactgtaagtattacaccagaagaggcagagaaatttatagactcgtattttaagcactatccaagagtgaagctttttatagataagactattcatgaggcaagagaaaaactgtacgttaaaaccttatttggcagaaaaagatatattcctgagattatgagcataaataaacaggtaaggaatgcctatgaaaggatagcaataaatgcgccaattcagggaacagctgctgatattataaaacttgccatgatagaaatttacaaggagattgaaaataaaaatctcaagtcaagaatactccttcaaattcatgatgagcttattcttgaagtgccagaggaggagatggaatttactcctttaatggcaaaggaaaaaatggaaaaggtggtagaactttcggttcctcttgtagttgaaatctcggtaggtaaaaatcttgctgaattaaaatgagctataagattggtcgac

SEQ ID NO: 2036 - DNA, 2673 bp, Artificial Sequence
  Description of Artificial Sequence: Synthetic DNA sequence of Dictyoglomus thermophilum DNA K785F
atgaaatacctgctgccgaccgctgctgctggtctgctgctcctcgctgcccagccggcgatggccatggatatcggaattaattcggatccgaaatctctgtgggatctttttcaagaaaataccgagaaagagtccaaaaggaagattctgattattgatggctcaagcctcatatacagggtttattacgcccttccccctttaaagacaaaaaatggtgaattaactaatgctctttatggcttcataagaatacttttaaaggccgtagaagattttaatcctgatcttgtaggcgttgcctttgatagacctgaacctacttttaggcatgtgatttataaagagtataaggctaagagaccacctatgaaggatgatttgaaagcgcagataccatggataagagaatttctaaggttaaatgatatacctctattggaagagcctggctatgaagcggatgatataatagctactatagtgaataaatataaggatgatttaaaatatattctctctggagatttagatcttttgcaattagtctcggacaaaacctttctaatacatcctcaaaagggaattactgagtttactatttatgatccaaaagctgtaaaggataggtttggagtagagccctataagattcccttatacaaagtattagtaggggacgaatctgataatattccaggagtaaatggaataggtcctaaaaaggcctcaaagattcttgagaaaatttcaagtgtagatgaatttaaaagtaaaataaaagttttggatagtgatttaagggagcttattgagaaaaattggaatattattgaaagaaatttagaacttgttactttaaaaaatatagataaggatcttattcttaaacccttcgagattaaaagagatgaaaaagtaatagattttttgaagagatatgaacttaagagtattcttcaaaagttatttcctgatcttcaagaggaagaaaatatagagattaaagatgtcgaagagatcaattttaatgaggtagaaaaagaaggctactttgcctttaaatgtcttggagatagggcttttgagggtatttctctttccttcaaggagggggaaggatattttatatctccttttgatttcaataatgagataagaaagaagattgaaaatataatttcttcagagaatgttaaaaaaattggctcttatattcaaagagatttacattttttaaactgtaaaataaagggcgatgtatttgatgttagtctcgcatcttatcttttgaaccctgaaagacaaaatcactctcttgatattttgataggagagtatctaaataaaacctcttttattcctcaaaaatacgctggttatctttttccgttaaagtctattcttgaggagaggataaagaatgaagggttagaatttgtactttataacatagagattccattaatccctgtactttactccatggagaagtgggggataaaggtagataaggaatatttaaaacagctttctgatgaattctgcgagagaattaaaaaattggaagaagagatatatgaacttgcaggaaccagatttaatctcaattctccaaaacaactttctgaagttttatttgagaggttaaaacttccttctggtaagaaaggaaaaacaggatattctacgtcgtcttctgtgcttcaaaacttaataaatgctcatcctatagtgagaaaaatcctccaatatagagaactctataaattgaagagtacttatgtggatgctattcctaatctggttaatccacaaacaggtagagttcatacaaaatttaatcctacaggtacagctacaggaagaataagtagtagtgaacctaatcttcagaatattcctataaaaagtgaagaaggtagaaagataagaagagccttcgtgtcagaagatggatattttcttgtatctcttgattattctcagatagagctaaggattatggctcatctttctcaggagcctaaattaatatctgccttccaaaaaggagaggatattcatagaagaacagcatcggagatttttggagtgccagaggaagaagttgatgatcttttaaggtcaagggcaaaggccgttaattttggaattatttatggtatctcttcttttggactttctgagactgtaagtattacaccagaagaggcagagaaatttatagactcgtattttaagcactatccaagagtgaagctttttatagataagactattcatgaggcaagagaaaaactgtacgttaaaaccttatttggcagaaaaagatatattcctgagatttttagcataaataaacaggtaaggaatgcctatgaaaggatagcaataaatgcgccaattcagggaacagctgctgatattataaaacttgccatgatagaaatttacaaggagattgaaaataaaaatctcaagtcaagaatactccttcaaattcatgatgagcttattcttgaagtgccagaggaggagatggaatttactcctttaatggcaaaggaaaaaatggaaaaggtggtagaactttcggttcctcttgtagttgaaatctcggtaggtaaaaatcttgctgaattaaaatgagctataagattggtcgac

SEQ ID NO: 2037 - DNA, 2673 bp, Artificial Sequence
  Description of Artificial Sequence: Synthetic DNA sequence of Dictyoglomus thermophilum DNA K785P
atgaaatacctgctgccgaccgctgctgctggtctgctgctcctcgctgcccagccggcgatggccatggatatcggaattaattcggatccgaaatctctgtgggatctttttcaagaaaataccgagaaagagtccaaaaggaagattctgattattgatggctcaagcctcatatacagggtttattacgcccttccccctttaaagacaaaaaatggtgaattaactaatgctctttatggcttcataagaatacttttaaaggccgtagaagattttaatcctgatcttgtaggcgttgcctttgatagacctgaacctacttttaggcatgtgatttataaagagtataaggctaagagaccacctatgaaggatgatttgaaagcgcagataccatggataagagaatttctaaggttaaatgatatacctctattggaagagcctggctatgaagcggatgatataatagctactatagtgaataaatataaggatgatttaaaatatattctctctggagatttagatcttttgcaattagtctcggacaaaacctttctaatacatcctcaaaagggaattactgagtttactatttatgatccaaaagctgtaaaggataggtttggagtagagccctataagattcccttatacaaagtattagtaggggacgaatctgataatattccaggagtaaatggaataggtcctaaaaaggcctcaaagattcttgagaaaatttcaagtgtagatgaatttaaaagtaaaataaaagttttggatagtgatttaagggagcttattgagaaaaattggaatattattgaaagaaatttagaacttgttactttaaaaaatatagataaggatcttattcttaaacccttcgagattaaaagagatgaaaaagtaatagattttttgaagagatatgaacttaagagtattcttcaaaagttatttcctgatcttcaagaggaagaaaatatagagattaaagatgtcgaagagatcaattttaatgaggtagaaaaagaaggctactttgcctttaaatgtcttggagatagggcttttgagggtatttctctttccttcaaggagggggaaggatattttatatctccttttgatttcaataatgagataagaaagaagattgaaaatataatttcttcagagaatgttaaaaaaattggctcttatattcaaagagatttacattttttaaactgtaaaataaagggcgatgtatttgatgttagtctcgcatcttatcttttgaaccctgaaagacaaaatcactctcttgatattttgataggagagtatctaaataaaacctcttttattcctcaaaaatacgctggttatctttttccgttaaagtctattcttgaggagaggataaagaatgaagggttagaatttgtactttataacatagagattccattaatccctgtactttactccatggagaagtgggggataaaggtagataaggaatatttaaaacagctttctgatgaattctgcgagagaattaaaaaattggaagaagagatatatgaacttgcaggaaccagatttaatctcaattctccaaaacaactttctgaagttttatttgagaggttaaaacttccttctggtaagaaaggaaaaacaggatattctacgtcgtcttctgtgcttcaaaacttaataaatgctcatcctatagtgagaaaaatcctccaatatagagaactctataaattgaagagtacttatgtggatgctattcctaatctggttaatccacaaacaggtagagttcatacaaaatttaatcctacaggtacagctacaggaagaataagtagtagtgaacctaatcttcagaatattcctataaaaagtgaagaaggtagaaagataagaagagccttcgtgtcagaagatggatattttcttgtatctcttgattattctcagatagagctaaggattatggctcatctttctcaggagcctaaattaatatctgccttccaaaaaggagaggatattcatagaagaacagcatcggagatttttggagtgccagaggaagaagttgatgatcttttaaggtcaagggcaaaggccgttaattttggaattatttatggtatctcttcttttggactttctgagactgtaagtattacaccagaagaggcagagaaatttatagactcgtattttaagcactatccaagagtgaagctttttatagataagactattcatgaggcaagagaaaaactgtacgttaaaaccttatttggcagaaaaagatatattcctgagattcctagcataaataaacaggtaaggaatgcctatgaaaggatagcaataaatgcgccaattcagggaacagctgctgatattataaaacttgccatgatagaaatttacaaggagattgaaaataaaaatctcaagtcaagaatactccttcaaattcatgatgagcttattcttgaagtgccagaggaggagatggaatttactcctttaatggcaaaggaaaaaatggaaaaggtggtagaactttcggttcctcttgtagttgaaatctcggtaggtaaaaatcttgctgaattaaaatgagctataagattggtcgac

SEQ ID NO: 2038 - DNA, 2673 bp, Artificial Sequence
  Description of Artificial Sequence: Synthetic DNA sequence of Dictyoglomus thermophilum DNA K785S
atgaaatacctgctgccgaccgctgctgctggtctgctgctcctcgctgcccagccggcgatggccatggatatcggaattaattcggatccgaaatctctgtgggatctttttcaagaaaataccgagaaagagtccaaaaggaagattctgattattgatggctcaagcctcatatacagggtttattacgcccttccccctttaaagacaaaaaatggtgaattaactaatgctctttatggcttcataagaatacttttaaaggccgtagaagattttaatcctgatcttgtaggcgttgcctttgatagacctgaacctacttttaggcatgtgatttataaagagtataaggctaagagaccacctatgaaggatgatttgaaagcgcagataccatggataagagaatttctaaggttaaatgatatacctctattggaagagcctggctatgaagcggatgatataatagctactatagtgaataaatataaggatgatttaaaatatattctctctggagatttagatcttttgcaattagtctcggacaaaacctttctaatacatcctcaaaagggaattactgagtttactatttatgatccaaaagctgtaaaggataggtttggagtagagccctataagattcccttatacaaagtattagtaggggacgaatctgataatattccaggagtaaatggaataggtcctaaaaaggcctcaaagattcttgagaaaatttcaagtgtagatgaatttaaaagtaaaataaaagttttggatagtgatttaagggagcttattgagaaaaattggaatattattgaaagaaatttagaacttgttactttaaaaaatatagataaggatcttattcttaaacccttcgagattaaaagagatgaaaaagtaatagattttttgaagagatatgaacttaagagtattcttcaaaagttatttcctgatcttcaagaggaagaaaatatagagattaaagatgtcgaagagatcaattttaatgaggtagaaaaagaaggctactttgcctttaaatgtcttggagatagggcttttgagggtatttctctttccttcaaggagggggaaggatattttatatctccttttgatttcaataatgagataagaaagaagattgaaaatataatttcttcagagaatgttaaaaaaattggctcttatattcaaagagatttacattttttaaactgtaaaataaagggcgatgtatttgatgttagtctcgcatcttatcttttgaaccctgaaagacaaaatcactctcttgatattttgataggagagtatctaaataaaacctcttttattcctcaaaaatacgctggttatctttttccgttaaagtctattcttgaggagaggataaagaatgaagggttagaatttgtactttataacatagagattccattaatccctgtactttactccatggagaagtgggggataaaggtagataaggaatatttaaaacagctttctgatgaattctgcgagagaattaaaaaattggaagaagagatatatgaacttgcaggaaccagatttaatctcaattctccaaaacaactttctgaagttttatttgagaggttaaaacttccttctggtaagaaaggaaaaacaggatattctacgtcgtcttctgtgcttcaaaacttaataaatgctcatcctatagtgagaaaaatcctccaatatagagaactctataaattgaagagtacttatgtggatgctattcctaatctggttaatccacaaacaggtagagttcatacaaaatttaatcctacaggtacagctacaggaagaataagtagtagtgaacctaatcttcagaatattcctataaaaagtgaagaaggtagaaagataagaagagccttcgtgtcagaagatggatattttcttgtatctcttgattattctcagatagagctaaggattatggctcatctttctcaggagcctaaattaatatctgccttccaaaaaggagaggatattcatagaagaacagcatcggagatttttggagtgccagaggaagaagttgatgatcttttaaggtcaagggcaaaggccgttaattttggaattatttatggtatctcttcttttggactttctgagactgtaagtattacaccagaagaggcagagaaatttatagactcgtattttaagcactatccaagagtgaagctttttatagataagactattcatgaggcaagagaaaaactgtacgttaaaaccttatttggcagaaaaagatatattcctgagatttctagcataaataaacaggtaaggaatgcctatgaaaggatagcaataaatgcgccaattcagggaacagctgctgatattataaaacttgccatgatagaaatttacaaggagattgaaaataaaaatctcaagtcaagaatactccttcaaattcatgatgagcttattcttgaagtgccagaggaggagatggaatttactcctttaatggcaaaggaaaaaatggaaaaggtggtagaactttcggttcctcttgtagttgaaatctcggtaggtaaaaatcttgctgaattaaaatgagctataagattggtcgac

SEQ ID NO: 2039 - DNA, 2673 bp, Artificial Sequence
  Description of Artificial Sequence: Synthetic DNA sequence of Dictyoglomus thermophilum DNA K785T
atgaaatacctgctgccgaccgctgctgctggtctgctgctcctcgctgcccagccggcgatggccatggatatcggaattaattcggatccgaaatctctgtgggatctttttcaagaaaataccgagaaagagtccaaaaggaagattctgattattgatggctcaagcctcatatacagggtttattacgcccttccccctttaaagacaaaaaatggtgaattaactaatgctctttatggcttcataagaatacttttaaaggccgtagaagattttaatcctgatcttgtaggcgttgcctttgatagacctgaacctacttttaggcatgtgatttataaagagtataaggctaagagaccacctatgaaggatgatttgaaagcgcagataccatggataagagaatttctaaggttaaatgatatacctctattggaagagcctggctatgaagcggatgatataatagctactatagtgaataaatataaggatgatttaaaatatattctctctggagatttagatcttttgcaattagtctcggacaaaacctttctaatacatcctcaaaagggaattactgagtttactatttatgatccaaaagctgtaaaggataggtttggagtagagccctataagattcccttatacaaagtattagtaggggacgaatctgataatattccaggagtaaatggaataggtcctaaaaaggcctcaaagattcttgagaaaatttcaagtgtagatgaatttaaaagtaaaataaaagttttggatagtgatttaagggagcttattgagaaaaattggaatattattgaaagaaatttagaacttgttactttaaaaaatatagataaggatcttattcttaaacccttcgagattaaaagagatgaaaaagtaatagattttttgaagagatatgaacttaagagtattcttcaaaagttatttcctgatcttcaagaggaagaaaatatagagattaaagatgtcgaagagatcaattttaatgaggtagaaaaagaaggctactttgcctttaaatgtcttggagatagggcttttgagggtatttctctttccttcaaggagggggaaggatattttatatctccttttgatttcaataatgagataagaaagaagattgaaaatataatttcttcagagaatgttaaaaaaattggctcttatattcaaagagatttacattttttaaactgtaaaataaagggcgatgtatttgatgttagtctcgcatcttatcttttgaaccctgaaagacaaaatcactctcttgatattttgataggagagtatctaaataaaacctcttttattcctcaaaaatacgctggttatctttttccgttaaagtctattcttgaggagaggataaagaatgaagggttagaatttgtactttataacatagagattccattaatccctgtactttactccatggagaagtgggggataaaggtagataaggaatatttaaaacagctttctgatgaattctgcgagagaattaaaaaattggaagaagagatatatgaacttgcaggaaccagatttaatctcaattctccaaaacaactttctgaagttttatttgagaggttaaaacttccttctggtaagaaaggaaaaacaggatattctacgtcgtcttctgtgcttcaaaacttaataaatgctcatcctatagtgagaaaaatcctccaatatagagaactctataaattgaagagtacttatgtggatgctattcctaatctggttaatccacaaacaggtagagttcatacaaaatttaatcctacaggtacagctacaggaagaataagtagtagtgaacctaatcttcagaatattcctataaaaagtgaagaaggtagaaagataagaagagccttcgtgtcagaagatggatattttcttgtatctcttgattattctcagatagagctaaggattatggctcatctttctcaggagcctaaattaatatctgccttccaaaaaggagaggatattcatagaagaacagcatcggagatttttggagtgccagaggaagaagttgatgatcttttaaggtcaagggcaaaggccgttaattttggaattatttatggtatctcttcttttggactttctgagactgtaagtattacaccagaagaggcagagaaatttatagactcgtattttaagcactatccaagagtgaagctttttatagataagactattcatgaggcaagagaaaaactgtacgttaaaaccttatttggcagaaaaagatatattcctgagattactagcataaataaacaggtaaggaatgcctatgaaaggatagcaataaatgcgccaattcagggaacagctgctgatattataaaacttgccatgatagaaatttacaaggagattgaaaataaaaatctcaagtcaagaatactccttcaaattcatgatgagcttattcttgaagtgccagaggaggagatggaatttactcctttaatggcaaaggaaaaaatggaaaaggtggtagaactttcggttcctcttgtagttgaaatctcggtaggtaaaaatcttgctgaattaaaatgagctataagattggtcgac

SEQ ID NO: 2040 - DNA, 2673 bp, Artificial Sequence
  Description of Artificial Sequence: Synthetic DNA sequence of Dictyoglomus thermophilum DNA K785W
atgaaatacctgctgccgaccgctgctgctggtctgctgctcctcgctgcccagccggcgatggccatggatatcggaattaattcggatccgaaatctctgtgggatctttttcaagaaaataccgagaaagagtccaaaaggaagattctgattattgatggctcaagcctcatatacagggtttattacgcccttccccctttaaagacaaaaaatggtgaattaactaatgctctttatggcttcataagaatacttttaaaggccgtagaagattttaatcctgatcttgtaggcgttgcctttgatagacctgaacctacttttaggcatgtgatttataaagagtataaggctaagagaccacctatgaaggatgatttgaaagcgcagataccatggataagagaatttctaaggttaaatgatatacctctattggaagagcctggctatgaagcggatgatataatagctactatagtgaataaatataaggatgatttaaaatatattctctctggagatttagatcttttgcaattagtctcggacaaaacctttctaatacatcctcaaaagggaattactgagtttactatttatgatccaaaagctgtaaaggataggtttggagtagagccctataagattcccttatacaaagtattagtaggggacgaatctgataatattccaggagtaaatggaataggtcctaaaaaggcctcaaagattcttgagaaaatttcaagtgtagatgaatttaaaagtaaaataaaagttttggatagtgatttaagggagcttattgagaaaaattggaatattattgaaagaaatttagaacttgttactttaaaaaatatagataaggatcttattcttaaacccttcgagattaaaagagatgaaaaagtaatagattttttgaagagatatgaacttaagagtattcttcaaaagttatttcctgatcttcaagaggaagaaaatatagagattaaagatgtcgaagagatcaattttaatgaggtagaaaaagaaggctactttgcctttaaatgtcttggagatagggcttttgagggtatttctctttccttcaaggagggggaaggatattttatatctccttttgatttcaataatgagataagaaagaagattgaaaatataatttcttcagagaatgttaaaaaaattggctcttatattcaaagagatttacattttttaaactgtaaaataaagggcgatgtatttgatgttagtctcgcatcttatcttttgaaccctgaaagacaaaatcactctcttgatattttgataggagagtatctaaataaaacctcttttattcctcaaaaatacgctggttatctttttccgttaaagtctattcttgaggagaggataaagaatgaagggttagaatttgtactttataacatagagattccattaatccctgtactttactccatggagaagtgggggataaaggtagataaggaatatttaaaacagctttctgatgaattctgcgagagaattaaaaaattggaagaagagatatatgaacttgcaggaaccagatttaatctcaattctccaaaacaactttctgaagttttatttgagaggttaaaacttccttctggtaagaaaggaaaaacaggatattctacgtcgtcttctgtgcttcaaaacttaataaatgctcatcctatagtgagaaaaatcctccaatatagagaactctataaattgaagagtacttatgtggatgctattcctaatctggttaatccacaaacaggtagagttcatacaaaatttaatcctacaggtacagctacaggaagaataagtagtagtgaacctaatcttcagaatattcctataaaaagtgaagaaggtagaaagataagaagagccttcgtgtcagaagatggatattttcttgtatctcttgattattctcagatagagctaaggattatggctcatctttctcaggagcctaaattaatatctgccttccaaaaaggagaggatattcatagaagaacagcatcggagatttttggagtgccagaggaagaagttgatgatcttttaaggtcaagggcaaaggccgttaattttggaattatttatggtatctcttcttttggactttctgagactgtaagtattacaccagaagaggcagagaaatttatagactcgtattttaagcactatccaagagtgaagctttttatagataagactattcatgaggcaagagaaaaactgtacgttaaaaccttatttggcagaaaaagatatattcctgagatttggagcataaataaacaggtaaggaatgcctatgaaaggatagcaataaatgcgccaattcagggaacagctgctgatattataaaacttgccatgatagaaatttacaaggagattgaaaataaaaatctcaagtcaagaatactccttcaaattcatgatgagcttattcttgaagtgccagaggaggagatggaatttactcctttaatggcaaaggaaaaaatggaaaaggtggtagaactttcggttcctcttgtagttgaaatctcggtaggtaaaaatcttgctgaattaaaatgagctataagattggtcgac

SEQ ID NO: 2041 - DNA, 2673 bp, Artificial Sequence
  Description of Artificial Sequence: Synthetic DNA sequence of Dictyoglomus thermophilum DNA K785Y
atgaaatacctgctgccgaccgctgctgctggtctgctgctcctcgctgcccagccggcgatggccatggatatcggaattaattcggatccgaaatctctgtgggatctttttcaagaaaataccgagaaagagtccaaaaggaagattctgattattgatggctcaagcctcatatacagggtttattacgcccttccccctttaaagacaaaaaatggtgaattaactaatgctctttatggcttcataagaatacttttaaaggccgtagaagattttaatcctgatcttgtaggcgttgcctttgatagacctgaacctacttttaggcatgtgatttataaagagtataaggctaagagaccacctatgaaggatgatttgaaagcgcagataccatggataagagaatttctaaggttaaatgatatacctctattggaagagcctggctatgaagcggatgatataatagctactatagtgaataaatataaggatgatttaaaatatattctctctggagatttagatcttttgcaattagtctcggacaaaacctttctaatacatcctcaaaagggaattactgagtttactatttatgatccaaaagctgtaaaggataggtttggagtagagccctataagattcccttatacaaagtattagtaggggacgaatctgataatattccaggagtaaatggaataggtcctaaaaaggcctcaaagattcttgagaaaatttcaagtgtagatgaatttaaaagtaaaataaaagttttggatagtgatttaagggagcttattgagaaaaattggaatattattgaaagaaatttagaacttgttactttaaaaaatatagataaggatcttattcttaaacccttcgagattaaaagagatgaaaaagtaatagattttttgaagagatatgaacttaagagtattcttcaaaagttatttcctgatcttcaagaggaagaaaatatagagattaaagatgtcgaagagatcaattttaatgaggtagaaaaagaaggctactttgcctttaaatgtcttggagatagggcttttgagggtatttctctttccttcaaggagggggaaggatattttatatctccttttgatttcaataatgagataagaaagaagattgaaaatataatttcttcagagaatgttaaaaaaattggctcttatattcaaagagatttacattttttaaactgtaaaataaagggcgatgtatttgatgttagtctcgcatcttatcttttgaaccctgaaagacaaaatcactctcttgatattttgataggagagtatctaaataaaacctcttttattcctcaaaaatacgctggttatctttttccgttaaagtctattcttgaggagaggataaagaatgaagggttagaatttgtactttataacatagagattccattaatccctgtactttactccatggagaagtgggggataaaggtagataaggaatatttaaaacagctttctgatgaattctgcgagagaattaaaaaattggaagaagagatatatgaacttgcaggaaccagatttaatctcaattctccaaaacaactttctgaagttttatttgagaggttaaaacttccttctggtaagaaaggaaaaacaggatattctacgtcgtcttctgtgcttcaaaacttaataaatgctcatcctatagtgagaaaaatcctccaatatagagaactctataaattgaagagtacttatgtggatgctattcctaatctggttaatccacaaacaggtagagttcatacaaaatttaatcctacaggtacagctacaggaagaataagtagtagtgaacctaatcttcagaatattcctataaaaagtgaagaaggtagaaagataagaagagccttcgtgtcagaagatggatattttcttgtatctcttgattattctcagatagagctaaggattatggctcatctttctcaggagcctaaattaatatctgccttccaaaaaggagaggatattcatagaagaacagcatcggagatttttggagtgccagaggaagaagttgatgatcttttaaggtcaagggcaaaggccgttaattttggaattatttatggtatctcttcttttggactttctgagactgtaagtattacaccagaagaggcagagaaatttatagactcgtattttaagcactatccaagagtgaagctttttatagataagactattcatgaggcaagagaaaaactgtacgttaaaaccttatttggcagaaaaagatatattcctgagatttatagcataaataaacaggtaaggaatgcctatgaaaggatagcaataaatgcgccaattcagggaacagctgctgatattataaaacttgccatgatagaaatttacaaggagattgaaaataaaaatctcaagtcaagaatactccttcaaattcatgatgagcttattcttgaagtgccagaggaggagatggaatttactcctttaatggcaaaggaaaaaatggaaaaggtggtagaactttcggttcctcttgtagttgaaatctcggtaggtaaaaatcttgctgaattaaaatgagctataagattggtcgac

SEQ ID NO: 2042 - DNA, 2673 bp, Artificial Sequence
  Description of Artificial Sequence: Synthetic DNA sequence of Dictyoglomus thermophilum DNA K785V
atgaaatacctgctgccgaccgctgctgctggtctgctgctcctcgctgcccagccggcgatggccatggatatcggaattaattcggatccgaaatctctgtgggatctttttcaagaaaataccgagaaagagtccaaaaggaagattctgattattgatggctcaagcctcatatacagggtttattacgcccttccccctttaaagacaaaaaatggtgaattaactaatgctctttatggcttcataagaatacttttaaaggccgtagaagattttaatcctgatcttgtaggcgttgcctttgatagacctgaacctacttttaggcatgtgatttataaagagtataaggctaagagaccacctatgaaggatgatttgaaagcgcagataccatggataagagaatttctaaggttaaatgatatacctctattggaagagcctggctatgaagcggatgatataatagctactatagtgaataaatataaggatgatttaaaatatattctctctggagatttagatcttttgcaattagtctcggacaaaacctttctaatacatcctcaaaagggaattactgagtttactatttatgatccaaaagctgtaaaggataggtttggagtagagccctataagattcccttatacaaagtattagtaggggacgaatctgataatattccaggagtaaatggaataggtcctaaaaaggcctcaaagattcttgagaaaatttcaagtgtagatgaatttaaaagtaaaataaaagttttggatagtgatttaagggagcttattgagaaaaattggaatattattgaaagaaatttagaacttgttactttaaaaaatatagataaggatcttattcttaaacccttcgagattaaaagagatgaaaaagtaatagattttttgaagagatatgaacttaagagtattcttcaaaagttatttcctgatcttcaagaggaagaaaatatagagattaaagatgtcgaagagatcaattttaatgaggtagaaaaagaaggctactttgcctttaaatgtcttggagatagggcttttgagggtatttctctttccttcaaggagggggaaggatattttatatctccttttgatttcaataatgagataagaaagaagattgaaaatataatttcttcagagaatgttaaaaaaattggctcttatattcaaagagatttacattttttaaactgtaaaataaagggcgatgtatttgatgttagtctcgcatcttatcttttgaaccctgaaagacaaaatcactctcttgatattttgataggagagtatctaaataaaacctcttttattcctcaaaaatacgctggttatctttttccgttaaagtctattcttgaggagaggataaagaatgaagggttagaatttgtactttataacatagagattccattaatccctgtactttactccatggagaagtgggggataaaggtagataaggaatatttaaaacagctttctgatgaattctgcgagagaattaaaaaattggaagaagagatatatgaacttgcaggaaccagatttaatctcaattctccaaaacaactttctgaagttttatttgagaggttaaaacttccttctggtaagaaaggaaaaacaggatattctacgtcgtcttctgtgcttcaaaacttaataaatgctcatcctatagtgagaaaaatcctccaatatagagaactctataaattgaagagtacttatgtggatgctattcctaatctggttaatccacaaacaggtagagttcatacaaaatttaatcctacaggtacagctacaggaagaataagtagtagtgaacctaatcttcagaatattcctataaaaagtgaagaaggtagaaagataagaagagccttcgtgtcagaagatggatattttcttgtatctcttgattattctcagatagagctaaggattatggctcatctttctcaggagcctaaattaatatctgccttccaaaaaggagaggatattcatagaagaacagcatcggagatttttggagtgccagaggaagaagttgatgatcttttaaggtcaagggcaaaggccgttaattttggaattatttatggtatctcttcttttggactttctgagactgtaagtattacaccagaagaggcagagaaatttatagactcgtattttaagcactatccaagagtgaagctttttatagataagactattcatgaggcaagagaaaaactgtacgttaaaaccttatttggcagaaaaagatatattcctgagattgttagcataaataaacaggtaaggaatgcctatgaaaggatagcaataaatgcgccaattcagggaacagctgctgatattataaaacttgccatgatagaaatttacaaggagattgaaaataaaaatctcaagtcaagaatactccttcaaattcatgatgagcttattcttgaagtgccagaggaggagatggaatttactcctttaatggcaaaggaaaaaatggaaaaggtggtagaactttcggttcctcttgtagttgaaatctcggtaggtaaaaatcttgctgaattaaaatgagctataagattggtcgac

SEQ ID NO: 2043 - DNA, 2673 bp, Artificial Sequence
  Description of Artificial Sequence: Synthetic DNA sequence of Dictyoglomus thermophilum DNA S786A
atgaaatacctgctgccgaccgctgctgctggtctgctgctcctcgctgcccagccggcgatggccatggatatcggaattaattcggatccgaaatctctgtgggatctttttcaagaaaataccgagaaagagtccaaaaggaagattctgattattgatggctcaagcctcatatacagggtttattacgcccttccccctttaaagacaaaaaatggtgaattaactaatgctctttatggcttcataagaatacttttaaaggccgtagaagattttaatcctgatcttgtaggcgttgcctttgatagacctgaacctacttttaggcatgtgatttataaagagtataaggctaagagaccacctatgaaggatgatttgaaagcgcagataccatggataagagaatttctaaggttaaatgatatacctctattggaagagcctggctatgaagcggatgatataatagctactatagtgaataaatataaggatgatttaaaatatattctctctggagatttagatcttttgcaattagtctcggacaaaacctttctaatacatcctcaaaagggaattactgagtttactatttatgatccaaaagctgtaaaggataggtttggagtagagccctataagattcccttatacaaagtattagtaggggacgaatctgataatattccaggagtaaatggaataggtcctaaaaaggcctcaaagattcttgagaaaatttcaagtgtagatgaatttaaaagtaaaataaaagttttggatagtgatttaagggagcttattgagaaaaattggaatattattgaaagaaatttagaacttgttactttaaaaaatatagataaggatcttattcttaaacccttcgagattaaaagagatgaaaaagtaatagattttttgaagagatatgaacttaagagtattcttcaaaagttatttcctgatcttcaagaggaagaaaatatagagattaaagatgtcgaagagatcaattttaatgaggtagaaaaagaaggctactttgcctttaaatgtcttggagatagggcttttgagggtatttctctttccttcaaggagggggaaggatattttatatctccttttgatttcaataatgagataagaaagaagattgaaaatataatttcttcagagaatgttaaaaaaattggctcttatattcaaagagatttacattttttaaactgtaaaataaagggcgatgtatttgatgttagtctcgcatcttatcttttgaaccctgaaagacaaaatcactctcttgatattttgataggagagtatctaaataaaacctcttttattcctcaaaaatacgctggttatctttttccgttaaagtctattcttgaggagaggataaagaatgaagggttagaatttgtactttataacatagagattccattaatccctgtactttactccatggagaagtgggggataaaggtagataaggaatatttaaaacagctttctgatgaattctgcgagagaattaaaaaattggaagaagagatatatgaacttgcaggaaccagatttaatctcaattctccaaaacaactttctgaagttttatttgagaggttaaaacttccttctggtaagaaaggaaaaacaggatattctacgtcgtcttctgtgcttcaaaacttaataaatgctcatcctatagtgagaaaaatcctccaatatagagaactctataaattgaagagtacttatgtggatgctattcctaatctggttaatccacaaacaggtagagttcatacaaaatttaatcctacaggtacagctacaggaagaataagtagtagtgaacctaatcttcagaatattcctataaaaagtgaagaaggtagaaagataagaagagccttcgtgtcagaagatggatattttcttgtatctcttgattattctcagatagagctaaggattatggctcatctttctcaggagcctaaattaatatctgccttccaaaaaggagaggatattcatagaagaacagcatcggagatttttggagtgccagaggaagaagttgatgatcttttaaggtcaagggcaaaggccgttaattttggaattatttatggtatctcttcttttggactttctgagactgtaagtattacaccagaagaggcagagaaatttatagactcgtattttaagcactatccaagagtgaagctttttatagataagactattcatgaggcaagagaaaaactgtacgttaaaaccttatttggcagaaaaagatatattcctgagattaaggctataaataaacaggtaaggaatgcctatgaaaggatagcaataaatgcgccaattcagggaacagctgctgatattataaaacttgccatgatagaaatttacaaggagattgaaaataaaaatctcaagtcaagaatactccttcaaattcatgatgagcttattcttgaagtgccagaggaggagatggaatttactcctttaatggcaaaggaaaaaatggaaaaggtggtagaactttcggttcctcttgtagttgaaatctcggtaggtaaaaatcttgctgaattaaaatgagctataagattggtcgac

SEQ ID NO: 2044 - DNA, 2673 bp, Artificial Sequence
  Description of Artificial Sequence: Synthetic DNA sequence of Dictyoglomus thermophilum DNA S786R
atgaaatacctgctgccgaccgctgctgctggtctgctgctcctcgctgcccagccggcgatggccatggatatcggaattaattcggatccgaaatctctgtgggatctttttcaagaaaataccgagaaagagtccaaaaggaagattctgattattgatggctcaagcctcatatacagggtttattacgcccttccccctttaaagacaaaaaatggtgaattaactaatgctctttatggcttcataagaatacttttaaaggccgtagaagattttaatcctgatcttgtaggcgttgcctttgatagacctgaacctacttttaggcatgtgatttataaagagtataaggctaagagaccacctatgaaggatgatttgaaagcgcagataccatggataagagaatttctaaggttaaatgatatacctctattggaagagcctggctatgaagcggatgatataatagctactatagtgaataaatataaggatgatttaaaatatattctctctggagatttagatcttttgcaattagtctcggacaaaacctttctaatacatcctcaaaagggaattactgagtttactatttatgatccaaaagctgtaaaggataggtttggagtagagccctataagattcccttatacaaagtattagtaggggacgaatctgataatattccaggagtaaatggaataggtcctaaaaaggcctcaaagattcttgagaaaatttcaagtgtagatgaatttaaaagtaaaataaaagttttggatagtgatttaagggagcttattgagaaaaattggaatattattgaaagaaatttagaacttgttactttaaaaaatatagataaggatcttattcttaaacccttcgagattaaaagagatgaaaaagtaatagattttttgaagagatatgaacttaagagtattcttcaaaagttatttcctgatcttcaagaggaagaaaatatagagattaaagatgtcgaagagatcaattttaatgaggtagaaaaagaaggctactttgcctttaaatgtcttggagatagggcttttgagggtatttctctttccttcaaggagggggaaggatattttatatctccttttgatttcaataatgagataagaaagaagattgaaaatataatttcttcagagaatgttaaaaaaattggctcttatattcaaagagatttacattttttaaactgtaaaataaagggcgatgtatttgatgttagtctcgcatcttatcttttgaaccctgaaagacaaaatcactctcttgatattttgataggagagtatctaaataaaacctcttttattcctcaaaaatacgctggttatctttttccgttaaagtctattcttgaggagaggataaagaatgaagggttagaatttgtactttataacatagagattccattaatccctgtactttactccatggagaagtgggggataaaggtagataaggaatatttaaaacagctttctgatgaattctgcgagagaattaaaaaattggaagaagagatatatgaacttgcaggaaccagatttaatctcaattctccaaaacaactttctgaagttttatttgagaggttaaaacttccttctggtaagaaaggaaaaacaggatattctacgtcgtcttctgtgcttcaaaacttaataaatgctcatcctatagtgagaaaaatcctccaatatagagaactctataaattgaagagtacttatgtggatgctattcctaatctggttaatccacaaacaggtagagttcatacaaaatttaatcctacaggtacagctacaggaagaataagtagtagtgaacctaatcttcagaatattcctataaaaagtgaagaaggtagaaagataagaagagccttcgtgtcagaagatggatattttcttgtatctcttgattattctcagatagagctaaggattatggctcatctttctcaggagcctaaattaatatctgccttccaaaaaggagaggatattcatagaagaacagcatcggagatttttggagtgccagaggaagaagttgatgatcttttaaggtcaagggcaaaggccgttaattttggaattatttatggtatctcttcttttggactttctgagactgtaagtattacaccagaagaggcagagaaatttatagactcgtattttaagcactatccaagagtgaagctttttatagataagactattcatgaggcaagagaaaaactgtacgttaaaaccttatttggcagaaaaagatatattcctgagattaagcgtataaataaacaggtaaggaatgcctatgaaaggatagcaataaatgcgccaattcagggaacagctgctgatattataaaacttgccatgatagaaatttacaaggagattgaaaataaaaatctcaagtcaagaatactccttcaaattcatgatgagcttattcttgaagtgccagaggaggagatggaatttactcctttaatggcaaaggaaaaaatggaaaaggtggtagaactttcggttcctcttgtagttgaaatctcggtaggtaaaaatcttgctgaattaaaatgagctataagattggtcgac

SEQ ID NO: 2045 - DNA, 2673 bp, Artificial Sequence
  Description of Artificial Sequence: Synthetic DNA sequence of Dictyoglomus thermophilum DNA S786N
atgaaatacctgctgccgaccgctgctgctggtctgctgctcctcgctgcccagccggcgatggccatggatatcggaattaattcggatccgaaatctctgtgggatctttttcaagaaaataccgagaaagagtccaaaaggaagattctgattattgatggctcaagcctcatatacagggtttattacgcccttccccctttaaagacaaaaaatggtgaattaactaatgctctttatggcttcataagaatacttttaaaggccgtagaagattttaatcctgatcttgtaggcgttgcctttgatagacctgaacctacttttaggcatgtgatttataaagagtataaggctaagagaccacctatgaaggatgatttgaaagcgcagataccatggataagagaatttctaaggttaaatgatatacctctattggaagagcctggctatgaagcggatgatataatagctactatagtgaataaatataaggatgatttaaaatatattctctctggagatttagatcttttgcaattagtctcggacaaaacctttctaatacatcctcaaaagggaattactgagtttactatttatgatccaaaagctgtaaaggataggtttggagtagagccctataagattcccttatacaaagtattagtaggggacgaatctgataatattccaggagtaaatggaataggtcctaaaaaggcctcaaagattcttgagaaaatttcaagtgtagatgaatttaaaagtaaaataaaagttttggatagtgatttaagggagcttattgagaaaaattggaatattattgaaagaaatttagaacttgttactttaaaaaatatagataaggatcttattcttaaacccttcgagattaaaagagatgaaaaagtaatagattttttgaagagatatgaacttaagagtattcttcaaaagttatttcctgatcttcaagaggaagaaaatatagagattaaagatgtcgaagagatcaattttaatgaggtagaaaaagaaggctactttgcctttaaatgtcttggagatagggcttttgagggtatttctctttccttcaaggagggggaaggatattttatatctccttttgatttcaataatgagataagaaagaagattgaaaatataatttcttcagagaatgttaaaaaaattggctcttatattcaaagagatttacattttttaaactgtaaaataaagggcgatgtatttgatgttagtctcgcatcttatcttttgaaccctgaaagacaaaatcactctcttgatattttgataggagagtatctaaataaaacctcttttattcctcaaaaatacgctggttatctttttccgttaaagtctattcttgaggagaggataaagaatgaagggttagaatttgtactttataacatagagattccattaatccctgtactttactccatggagaagtgggggataaaggtagataaggaatatttaaaacagctttctgatgaattctgcgagagaattaaaaaattggaagaagagatatatgaacttgcaggaaccagatttaatctcaattctccaaaacaactttctgaagttttatttgagaggttaaaacttccttctggtaagaaaggaaaaacaggatattctacgtcgtcttctgtgcttcaaaacttaataaatgctcatcctatagtgagaaaaatcctccaatatagagaactctataaattgaagagtacttatgtggatgctattcctaatctggttaatccacaaacaggtagagttcatacaaaatttaatcctacaggtacagctacaggaagaataagtagtagtgaacctaatcttcagaatattcctataaaaagtgaagaaggtagaaagataagaagagccttcgtgtcagaagatggatattttcttgtatctcttgattattctcagatagagctaaggattatggctcatctttctcaggagcctaaattaatatctgccttccaaaaaggagaggatattcatagaagaacagcatcggagatttttggagtgccagaggaagaagttgatgatcttttaaggtcaagggcaaaggccgttaattttggaattatttatggtatctcttcttttggactttctgagactgtaagtattacaccagaagaggcagagaaatttatagactcgtattttaagcactatccaagagtgaagctttttatagataagactattcatgaggcaagagaaaaactgtacgttaaaaccttatttggcagaaaaagatatattcctgagattaagaatataaataaacaggtaaggaatgcctatgaaaggatagcaataaatgcgccaattcagggaacagctgctgatattataaaacttgccatgatagaaatttacaaggagattgaaaataaaaatctcaagtcaagaatactccttcaaattcatgatgagcttattcttgaagtgccagaggaggagatggaatttactcctttaatggcaaaggaaaaaatggaaaaggtggtagaactttcggttcctcttgtagttgaaatctcggtaggtaaaaatcttgctgaattaaaatgagctataagattggtcgac

SEQ ID NO: 2046 - DNA, 2673 bp, Artificial Sequence
  Description of Artificial Sequence: Synthetic DNA sequence of Dictyoglomus thermophilum DNA S786D
atgaaatacctgctgccgaccgctgctgctggtctgctgctcctcgctgcccagccggcgatggccatggatatcggaattaattcggatccgaaatctctgtgggatctttttcaagaaaataccgagaaagagtccaaaaggaagattctgattattgatggctcaagcctcatatacagggtttattacgcccttccccctttaaagacaaaaaatggtgaattaactaatgctctttatggcttcataagaatacttttaaaggccgtagaagattttaatcctgatcttgtaggcgttgcctttgatagacctgaacctacttttaggcatgtgatttataaagagtataaggctaagagaccacctatgaaggatgatttgaaagcgcagataccatggataagagaatttctaaggttaaatgatatacctctattggaagagcctggctatgaagcggatgatataatagctactatagtgaataaatataaggatgatttaaaatatattctctctggagatttagatcttttgcaattagtctcggacaaaacctttctaatacatcctcaaaagggaattactgagtttactatttatgatccaaaagctgtaaaggataggtttggagtagagccctataagattcccttatacaaagtattagtaggggacgaatctgataatattccaggagtaaatggaataggtcctaaaaaggcctcaaagattcttgagaaaatttcaagtgtagatgaatttaaaagtaaaataaaagttttggatagtgatttaagggagcttattgagaaaaattggaatattattgaaagaaatttagaacttgttactttaaaaaatatagataaggatcttattcttaaacccttcgagattaaaagagatgaaaaagtaatagattttttgaagagatatgaacttaagagtattcttcaaaagttatttcctgatcttcaagaggaagaaaatatagagattaaagatgtcgaagagatcaattttaatgaggtagaaaaagaaggctactttgcctttaaatgtcttggagatagggcttttgagggtatttctctttccttcaaggagggggaaggatattttatatctccttttgatttcaataatgagataagaaagaagattgaaaatataatttcttcagagaatgttaaaaaaattggctcttatattcaaagagatttacattttttaaactgtaaaataaagggcgatgtatttgatgttagtctcgcatcttatcttttgaaccctgaaagacaaaatcactctcttgatattttgataggagagtatctaaataaaacctcttttattcctcaaaaatacgctggttatctttttccgttaaagtctattcttgaggagaggataaagaatgaagggttagaatttgtactttataacatagagattccattaatccctgtactttactccatggagaagtgggggataaaggtagataaggaatatttaaaacagctttctgatgaattctgcgagagaattaaaaaattggaagaagagatatatgaacttgcaggaaccagatttaatctcaattctccaaaacaactttctgaagttttatttgagaggttaaaacttccttctggtaagaaaggaaaaacaggatattctacgtcgtcttctgtgcttcaaaacttaataaatgctcatcctatagtgagaaaaatcctccaatatagagaactctataaattgaagagtacttatgtggatgctattcctaatctggttaatccacaaacaggtagagttcatacaaaatttaatcctacaggtacagctacaggaagaataagtagtagtgaacctaatcttcagaatattcctataaaaagtgaagaaggtagaaagataagaagagccttcgtgtcagaagatggatattttcttgtatctcttgattattctcagatagagctaaggattatggctcatctttctcaggagcctaaattaatatctgccttccaaaaaggagaggatattcatagaagaacagcatcggagatttttggagtgccagaggaagaagttgatgatcttttaaggtcaagggcaaaggccgttaattttggaattatttatggtatctcttcttttggactttctgagactgtaagtattacaccagaagaggcagagaaatttatagactcgtattttaagcactatccaagagtgaagctttttatagataagactattcatgaggcaagagaaaaactgtacgttaaaaccttatttggcagaaaaagatatattcctgagattaaggatataaataaacaggtaaggaatgcctatgaaaggatagcaataaatgcgccaattcagggaacagctgctgatattataaaacttgccatgatagaaatttacaaggagattgaaaataaaaatctcaagtcaagaatactccttcaaattcatgatgagcttattcttgaagtgccagaggaggagatggaatttactcctttaatggcaaaggaaaaaatggaaaaggtggtagaactttcggttcctcttgtagttgaaatctcggtaggtaaaaatcttgctgaattaaaatgagctataagattggtcgac

SEQ ID NO: 2047 - DNA, 2673 bp, Artificial Sequence
  Description of Artificial Sequence: Synthetic DNA sequence of Dictyoglomus thermophilum DNA S786C
atgaaatacctgctgccgaccgctgctgctggtctgctgctcctcgctgcccagccggcgatggccatggatatcggaattaattcggatccgaaatctctgtgggatctttttcaagaaaataccgagaaagagtccaaaaggaagattctgattattgatggctcaagcctcatatacagggtttattacgcccttccccctttaaagacaaaaaatggtgaattaactaatgctctttatggcttcataagaatacttttaaaggccgtagaagattttaatcctgatcttgtaggcgttgcctttgatagacctgaacctacttttaggcatgtgatttataaagagtataaggctaagagaccacctatgaaggatgatttgaaagcgcagataccatggataagagaatttctaaggttaaatgatatacctctattggaagagcctggctatgaagcggatgatataatagctactatagtgaataaatataaggatgatttaaaatatattctctctggagatttagatcttttgcaattagtctcggacaaaacctttctaatacatcctcaaaagggaattactgagtttactatttatgatccaaaagctgtaaaggataggtttggagtagagccctataagattcccttatacaaagtattagtaggggacgaatctgataatattccaggagtaaatggaataggtcctaaaaaggcctcaaagattcttgagaaaatttcaagtgtagatgaatttaaaagtaaaataaaagttttggatagtgatttaagggagcttattgagaaaaattggaatattattgaaagaaatttagaacttgttactttaaaaaatatagataaggatcttattcttaaacccttcgagattaaaagagatgaaaaagtaatagattttttgaagagatatgaacttaagagtattcttcaaaagttatttcctgatcttcaagaggaagaaaatatagagattaaagatgtcgaagagatcaattttaatgaggtagaaaaagaaggctactttgcctttaaatgtcttggagatagggcttttgagggtatttctctttccttcaaggagggggaaggatattttatatctccttttgatttcaataatgagataagaaagaagattgaaaatataatttcttcagagaatgttaaaaaaattggctcttatattcaaagagatttacattttttaaactgtaaaataaagggcgatgtatttgatgttagtctcgcatcttatcttttgaaccctgaaagacaaaatcactctcttgatattttgataggagagtatctaaataaaacctcttttattcctcaaaaatacgctggttatctttttccgttaaagtctattcttgaggagaggataaagaatgaagggttagaatttgtactttataacatagagattccattaatccctgtactttactccatggagaagtgggggataaaggtagataaggaatatttaaaacagctttctgatgaattctgcgagagaattaaaaaattggaagaagagatatatgaacttgcaggaaccagatttaatctcaattctccaaaacaactttctgaagttttatttgagaggttaaaacttccttctggtaagaaaggaaaaacaggatattctacgtcgtcttctgtgcttcaaaacttaataaatgctcatcctatagtgagaaaaatcctccaatatagagaactctataaattgaagagtacttatgtggatgctattcctaatctggttaatccacaaacaggtagagttcatacaaaatttaatcctacaggtacagctacaggaagaataagtagtagtgaacctaatcttcagaatattcctataaaaagtgaagaaggtagaaagataagaagagccttcgtgtcagaagatggatattttcttgtatctcttgattattctcagatagagctaaggattatggctcatctttctcaggagcctaaattaatatctgccttccaaaaaggagaggatattcatagaagaacagcatcggagatttttggagtgccagaggaagaagttgatgatcttttaaggtcaagggcaaaggccgttaattttggaattatttatggtatctcttcttttggactttctgagactgtaagtattacaccagaagaggcagagaaatttatagactcgtattttaagcactatccaagagtgaagctttttatagataagactattcatgaggcaagagaaaaactgtacgttaaaaccttatttggcagaaaaagatatattcctgagattaagtgtataaataaacaggtaaggaatgcctatgaaaggatagcaataaatgcgccaattcagggaacagctgctgatattataaaacttgccatgatagaaatttacaaggagattgaaaataaaaatctcaagtcaagaatactccttcaaattcatgatgagcttattcttgaagtgccagaggaggagatggaatttactcctttaatggcaaaggaaaaaatggaaaaggtggtagaactttcggttcctcttgtagttgaaatctcggtaggtaaaaatcttgctgaattaaaatgagctataagattggtcgac

SEQ ID NO: 2048 - DNA, 2673 bp, Artificial Sequence
  Description of Artificial Sequence: Synthetic DNA sequence of Dictyoglomus thermophilum DNA S786E
atgaaatacctgctgccgaccgctgctgctggtctgctgctcctcgctgcccagccggcgatggccatggatatcggaattaattcggatccgaaatctctgtgggatctttttcaagaaaataccgagaaagagtccaaaaggaagattctgattattgatggctcaagcctcatatacagggtttattacgcccttccccctttaaagacaaaaaatggtgaattaactaatgctctttatggcttcataagaatacttttaaaggccgtagaagattttaatcctgatcttgtaggcgttgcctttgatagacctgaacctacttttaggcatgtgatttataaagagtataaggctaagagaccacctatgaaggatgatttgaaagcgcagataccatggataagagaatttctaaggttaaatgatatacctctattggaagagcctggctatgaagcggatgatataatagctactatagtgaataaatataaggatgatttaaaatatattctctctggagatttagatcttttgcaattagtctcggacaaaacctttctaatacatcctcaaaagggaattactgagtttactatttatgatccaaaagctgtaaaggataggtttggagtagagccctataagattcccttatacaaagtattagtaggggacgaatctgataatattccaggagtaaatggaataggtcctaaaaaggcctcaaagattcttgagaaaatttcaagtgtagatgaatttaaaagtaaaataaaagttttggatagtgatttaagggagcttattgagaaaaattggaatattattgaaagaaatttagaacttgttactttaaaaaatatagataaggatcttattcttaaacccttcgagattaaaagagatgaaaaagtaatagattttttgaagagatatgaacttaagagtattcttcaaaagttatttcctgatcttcaagaggaagaaaatatagagattaaagatgtcgaagagatcaattttaatgaggtagaaaaagaaggctactttgcctttaaatgtcttggagatagggcttttgagggtatttctctttccttcaaggagggggaaggatattttatatctccttttgatttcaataatgagataagaaagaagattgaaaatataatttcttcagagaatgttaaaaaaattggctcttatattcaaagagatttacattttttaaactgtaaaataaagggcgatgtatttgatgttagtctcgcatcttatcttttgaaccctgaaagacaaaatcactctcttgatattttgataggagagtatctaaataaaacctcttttattcctcaaaaatacgctggttatctttttccgttaaagtctattcttgaggagaggataaagaatgaagggttagaatttgtactttataacatagagattccattaatccctgtactttactccatggagaagtgggggataaaggtagataaggaatatttaaaacagctttctgatgaattctgcgagagaattaaaaaattggaagaagagatatatgaacttgcaggaaccagatttaatctcaattctccaaaacaactttctgaagttttatttgagaggttaaaacttccttctggtaagaaaggaaaaacaggatattctacgtcgtcttctgtgcttcaaaacttaataaatgctcatcctatagtgagaaaaatcctccaatatagagaactctataaattgaagagtacttatgtggatgctattcctaatctggttaatccacaaacaggtagagttcatacaaaatttaatcctacaggtacagctacaggaagaataagtagtagtgaacctaatcttcagaatattcctataaaaagtgaagaaggtagaaagataagaagagccttcgtgtcagaagatggatattttcttgtatctcttgattattctcagatagagctaaggattatggctcatctttctcaggagcctaaattaatatctgccttccaaaaaggagaggatattcatagaagaacagcatcggagatttttggagtgccagaggaagaagttgatgatcttttaaggtcaagggcaaaggccgttaattttggaattatttatggtatctcttcttttggactttctgagactgtaagtattacaccagaagaggcagagaaatttatagactcgtattttaagcactatccaagagtgaagctttttatagataagactattcatgaggcaagagaaaaactgtacgttaaaaccttatttggcagaaaaagatatattcctgagattaaggaaataaataaacaggtaaggaatgcctatgaaaggatagcaataaatgcgccaattcagggaacagctgctgatattataaaacttgccatgatagaaatttacaaggagattgaaaataaaaatctcaagtcaagaatactccttcaaattcatgatgagcttattcttgaagtgccagaggaggagatggaatttactcctttaatggcaaaggaaaaaatggaaaaggtggtagaactttcggttcctcttgtagttgaaatctcggtaggtaaaaatcttgctgaattaaaatgagctataagattggtcgac

SEQ ID NO: 2049 - DNA, 2673 bp, Artificial Sequence
  Description of Artificial Sequence: Synthetic DNA sequence of Dictyoglomus thermophilum DNA S786Q
atgaaatacctgctgccgaccgctgctgctggtctgctgctcctcgctgcccagccggcgatggccatggatatcggaattaattcggatccgaaatctctgtgggatctttttcaagaaaataccgagaaagagtccaaaaggaagattctgattattgatggctcaagcctcatatacagggtttattacgcccttccccctttaaagacaaaaaatggtgaattaactaatgctctttatggcttcataagaatacttttaaaggccgtagaagattttaatcctgatcttgtaggcgttgcctttgatagacctgaacctacttttaggcatgtgatttataaagagtataaggctaagagaccacctatgaaggatgatttgaaagcgcagataccatggataagagaatttctaaggttaaatgatatacctctattggaagagcctggctatgaagcggatgatataatagctactatagtgaataaatataaggatgatttaaaatatattctctctggagatttagatcttttgcaattagtctcggacaaaacctttctaatacatcctcaaaagggaattactgagtttactatttatgatccaaaagctgtaaaggataggtttggagtagagccctataagattcccttatacaaagtattagtaggggacgaatctgataatattccaggagtaaatggaataggtcctaaaaaggcctcaaagattcttgagaaaatttcaagtgtagatgaatttaaaagtaaaataaaagttttggatagtgatttaagggagcttattgagaaaaattggaatattattgaaagaaatttagaacttgttactttaaaaaatatagataaggatcttattcttaaacccttcgagattaaaagagatgaaaaagtaatagattttttgaagagatatgaacttaagagtattcttcaaaagttatttcctgatcttcaagaggaagaaaatatagagattaaagatgtcgaagagatcaattttaatgaggtagaaaaagaaggctactttgcctttaaatgtcttggagatagggcttttgagggtatttctctttccttcaaggagggggaaggatattttatatctccttttgatttcaataatgagataagaaagaagattgaaaatataatttcttcagagaatgttaaaaaaattggctcttatattcaaagagatttacattttttaaactgtaaaataaagggcgatgtatttgatgttagtctcgcatcttatcttttgaaccctgaaagacaaaatcactctcttgatattttgataggagagtatctaaataaaacctcttttattcctcaaaaatacgctggttatctttttccgttaaagtctattcttgaggagaggataaagaatgaagggttagaatttgtactttataacatagagattccattaatccctgtactttactccatggagaagtgggggataaaggtagataaggaatatttaaaacagctttctgatgaattctgcgagagaattaaaaaattggaagaagagatatatgaacttgcaggaaccagatttaatctcaattctccaaaacaactttctgaagttttatttgagaggttaaaacttccttctggtaagaaaggaaaaacaggatattctacgtcgtcttctgtgcttcaaaacttaataaatgctcatcctatagtgagaaaaatcctccaatatagagaactctataaattgaagagtacttatgtggatgctattcctaatctggttaatccacaaacaggtagagttcatacaaaatttaatcctacaggtacagctacaggaagaataagtagtagtgaacctaatcttcagaatattcctataaaaagtgaagaaggtagaaagataagaagagccttcgtgtcagaagatggatattttcttgtatctcttgattattctcagatagagctaaggattatggctcatctttctcaggagcctaaattaatatctgccttccaaaaaggagaggatattcatagaagaacagcatcggagatttttggagtgccagaggaagaagttgatgatcttttaaggtcaagggcaaaggccgttaattttggaattatttatggtatctcttcttttggactttctgagactgtaagtattacaccagaagaggcagagaaatttatagactcgtattttaagcactatccaagagtgaagctttttatagataagactattcatgaggcaagagaaaaactgtacgttaaaaccttatttggcagaaaaagatatattcctgagattaagcaaataaataaacaggtaaggaatgcctatgaaaggatagcaataaatgcgccaattcagggaacagctgctgatattataaaacttgccatgatagaaatttacaaggagattgaaaataaaaatctcaagtcaagaatactccttcaaattcatgatgagcttattcttgaagtgccagaggaggagatggaatttactcctttaatggcaaaggaaaaaatggaaaaggtggtagaactttcggttcctcttgtagttgaaatctcggtaggtaaaaatcttgctgaattaaaatgagctataagattggtcgac

SEQ ID NO: 2050 - DNA, 2673 bp, Artificial Sequence
  Description of Artificial Sequence: Synthetic DNA sequence of Dictyoglomus thermophilum DNA S786G
atgaaatacctgctgccgaccgctgctgctggtctgctgctcctcgctgcccagccggcgatggccatggatatcggaattaattcggatccgaaatctctgtgggatctttttcaagaaaataccgagaaagagtccaaaaggaagattctgattattgatggctcaagcctcatatacagggtttattacgcccttccccctttaaagacaaaaaatggtgaattaactaatgctctttatggcttcataagaatacttttaaaggccgtagaagattttaatcctgatcttgtaggcgttgcctttgatagacctgaacctacttttaggcatgtgatttataaagagtataaggctaagagaccacctatgaaggatgatttgaaagcgcagataccatggataagagaatttctaaggttaaatgatatacctctattggaagagcctggctatgaagcggatgatataatagctactatagtgaataaatataaggatgatttaaaatatattctctctggagatttagatcttttgcaattagtctcggacaaaacctttctaatacatcctcaaaagggaattactgagtttactatttatgatccaaaagctgtaaaggataggtttggagtagagccctataagattcccttatacaaagtattagtaggggacgaatctgataatattccaggagtaaatggaataggtcctaaaaaggcctcaaagattcttgagaaaatttcaagtgtagatgaatttaaaagtaaaataaaagttttggatagtgatttaagggagcttattgagaaaaattggaatattattgaaagaaatttagaacttgttactttaaaaaatatagataaggatcttattcttaaacccttcgagattaaaagagatgaaaaagtaatagattttttgaagagatatgaacttaagagtattcttcaaaagttatttcctgatcttcaagaggaagaaaatatagagattaaagatgtcgaagagatcaattttaatgaggtagaaaaagaaggctactttgcctttaaatgtcttggagatagggcttttgagggtatttctctttccttcaaggagggggaaggatattttatatctccttttgatttcaataatgagataagaaagaagattgaaaatataatttcttcagagaatgttaaaaaaattggctcttatattcaaagagatttacattttttaaactgtaaaataaagggcgatgtatttgatgttagtctcgcatcttatcttttgaaccctgaaagacaaaatcactctcttgatattttgataggagagtatctaaataaaacctcttttattcctcaaaaatacgctggttatctttttccgttaaagtctattcttgaggagaggataaagaatgaagggttagaatttgtactttataacatagagattccattaatccctgtactttactccatggagaagtgggggataaaggtagataaggaatatttaaaacagctttctgatgaattctgcgagagaattaaaaaattggaagaagagatatatgaacttgcaggaaccagatttaatctcaattctccaaaacaactttctgaagttttatttgagaggttaaaacttccttctggtaagaaaggaaaaacaggatattctacgtcgtcttctgtgcttcaaaacttaataaatgctcatcctatagtgagaaaaatcctccaatatagagaactctataaattgaagagtacttatgtggatgctattcctaatctggttaatccacaaacaggtagagttcatacaaaatttaatcctacaggtacagctacaggaagaataagtagtagtgaacctaatcttcagaatattcctataaaaagtgaagaaggtagaaagataagaagagccttcgtgtcagaagatggatattttcttgtatctcttgattattctcagatagagctaaggattatggctcatctttctcaggagcctaaattaatatctgccttccaaaaaggagaggatattcatagaagaacagcatcggagatttttggagtgccagaggaagaagttgatgatcttttaaggtcaagggcaaaggccgttaattttggaattatttatggtatctcttcttttggactttctgagactgtaagtattacaccagaagaggcagagaaatttatagactcgtattttaagcactatccaagagtgaagctttttatagataagactattcatgaggcaagagaaaaactgtacgttaaaaccttatttggcagaaaaagatatattcctgagattaagggtataaataaacaggtaaggaatgcctatgaaaggatagcaataaatgcgccaattcagggaacagctgctgatattataaaacttgccatgatagaaatttacaaggagattgaaaataaaaatctcaagtcaagaatactccttcaaattcatgatgagcttattcttgaagtgccagaggaggagatggaatttactcctttaatggcaaaggaaaaaatggaaaaggtggtagaactttcggttcctcttgtagttgaaatctcggtaggtaaaaatcttgctgaattaaaatgagctataagattggtcgac

SEQ ID NO: 2051 - DNA, 2673 bp, Artificial Sequence
  Description of Artificial Sequence: Synthetic DNA sequence of Dictyoglomus thermophilum DNA S786H
atgaaatacctgctgccgaccgctgctgctggtctgctgctcctcgctgcccagccggcgatggccatggatatcggaattaattcggatccgaaatctctgtgggatctttttcaagaaaataccgagaaagagtccaaaaggaagattctgattattgatggctcaagcctcatatacagggtttattacgcccttccccctttaaagacaaaaaatggtgaattaactaatgctctttatggcttcataagaatacttttaaaggccgtagaagattttaatcctgatcttgtaggcgttgcctttgatagacctgaacctacttttaggcatgtgatttataaagagtataaggctaagagaccacctatgaaggatgatttgaaagcgcagataccatggataagagaatttctaaggttaaatgatatacctctattggaagagcctggctatgaagcggatgatataatagctactatagtgaataaatataaggatgatttaaaatatattctctctggagatttagatcttttgcaattagtctcggacaaaacctttctaatacatcctcaaaagggaattactgagtttactatttatgatccaaaagctgtaaaggataggtttggagtagagccctataagattcccttatacaaagtattagtaggggacgaatctgataatattccaggagtaaatggaataggtcctaaaaaggcctcaaagattcttgagaaaatttcaagtgtagatgaatttaaaagtaaaataaaagttttggatagtgatttaagggagcttattgagaaaaattggaatattattgaaagaaatttagaacttgttactttaaaaaatatagataaggatcttattcttaaacccttcgagattaaaagagatgaaaaagtaatagattttttgaagagatatgaacttaagagtattcttcaaaagttatttcctgatcttcaagaggaagaaaatatagagattaaagatgtcgaagagatcaattttaatgaggtagaaaaagaaggctactttgcctttaaatgtcttggagatagggcttttgagggtatttctctttccttcaaggagggggaaggatattttatatctccttttgatttcaataatgagataagaaagaagattgaaaatataatttcttcagagaatgttaaaaaaattggctcttatattcaaagagatttacattttttaaactgtaaaataaagggcgatgtatttgatgttagtctcgcatcttatcttttgaaccctgaaagacaaaatcactctcttgatattttgataggagagtatctaaataaaacctcttttattcctcaaaaatacgctggttatctttttccgttaaagtctattcttgaggagaggataaagaatgaagggttagaatttgtactttataacatagagattccattaatccctgtactttactccatggagaagtgggggataaaggtagataaggaatatttaaaacagctttctgatgaattctgcgagagaattaaaaaattggaagaagagatatatgaacttgcaggaaccagatttaatctcaattctccaaaacaactttctgaagttttatttgagaggttaaaacttccttctggtaagaaaggaaaaacaggatattctacgtcgtcttctgtgcttcaaaacttaataaatgctcatcctatagtgagaaaaatcctccaatatagagaactctataaattgaagagtacttatgtggatgctattcctaatctggttaatccacaaacaggtagagttcatacaaaatttaatcctacaggtacagctacaggaagaataagtagtagtgaacctaatcttcagaatattcctataaaaagtgaagaaggtagaaagataagaagagccttcgtgtcagaagatggatattttcttgtatctcttgattattctcagatagagctaaggattatggctcatctttctcaggagcctaaattaatatctgccttccaaaaaggagaggatattcatagaagaacagcatcggagatttttggagtgccagaggaagaagttgatgatcttttaaggtcaagggcaaaggccgttaattttggaattatttatggtatctcttcttttggactttctgagactgtaagtattacaccagaagaggcagagaaatttatagactcgtattttaagcactatccaagagtgaagctttttatagataagactattcatgaggcaagagaaaaactgtacgttaaaaccttatttggcagaaaaagatatattcctgagattaagcatataaataaacaggtaaggaatgcctatgaaaggatagcaataaatgcgccaattcagggaacagctgctgatattataaaacttgccatgatagaaatttacaaggagattgaaaataaaaatctcaagtcaagaatactccttcaaattcatgatgagcttattcttgaagtgccagaggaggagatggaatttactcctttaatggcaaaggaaaaaatggaaaaggtggtagaactttcggttcctcttgtagttgaaatctcggtaggtaaaaatcttgctgaattaaaatgagctataagattggtcgac

SEQ ID NO: 2052 - DNA, 2673 bp, Artificial Sequence
  Description of Artificial Sequence: Synthetic DNA sequence of Dictyoglomus thermophilum DNA S786I
atgaaatacctgctgccgaccgctgctgctggtctgctgctcctcgctgcccagccggcgatggccatggatatcggaattaattcggatccgaaatctctgtgggatctttttcaagaaaataccgagaaagagtccaaaaggaagattctgattattgatggctcaagcctcatatacagggtttattacgcccttccccctttaaagacaaaaaatggtgaattaactaatgctctttatggcttcataagaatacttttaaaggccgtagaagattttaatcctgatcttgtaggcgttgcctttgatagacctgaacctacttttaggcatgtgatttataaagagtataaggctaagagaccacctatgaaggatgatttgaaagcgcagataccatggataagagaatttctaaggttaaatgatatacctctattggaagagcctggctatgaagcggatgatataatagctactatagtgaataaatataaggatgatttaaaatatattctctctggagatttagatcttttgcaattagtctcggacaaaacctttctaatacatcctcaaaagggaattactgagtttactatttatgatccaaaagctgtaaaggataggtttggagtagagccctataagattcccttatacaaagtattagtaggggacgaatctgataatattccaggagtaaatggaataggtcctaaaaaggcctcaaagattcttgagaaaatttcaagtgtagatgaatttaaaagtaaaataaaagttttggatagtgatttaagggagcttattgagaaaaattggaatattattgaaagaaatttagaacttgttactttaaaaaatatagataaggatcttattcttaaacccttcgagattaaaagagatgaaaaagtaatagattttttgaagagatatgaacttaagagtattcttcaaaagttatttcctgatcttcaagaggaagaaaatatagagattaaagatgtcgaagagatcaattttaatgaggtagaaaaagaaggctactttgcctttaaatgtcttggagatagggcttttgagggtatttctctttccttcaaggagggggaaggatattttatatctccttttgatttcaataatgagataagaaagaagattgaaaatataatttcttcagagaatgttaaaaaaattggctcttatattcaaagagatttacattttttaaactgtaaaataaagggcgatgtatttgatgttagtctcgcatcttatcttttgaaccctgaaagacaaaatcactctcttgatattttgataggagagtatctaaataaaacctcttttattcctcaaaaatacgctggttatctttttccgttaaagtctattcttgaggagaggataaagaatgaagggttagaatttgtactttataacatagagattccattaatccctgtactttactccatggagaagtgggggataaaggtagataaggaatatttaaaacagctttctgatgaattctgcgagagaattaaaaaattggaagaagagatatatgaacttgcaggaaccagatttaatctcaattctccaaaacaactttctgaagttttatttgagaggttaaaacttccttctggtaagaaaggaaaaacaggatattctacgtcgtcttctgtgcttcaaaacttaataaatgctcatcctatagtgagaaaaatcctccaatatagagaactctataaattgaagagtacttatgtggatgctattcctaatctggttaatccacaaacaggtagagttcatacaaaatttaatcctacaggtacagctacaggaagaataagtagtagtgaacctaatcttcagaatattcctataaaaagtgaagaaggtagaaagataagaagagccttcgtgtcagaagatggatattttcttgtatctcttgattattctcagatagagctaaggattatggctcatctttctcaggagcctaaattaatatctgccttccaaaaaggagaggatattcatagaagaacagcatcggagatttttggagtgccagaggaagaagttgatgatcttttaaggtcaagggcaaaggccgttaattttggaattatttatggtatctcttcttttggactttctgagactgtaagtattacaccagaagaggcagagaaatttatagactcgtattttaagcactatccaagagtgaagctttttatagataagactattcatgaggcaagagaaaaactgtacgttaaaaccttatttggcagaaaaagatatattcctgagattaagattataaataaacaggtaaggaatgcctatgaaaggatagcaataaatgcgccaattcagggaacagctgctgatattataaaacttgccatgatagaaatttacaaggagattgaaaataaaaatctcaagtcaagaatactccttcaaattcatgatgagcttattcttgaagtgccagaggaggagatggaatttactcctttaatggcaaaggaaaaaatggaaaaggtggtagaactttcggttcctcttgtagttgaaatctcggtaggtaaaaatcttgctgaattaaaatgagctataagattggtcgac

SEQ ID NO: 2053 - DNA, 2673 bp, Artificial Sequence
  Description of Artificial Sequence: Synthetic DNA sequence of Dictyoglomus thermophilum DNA S786L
atgaaatacctgctgccgaccgctgctgctggtctgctgctcctcgctgcccagccggcgatggccatggatatcggaattaattcggatccgaaatctctgtgggatctttttcaagaaaataccgagaaagagtccaaaaggaagattctgattattgatggctcaagcctcatatacagggtttattacgcccttccccctttaaagacaaaaaatggtgaattaactaatgctctttatggcttcataagaatacttttaaaggccgtagaagattttaatcctgatcttgtaggcgttgcctttgatagacctgaacctacttttaggcatgtgatttataaagagtataaggctaagagaccacctatgaaggatgatttgaaagcgcagataccatggataagagaatttctaaggttaaatgatatacctctattggaagagcctggctatgaagcggatgatataatagctactatagtgaataaatataaggatgatttaaaatatattctctctggagatttagatcttttgcaattagtctcggacaaaacctttctaatacatcctcaaaagggaattactgagtttactatttatgatccaaaagctgtaaaggataggtttggagtagagccctataagattcccttatacaaagtattagtaggggacgaatctgataatattccaggagtaaatggaataggtcctaaaaaggcctcaaagattcttgagaaaatttcaagtgtagatgaatttaaaagtaaaataaaagttttggatagtgatttaagggagcttattgagaaaaattggaatattattgaaagaaatttagaacttgttactttaaaaaatatagataaggatcttattcttaaacccttcgagattaaaagagatgaaaaagtaatagattttttgaagagatatgaacttaagagtattcttcaaaagttatttcctgatcttcaagaggaagaaaatatagagattaaagatgtcgaagagatcaattttaatgaggtagaaaaagaaggctactttgcctttaaatgtcttggagatagggcttttgagggtatttctctttccttcaaggagggggaaggatattttatatctccttttgatttcaataatgagataagaaagaagattgaaaatataatttcttcagagaatgttaaaaaaattggctcttatattcaaagagatttacattttttaaactgtaaaataaagggcgatgtatttgatgttagtctcgcatcttatcttttgaaccctgaaagacaaaatcactctcttgatattttgataggagagtatctaaataaaacctcttttattcctcaaaaatacgctggttatctttttccgttaaagtctattcttgaggagaggataaagaatgaagggttagaatttgtactttataacatagagattccattaatccctgtactttactccatggagaagtgggggataaaggtagataaggaatatttaaaacagctttctgatgaattctgcgagagaattaaaaaattggaagaagagatatatgaacttgcaggaaccagatttaatctcaattctccaaaacaactttctgaagttttatttgagaggttaaaacttccttctggtaagaaaggaaaaacaggatattctacgtcgtcttctgtgcttcaaaacttaataaatgctcatcctatagtgagaaaaatcctccaatatagagaactctataaattgaagagtacttatgtggatgctattcctaatctggttaatccacaaacaggtagagttcatacaaaatttaatcctacaggtacagctacaggaagaataagtagtagtgaacctaatcttcagaatattcctataaaaagtgaagaaggtagaaagataagaagagccttcgtgtcagaagatggatattttcttgtatctcttgattattctcagatagagctaaggattatggctcatctttctcaggagcctaaattaatatctgccttccaaaaaggagaggatattcatagaagaacagcatcggagatttttggagtgccagaggaagaagttgatgatcttttaaggtcaagggcaaaggccgttaattttggaattatttatggtatctcttcttttggactttctgagactgtaagtattacaccagaagaggcagagaaatttatagactcgtattttaagcactatccaagagtgaagctttttatagataagactattcatgaggcaagagaaaaactgtacgttaaaaccttatttggcagaaaaagatatattcctgagattaagcttataaataaacaggtaaggaatgcctatgaaaggatagcaataaatgcgccaattcagggaacagctgctgatattataaaacttgccatgatagaaatttacaaggagattgaaaataaaaatctcaagtcaagaatactccttcaaattcatgatgagcttattcttgaagtgccagaggaggagatggaatttactcctttaatggcaaaggaaaaaatggaaaaggtggtagaactttcggttcctcttgtagttgaaatctcggtaggtaaaaatcttgctgaattaaaatgagctataagattggtcgac

SEQ ID NO: 2054 - DNA, 2673 bp, Artificial Sequence
  Description of Artificial Sequence: Synthetic DNA sequence of Dictyoglomus thermophilum DNA S786K
atgaaatacctgctgccgaccgctgctgctggtctgctgctcctcgctgcccagccggcgatggccatggatatcggaattaattcggatccgaaatctctgtgggatctttttcaagaaaataccgagaaagagtccaaaaggaagattctgattattgatggctcaagcctcatatacagggtttattacgcccttccccctttaaagacaaaaaatggtgaattaactaatgctctttatggcttcataagaatacttttaaaggccgtagaagattttaatcctgatcttgtaggcgttgcctttgatagacctgaacctacttttaggcatgtgatttataaagagtataaggctaagagaccacctatgaaggatgatttgaaagcgcagataccatggataagagaatttctaaggttaaatgatatacctctattggaagagcctggctatgaagcggatgatataatagctactatagtgaataaatataaggatgatttaaaatatattctctctggagatttagatcttttgcaattagtctcggacaaaacctttctaatacatcctcaaaagggaattactgagtttactatttatgatccaaaagctgtaaaggataggtttggagtagagccctataagattcccttatacaaagtattagtaggggacgaatctgataatattccaggagtaaatggaataggtcctaaaaaggcctcaaagattcttgagaaaatttcaagtgtagatgaatttaaaagtaaaataaaagttttggatagtgatttaagggagcttattgagaaaaattggaatattattgaaagaaatttagaacttgttactttaaaaaatatagataaggatcttattcttaaacccttcgagattaaaagagatgaaaaagtaatagattttttgaagagatatgaacttaagagtattcttcaaaagttatttcctgatcttcaagaggaagaaaatatagagattaaagatgtcgaagagatcaattttaatgaggtagaaaaagaaggctactttgcctttaaatgtcttggagatagggcttttgagggtatttctctttccttcaaggagggggaaggatattttatatctccttttgatttcaataatgagataagaaagaagattgaaaatataatttcttcagagaatgttaaaaaaattggctcttatattcaaagagatttacattttttaaactgtaaaataaagggcgatgtatttgatgttagtctcgcatcttatcttttgaaccctgaaagacaaaatcactctcttgatattttgataggagagtatctaaataaaacctcttttattcctcaaaaatacgctggttatctttttccgttaaagtctattcttgaggagaggataaagaatgaagggttagaatttgtactttataacatagagattccattaatccctgtactttactccatggagaagtgggggataaaggtagataaggaatatttaaaacagctttctgatgaattctgcgagagaattaaaaaattggaagaagagatatatgaacttgcaggaaccagatttaatctcaattctccaaaacaactttctgaagttttatttgagaggttaaaacttccttctggtaagaaaggaaaaacaggatattctacgtcgtcttctgtgcttcaaaacttaataaatgctcatcctatagtgagaaaaatcctccaatatagagaactctataaattgaagagtacttatgtggatgctattcctaatctggttaatccacaaacaggtagagttcatacaaaatttaatcctacaggtacagctacaggaagaataagtagtagtgaacctaatcttcagaatattcctataaaaagtgaagaaggtagaaagataagaagagccttcgtgtcagaagatggatattttcttgtatctcttgattattctcagatagagctaaggattatggctcatctttctcaggagcctaaattaatatctgccttccaaaaaggagaggatattcatagaagaacagcatcggagatttttggagtgccagaggaagaagttgatgatcttttaaggtcaagggcaaaggccgttaattttggaattatttatggtatctcttcttttggactttctgagactgtaagtattacaccagaagaggcagagaaatttatagactcgtattttaagcactatccaagagtgaagctttttatagataagactattcatgaggcaagagaaaaactgtacgttaaaaccttatttggcagaaaaagatatattcctgagattaagaaaataaataaacaggtaaggaatgcctatgaaaggatagcaataaatgcgccaattcagggaacagctgctgatattataaaacttgccatgatagaaatttacaaggagattgaaaataaaaatctcaagtcaagaatactccttcaaattcatgatgagcttattcttgaagtgccagaggaggagatggaatttactcctttaatggcaaaggaaaaaatggaaaaggtggtagaactttcggttcctcttgtagttgaaatctcggtaggtaaaaatcttgctgaattaaaatgagctataagattggtcgac

SEQ ID NO: 2055 - DNA, 2673 bp, Artificial Sequence
  Description of Artificial Sequence: Synthetic DNA sequence of Dictyoglomus thermophilum DNA S786M
atgaaatacctgctgccgaccgctgctgctggtctgctgctcctcgctgcccagccggcgatggccatggatatcggaattaattcggatccgaaatctctgtgggatctttttcaagaaaataccgagaaagagtccaaaaggaagattctgattattgatggctcaagcctcatatacagggtttattacgcccttccccctttaaagacaaaaaatggtgaattaactaatgctctttatggcttcataagaatacttttaaaggccgtagaagattttaatcctgatcttgtaggcgttgcctttgatagacctgaacctacttttaggcatgtgatttataaagagtataaggctaagagaccacctatgaaggatgatttgaaagcgcagataccatggataagagaatttctaaggttaaatgatatacctctattggaagagcctggctatgaagcggatgatataatagctactatagtgaataaatataaggatgatttaaaatatattctctctggagatttagatcttttgcaattagtctcggacaaaacctttctaatacatcctcaaaagggaattactgagtttactatttatgatccaaaagctgtaaaggataggtttggagtagagccctataagattcccttatacaaagtattagtaggggacgaatctgataatattccaggagtaaatggaataggtcctaaaaaggcctcaaagattcttgagaaaatttcaagtgtagatgaatttaaaagtaaaataaaagttttggatagtgatttaagggagcttattgagaaaaattggaatattattgaaagaaatttagaacttgttactttaaaaaatatagataaggatcttattcttaaacccttcgagattaaaagagatgaaaaagtaatagattttttgaagagatatgaacttaagagtattcttcaaaagttatttcctgatcttcaagaggaagaaaatatagagattaaagatgtcgaagagatcaattttaatgaggtagaaaaagaaggctactttgcctttaaatgtcttggagatagggcttttgagggtatttctctttccttcaaggagggggaaggatattttatatctccttttgatttcaataatgagataagaaagaagattgaaaatataatttcttcagagaatgttaaaaaaattggctcttatattcaaagagatttacattttttaaactgtaaaataaagggcgatgtatttgatgttagtctcgcatcttatcttttgaaccctgaaagacaaaatcactctcttgatattttgataggagagtatctaaataaaacctcttttattcctcaaaaatacgctggttatctttttccgttaaagtctattcttgaggagaggataaagaatgaagggttagaatttgtactttataacatagagattccattaatccctgtactttactccatggagaagtgggggataaaggtagataaggaatatttaaaacagctttctgatgaattctgcgagagaattaaaaaattggaagaagagatatatgaacttgcaggaaccagatttaatctcaattctccaaaacaactttctgaagttttatttgagaggttaaaacttccttctggtaagaaaggaaaaacaggatattctacgtcgtcttctgtgcttcaaaacttaataaatgctcatcctatagtgagaaaaatcctccaatatagagaactctataaattgaagagtacttatgtggatgctattcctaatctggttaatccacaaacaggtagagttcatacaaaatttaatcctacaggtacagctacaggaagaataagtagtagtgaacctaatcttcagaatattcctataaaaagtgaagaaggtagaaagataagaagagccttcgtgtcagaagatggatattttcttgtatctcttgattattctcagatagagctaaggattatggctcatctttctcaggagcctaaattaatatctgccttccaaaaaggagaggatattcatagaagaacagcatcggagatttttggagtgccagaggaagaagttgatgatcttttaaggtcaagggcaaaggccgttaattttggaattatttatggtatctcttcttttggactttctgagactgtaagtattacaccagaagaggcagagaaatttatagactcgtattttaagcactatccaagagtgaagctttttatagataagactattcatgaggcaagagaaaaactgtacgttaaaaccttatttggcagaaaaagatatattcctgagattaagatgataaataaacaggtaaggaatgcctatgaaaggatagcaataaatgcgccaattcagggaacagctgctgatattataaaacttgccatgatagaaatttacaaggagattgaaaataaaaatctcaagtcaagaatactccttcaaattcatgatgagcttattcttgaagtgccagaggaggagatggaatttactcctttaatggcaaaggaaaaaatggaaaaggtggtagaactttcggttcctcttgtagttgaaatctcggtaggtaaaaatcttgctgaattaaaatgagctataagattggtcgac

SEQ ID NO: 2056 - DNA, 2673 bp, Artificial Sequence
  Description of Artificial Sequence: Synthetic DNA sequence of Dictyoglomus thermophilum DNA S786F
atgaaatacctgctgccgaccgctgctgctggtctgctgctcctcgctgcccagccggcgatggccatggatatcggaattaattcggatccgaaatctctgtgggatctttttcaagaaaataccgagaaagagtccaaaaggaagattctgattattgatggctcaagcctcatatacagggtttattacgcccttccccctttaaagacaaaaaatggtgaattaactaatgctctttatggcttcataagaatacttttaaaggccgtagaagattttaatcctgatcttgtaggcgttgcctttgatagacctgaacctacttttaggcatgtgatttataaagagtataaggctaagagaccacctatgaaggatgatttgaaagcgcagataccatggataagagaatttctaaggttaaatgatatacctctattggaagagcctggctatgaagcggatgatataatagctactatagtgaataaatataaggatgatttaaaatatattctctctggagatttagatcttttgcaattagtctcggacaaaacctttctaatacatcctcaaaagggaattactgagtttactatttatgatccaaaagctgtaaaggataggtttggagtagagccctataagattcccttatacaaagtattagtaggggacgaatctgataatattccaggagtaaatggaataggtcctaaaaaggcctcaaagattcttgagaaaatttcaagtgtagatgaatttaaaagtaaaataaaagttttggatagtgatttaagggagcttattgagaaaaattggaatattattgaaagaaatttagaacttgttactttaaaaaatatagataaggatcttattcttaaacccttcgagattaaaagagatgaaaaagtaatagattttttgaagagatatgaacttaagagtattcttcaaaagttatttcctgatcttcaagaggaagaaaatatagagattaaagatgtcgaagagatcaattttaatgaggtagaaaaagaaggctactttgcctttaaatgtcttggagatagggcttttgagggtatttctctttccttcaaggagggggaaggatattttatatctccttttgatttcaataatgagataagaaagaagattgaaaatataatttcttcagagaatgttaaaaaaattggctcttatattcaaagagatttacattttttaaactgtaaaataaagggcgatgtatttgatgttagtctcgcatcttatcttttgaaccctgaaagacaaaatcactctcttgatattttgataggagagtatctaaataaaacctcttttattcctcaaaaatacgctggttatctttttccgttaaagtctattcttgaggagaggataaagaatgaagggttagaatttgtactttataacatagagattccattaatccctgtactttactccatggagaagtgggggataaaggtagataaggaatatttaaaacagctttctgatgaattctgcgagagaattaaaaaattggaagaagagatatatgaacttgcaggaaccagatttaatctcaattctccaaaacaactttctgaagttttatttgagaggttaaaacttccttctggtaagaaaggaaaaacaggatattctacgtcgtcttctgtgcttcaaaacttaataaatgctcatcctatagtgagaaaaatcctccaatatagagaactctataaattgaagagtacttatgtggatgctattcctaatctggttaatccacaaacaggtagagttcatacaaaatttaatcctacaggtacagctacaggaagaataagtagtagtgaacctaatcttcagaatattcctataaaaagtgaagaaggtagaaagataagaagagccttcgtgtcagaagatggatattttcttgtatctcttgattattctcagatagagctaaggattatggctcatctttctcaggagcctaaattaatatctgccttccaaaaaggagaggatattcatagaagaacagcatcggagatttttggagtgccagaggaagaagttgatgatcttttaaggtcaagggcaaaggccgttaattttggaattatttatggtatctcttcttttggactttctgagactgtaagtattacaccagaagaggcagagaaatttatagactcgtattttaagcactatccaagagtgaagctttttatagataagactattcatgaggcaagagaaaaactgtacgttaaaaccttatttggcagaaaaagatatattcctgagattaagtttataaataaacaggtaaggaatgcctatgaaaggatagcaataaatgcgccaattcagggaacagctgctgatattataaaacttgccatgatagaaatttacaaggagattgaaaataaaaatctcaagtcaagaatactccttcaaattcatgatgagcttattcttgaagtgccagaggaggagatggaatttactcctttaatggcaaaggaaaaaatggaaaaggtggtagaactttcggttcctcttgtagttgaaatctcggtaggtaaaaatcttgctgaattaaaatgagctataagattggtcgac

SEQ ID NO: 2057 - DNA, 2673 bp, Artificial Sequence
  Description of Artificial Sequence: Synthetic DNA sequence of Dictyoglomus thermophilum DNA S786P
atgaaatacctgctgccgaccgctgctgctggtctgctgctcctcgctgcccagccggcgatggccatggatatcggaattaattcggatccgaaatctctgtgggatctttttcaagaaaataccgagaaagagtccaaaaggaagattctgattattgatggctcaagcctcatatacagggtttattacgcccttccccctttaaagacaaaaaatggtgaattaactaatgctctttatggcttcataagaatacttttaaaggccgtagaagattttaatcctgatcttgtaggcgttgcctttgatagacctgaacctacttttaggcatgtgatttataaagagtataaggctaagagaccacctatgaaggatgatttgaaagcgcagataccatggataagagaatttctaaggttaaatgatatacctctattggaagagcctggctatgaagcggatgatataatagctactatagtgaataaatataaggatgatttaaaatatattctctctggagatttagatcttttgcaattagtctcggacaaaacctttctaatacatcctcaaaagggaattactgagtttactatttatgatccaaaagctgtaaaggataggtttggagtagagccctataagattcccttatacaaagtattagtaggggacgaatctgataatattccaggagtaaatggaataggtcctaaaaaggcctcaaagattcttgagaaaatttcaagtgtagatgaatttaaaagtaaaataaaagttttggatagtgatttaagggagcttattgagaaaaattggaatattattgaaagaaatttagaacttgttactttaaaaaatatagataaggatcttattcttaaacccttcgagattaaaagagatgaaaaagtaatagattttttgaagagatatgaacttaagagtattcttcaaaagttatttcctgatcttcaagaggaagaaaatatagagattaaagatgtcgaagagatcaattttaatgaggtagaaaaagaaggctactttgcctttaaatgtcttggagatagggcttttgagggtatttctctttccttcaaggagggggaaggatattttatatctccttttgatttcaataatgagataagaaagaagattgaaaatataatttcttcagagaatgttaaaaaaattggctcttatattcaaagagatttacattttttaaactgtaaaataaagggcgatgtatttgatgttagtctcgcatcttatcttttgaaccctgaaagacaaaatcactctcttgatattttgataggagagtatctaaataaaacctcttttattcctcaaaaatacgctggttatctttttccgttaaagtctattcttgaggagaggataaagaatgaagggttagaatttgtactttataacatagagattccattaatccctgtactttactccatggagaagtgggggataaaggtagataaggaatatttaaaacagctttctgatgaattctgcgagagaattaaaaaattggaagaagagatatatgaacttgcaggaaccagatttaatctcaattctccaaaacaactttctgaagttttatttgagaggttaaaacttccttctggtaagaaaggaaaaacaggatattctacgtcgtcttctgtgcttcaaaacttaataaatgctcatcctatagtgagaaaaatcctccaatatagagaactctataaattgaagagtacttatgtggatgctattcctaatctggttaatccacaaacaggtagagttcatacaaaatttaatcctacaggtacagctacaggaagaataagtagtagtgaacctaatcttcagaatattcctataaaaagtgaagaaggtagaaagataagaagagccttcgtgtcagaagatggatattttcttgtatctcttgattattctcagatagagctaaggattatggctcatctttctcaggagcctaaattaatatctgccttccaaaaaggagaggatattcatagaagaacagcatcggagatttttggagtgccagaggaagaagttgatgatcttttaaggtcaagggcaaaggccgttaattttggaattatttatggtatctcttcttttggactttctgagactgtaagtattacaccagaagaggcagagaaatttatagactcgtattttaagcactatccaagagtgaagctttttatagataagactattcatgaggcaagagaaaaactgtacgttaaaaccttatttggcagaaaaagatatattcctgagattaagcctataaataaacaggtaaggaatgcctatgaaaggatagcaataaatgcgccaattcagggaacagctgctgatattataaaacttgccatgatagaaatttacaaggagattgaaaataaaaatctcaagtcaagaatactccttcaaattcatgatgagcttattcttgaagtgccagaggaggagatggaatttactcctttaatggcaaaggaaaaaatggaaaaggtggtagaactttcggttcctcttgtagttgaaatctcggtaggtaaaaatcttgctgaattaaaatgagctataagattggtcgac

SEQ ID NO: 2058 - DNA, 2673 bp, Artificial Sequence
  Description of Artificial Sequence: Synthetic DNA sequence of Dictyoglomus thermophilum DNA S786T
atgaaatacctgctgccgaccgctgctgctggtctgctgctcctcgctgcccagccggcgatggccatggatatcggaattaattcggatccgaaatctctgtgggatctttttcaagaaaataccgagaaagagtccaaaaggaagattctgattattgatggctcaagcctcatatacagggtttattacgcccttccccctttaaagacaaaaaatggtgaattaactaatgctctttatggcttcataagaatacttttaaaggccgtagaagattttaatcctgatcttgtaggcgttgcctttgatagacctgaacctacttttaggcatgtgatttataaagagtataaggctaagagaccacctatgaaggatgatttgaaagcgcagataccatggataagagaatttctaaggttaaatgatatacctctattggaagagcctggctatgaagcggatgatataatagctactatagtgaataaatataaggatgatttaaaatatattctctctggagatttagatcttttgcaattagtctcggacaaaacctttctaatacatcctcaaaagggaattactgagtttactatttatgatccaaaagctgtaaaggataggtttggagtagagccctataagattcccttatacaaagtattagtaggggacgaatctgataatattccaggagtaaatggaataggtcctaaaaaggcctcaaagattcttgagaaaatttcaagtgtagatgaatttaaaagtaaaataaaagttttggatagtgatttaagggagcttattgagaaaaattggaatattattgaaagaaatttagaacttgttactttaaaaaatatagataaggatcttattcttaaacccttcgagattaaaagagatgaaaaagtaatagattttttgaagagatatgaacttaagagtattcttcaaaagttatttcctgatcttcaagaggaagaaaatatagagattaaagatgtcgaagagatcaattttaatgaggtagaaaaagaaggctactttgcctttaaatgtcttggagatagggcttttgagggtatttctctttccttcaaggagggggaaggatattttatatctccttttgatttcaataatgagataagaaagaagattgaaaatataatttcttcagagaatgttaaaaaaattggctcttatattcaaagagatttacattttttaaactgtaaaataaagggcgatgtatttgatgttagtctcgcatcttatcttttgaaccctgaaagacaaaatcactctcttgatattttgataggagagtatctaaataaaacctcttttattcctcaaaaatacgctggttatctttttccgttaaagtctattcttgaggagaggataaagaatgaagggttagaatttgtactttataacatagagattccattaatccctgtactttactccatggagaagtgggggataaaggtagataaggaatatttaaaacagctttctgatgaattctgcgagagaattaaaaaattggaagaagagatatatgaacttgcaggaaccagatttaatctcaattctccaaaacaactttctgaagttttatttgagaggttaaaacttccttctggtaagaaaggaaaaacaggatattctacgtcgtcttctgtgcttcaaaacttaataaatgctcatcctatagtgagaaaaatcctccaatatagagaactctataaattgaagagtacttatgtggatgctattcctaatctggttaatccacaaacaggtagagttcatacaaaatttaatcctacaggtacagctacaggaagaataagtagtagtgaacctaatcttcagaatattcctataaaaagtgaagaaggtagaaagataagaagagccttcgtgtcagaagatggatattttcttgtatctcttgattattctcagatagagctaaggattatggctcatctttctcaggagcctaaattaatatctgccttccaaaaaggagaggatattcatagaagaacagcatcggagatttttggagtgccagaggaagaagttgatgatcttttaaggtcaagggcaaaggccgttaattttggaattatttatggtatctcttcttttggactttctgagactgtaagtattacaccagaagaggcagagaaatttatagactcgtattttaagcactatccaagagtgaagctttttatagataagactattcatgaggcaagagaaaaactgtacgttaaaaccttatttggcagaaaaagatatattcctgagattaagactataaataaacaggtaaggaatgcctatgaaaggatagcaataaatgcgccaattcagggaacagctgctgatattataaaacttgccatgatagaaatttacaaggagattgaaaataaaaatctcaagtcaagaatactccttcaaattcatgatgagcttattcttgaagtgccagaggaggagatggaatttactcctttaatggcaaaggaaaaaatggaaaaggtggtagaactttcggttcctcttgtagttgaaatctcggtaggtaaaaatcttgctgaattaaaatgagctataagattggtcgac

SEQ ID NO: 2059 - DNA, 2673 bp, Artificial Sequence
  Description of Artificial Sequence: Synthetic DNA sequence of Dictyoglomus thermophilum DNA S786W
atgaaatacctgctgccgaccgctgctgctggtctgctgctcctcgctgcccagccggcgatggccatggatatcggaattaattcggatccgaaatctctgtgggatctttttcaagaaaataccgagaaagagtccaaaaggaagattctgattattgatggctcaagcctcatatacagggtttattacgcccttccccctttaaagacaaaaaatggtgaattaactaatgctctttatggcttcataagaatacttttaaaggccgtagaagattttaatcctgatcttgtaggcgttgcctttgatagacctgaacctacttttaggcatgtgatttataaagagtataaggctaagagaccacctatgaaggatgatttgaaagcgcagataccatggataagagaatttctaaggttaaatgatatacctctattggaagagcctggctatgaagcggatgatataatagctactatagtgaataaatataaggatgatttaaaatatattctctctggagatttagatcttttgcaattagtctcggacaaaacctttctaatacatcctcaaaagggaattactgagtttactatttatgatccaaaagctgtaaaggataggtttggagtagagccctataagattcccttatacaaagtattagtaggggacgaatctgataatattccaggagtaaatggaataggtcctaaaaaggcctcaaagattcttgagaaaatttcaagtgtagatgaatttaaaagtaaaataaaagttttggatagtgatttaagggagcttattgagaaaaattggaatattattgaaagaaatttagaacttgttactttaaaaaatatagataaggatcttattcttaaacccttcgagattaaaagagatgaaaaagtaatagattttttgaagagatatgaacttaagagtattcttcaaaagttatttcctgatcttcaagaggaagaaaatatagagattaaagatgtcgaagagatcaattttaatgaggtagaaaaagaaggctactttgcctttaaatgtcttggagatagggcttttgagggtatttctctttccttcaaggagggggaaggatattttatatctccttttgatttcaataatgagataagaaagaagattgaaaatataatttcttcagagaatgttaaaaaaattggctcttatattcaaagagatttacattttttaaactgtaaaataaagggcgatgtatttgatgttagtctcgcatcttatcttttgaaccctgaaagacaaaatcactctcttgatattttgataggagagtatctaaataaaacctcttttattcctcaaaaatacgctggttatctttttccgttaaagtctattcttgaggagaggataaagaatgaagggttagaatttgtactttataacatagagattccattaatccctgtactttactccatggagaagtgggggataaaggtagataaggaatatttaaaacagctttctgatgaattctgcgagagaattaaaaaattggaagaagagatatatgaacttgcaggaaccagatttaatctcaattctccaaaacaactttctgaagttttatttgagaggttaaaacttccttctggtaagaaaggaaaaacaggatattctacgtcgtcttctgtgcttcaaaacttaataaatgctcatcctatagtgagaaaaatcctccaatatagagaactctataaattgaagagtacttatgtggatgctattcctaatctggttaatccacaaacaggtagagttcatacaaaatttaatcctacaggtacagctacaggaagaataagtagtagtgaacctaatcttcagaatattcctataaaaagtgaagaaggtagaaagataagaagagccttcgtgtcagaagatggatattttcttgtatctcttgattattctcagatagagctaaggattatggctcatctttctcaggagcctaaattaatatctgccttccaaaaaggagaggatattcatagaagaacagcatcggagatttttggagtgccagaggaagaagttgatgatcttttaaggtcaagggcaaaggccgttaattttggaattatttatggtatctcttcttttggactttctgagactgtaagtattacaccagaagaggcagagaaatttatagactcgtattttaagcactatccaagagtgaagctttttatagataagactattcatgaggcaagagaaaaactgtacgttaaaaccttatttggcagaaaaagatatattcctgagattaagtggataaataaacaggtaaggaatgcctatgaaaggatagcaataaatgcgccaattcagggaacagctgctgatattataaaacttgccatgatagaaatttacaaggagattgaaaataaaaatctcaagtcaagaatactccttcaaattcatgatgagcttattcttgaagtgccagaggaggagatggaatttactcctttaatggcaaaggaaaaaatggaaaaggtggtagaactttcggttcctcttgtagttgaaatctcggtaggtaaaaatcttgctgaattaaaatgagctataagattggtcgac

SEQ ID NO: 2060 - DNA, 2673 bp, Artificial Sequence
  Description of Artificial Sequence: Synthetic DNA sequence of Dictyoglomus thermophilum DNA S786Y
atgaaatacctgctgccgaccgctgctgctggtctgctgctcctcgctgcccagccggcgatggccatggatatcggaattaattcggatccgaaatctctgtgggatctttttcaagaaaataccgagaaagagtccaaaaggaagattctgattattgatggctcaagcctcatatacagggtttattacgcccttccccctttaaagacaaaaaatggtgaattaactaatgctctttatggcttcataagaatacttttaaaggccgtagaagattttaatcctgatcttgtaggcgttgcctttgatagacctgaacctacttttaggcatgtgatttataaagagtataaggctaagagaccacctatgaaggatgatttgaaagcgcagataccatggataagagaatttctaaggttaaatgatatacctctattggaagagcctggctatgaagcggatgatataatagctactatagtgaataaatataaggatgatttaaaatatattctctctggagatttagatcttttgcaattagtctcggacaaaacctttctaatacatcctcaaaagggaattactgagtttactatttatgatccaaaagctgtaaaggataggtttggagtagagccctataagattcccttatacaaagtattagtaggggacgaatctgataatattccaggagtaaatggaataggtcctaaaaaggcctcaaagattcttgagaaaatttcaagtgtagatgaatttaaaagtaaaataaaagttttggatagtgatttaagggagcttattgagaaaaattggaatattattgaaagaaatttagaacttgttactttaaaaaatatagataaggatcttattcttaaacccttcgagattaaaagagatgaaaaagtaatagattttttgaagagatatgaacttaagagtattcttcaaaagttatttcctgatcttcaagaggaagaaaatatagagattaaagatgtcgaagagatcaattttaatgaggtagaaaaagaaggctactttgcctttaaatgtcttggagatagggcttttgagggtatttctctttccttcaaggagggggaaggatattttatatctccttttgatttcaataatgagataagaaagaagattgaaaatataatttcttcagagaatgttaaaaaaattggctcttatattcaaagagatttacattttttaaactgtaaaataaagggcgatgtatttgatgttagtctcgcatcttatcttttgaaccctgaaagacaaaatcactctcttgatattttgataggagagtatctaaataaaacctcttttattcctcaaaaatacgctggttatctttttccgttaaagtctattcttgaggagaggataaagaatgaagggttagaatttgtactttataacatagagattccattaatccctgtactttactccatggagaagtgggggataaaggtagataaggaatatttaaaacagctttctgatgaattctgcgagagaattaaaaaattggaagaagagatatatgaacttgcaggaaccagatttaatctcaattctccaaaacaactttctgaagttttatttgagaggttaaaacttccttctggtaagaaaggaaaaacaggatattctacgtcgtcttctgtgcttcaaaacttaataaatgctcatcctatagtgagaaaaatcctccaatatagagaactctataaattgaagagtacttatgtggatgctattcctaatctggttaatccacaaacaggtagagttcatacaaaatttaatcctacaggtacagctacaggaagaataagtagtagtgaacctaatcttcagaatattcctataaaaagtgaagaaggtagaaagataagaagagccttcgtgtcagaagatggatattttcttgtatctcttgattattctcagatagagctaaggattatggctcatctttctcaggagcctaaattaatatctgccttccaaaaaggagaggatattcatagaagaacagcatcggagatttttggagtgccagaggaagaagttgatgatcttttaaggtcaagggcaaaggccgttaattttggaattatttatggtatctcttcttttggactttctgagactgtaagtattacaccagaagaggcagagaaatttatagactcgtattttaagcactatccaagagtgaagctttttatagataagactattcatgaggcaagagaaaaactgtacgttaaaaccttatttggcagaaaaagatatattcctgagattaagtatataaataaacaggtaaggaatgcctatgaaaggatagcaataaatgcgccaattcagggaacagctgctgatattataaaacttgccatgatagaaatttacaaggagattgaaaataaaaatctcaagtcaagaatactccttcaaattcatgatgagcttattcttgaagtgccagaggaggagatggaatttactcctttaatggcaaaggaaaaaatggaaaaggtggtagaactttcggttcctcttgtagttgaaatctcggtaggtaaaaatcttgctgaattaaaatgagctataagattggtcgac

SEQ ID NO: 2061 - DNA, 2673 bp, Artificial Sequence
  Description of Artificial Sequence: Synthetic DNA sequence of Dictyoglomus thermophilum DNA S786V
atgaaatacctgctgccgaccgctgctgctggtctgctgctcctcgctgcccagccggcgatggccatggatatcggaattaattcggatccgaaatctctgtgggatctttttcaagaaaataccgagaaagagtccaaaaggaagattctgattattgatggctcaagcctcatatacagggtttattacgcccttccccctttaaagacaaaaaatggtgaattaactaatgctctttatggcttcataagaatacttttaaaggccgtagaagattttaatcctgatcttgtaggcgttgcctttgatagacctgaacctacttttaggcatgtgatttataaagagtataaggctaagagaccacctatgaaggatgatttgaaagcgcagataccatggataagagaatttctaaggttaaatgatatacctctattggaagagcctggctatgaagcggatgatataatagctactatagtgaataaatataaggatgatttaaaatatattctctctggagatttagatcttttgcaattagtctcggacaaaacctttctaatacatcctcaaaagggaattactgagtttactatttatgatccaaaagctgtaaaggataggtttggagtagagccctataagattcccttatacaaagtattagtaggggacgaatctgataatattccaggagtaaatggaataggtcctaaaaaggcctcaaagattcttgagaaaatttcaagtgtagatgaatttaaaagtaaaataaaagttttggatagtgatttaagggagcttattgagaaaaattggaatattattgaaagaaatttagaacttgttactttaaaaaatatagataaggatcttattcttaaacccttcgagattaaaagagatgaaaaagtaatagattttttgaagagatatgaacttaagagtattcttcaaaagttatttcctgatcttcaagaggaagaaaatatagagattaaagatgtcgaagagatcaattttaatgaggtagaaaaagaaggctactttgcctttaaatgtcttggagatagggcttttgagggtatttctctttccttcaaggagggggaaggatattttatatctccttttgatttcaataatgagataagaaagaagattgaaaatataatttcttcagagaatgttaaaaaaattggctcttatattcaaagagatttacattttttaaactgtaaaataaagggcgatgtatttgatgttagtctcgcatcttatcttttgaaccctgaaagacaaaatcactctcttgatattttgataggagagtatctaaataaaacctcttttattcctcaaaaatacgctggttatctttttccgttaaagtctattcttgaggagaggataaagaatgaagggttagaatttgtactttataacatagagattccattaatccctgtactttactccatggagaagtgggggataaaggtagataaggaatatttaaaacagctttctgatgaattctgcgagagaattaaaaaattggaagaagagatatatgaacttgcaggaaccagatttaatctcaattctccaaaacaactttctgaagttttatttgagaggttaaaacttccttctggtaagaaaggaaaaacaggatattctacgtcgtcttctgtgcttcaaaacttaataaatgctcatcctatagtgagaaaaatcctccaatatagagaactctataaattgaagagtacttatgtggatgctattcctaatctggttaatccacaaacaggtagagttcatacaaaatttaatcctacaggtacagctacaggaagaataagtagtagtgaacctaatcttcagaatattcctataaaaagtgaagaaggtagaaagataagaagagccttcgtgtcagaagatggatattttcttgtatctcttgattattctcagatagagctaaggattatggctcatctttctcaggagcctaaattaatatctgccttccaaaaaggagaggatattcatagaagaacagcatcggagatttttggagtgccagaggaagaagttgatgatcttttaaggtcaagggcaaaggccgttaattttggaattatttatggtatctcttcttttggactttctgagactgtaagtattacaccagaagaggcagagaaatttatagactcgtattttaagcactatccaagagtgaagctttttatagataagactattcatgaggcaagagaaaaactgtacgttaaaaccttatttggcagaaaaagatatattcctgagattaaggttataaataaacaggtaaggaatgcctatgaaaggatagcaataaatgcgccaattcagggaacagctgctgatattataaaacttgccatgatagaaatttacaaggagattgaaaataaaaatctcaagtcaagaatactccttcaaattcatgatgagcttattcttgaagtgccagaggaggagatggaatttactcctttaatggcaaaggaaaaaatggaaaaggtggtagaactttcggttcctcttgtagttgaaatctcggtaggtaaaaatcttgctgaattaaaatgagctataagattggtcgac

SEQ ID NO: 2062 - DNA, 2673 bp, Artificial Sequence
  Description of Artificial Sequence: Synthetic DNA sequence of Dictyoglomus thermophilum DNA I787A
atgaaatacctgctgccgaccgctgctgctggtctgctgctcctcgctgcccagccggcgatggccatggatatcggaattaattcggatccgaaatctctgtgggatctttttcaagaaaataccgagaaagagtccaaaaggaagattctgattattgatggctcaagcctcatatacagggtttattacgcccttccccctttaaagacaaaaaatggtgaattaactaatgctctttatggcttcataagaatacttttaaaggccgtagaagattttaatcctgatcttgtaggcgttgcctttgatagacctgaacctacttttaggcatgtgatttataaagagtataaggctaagagaccacctatgaaggatgatttgaaagcgcagataccatggataagagaatttctaaggttaaatgatatacctctattggaagagcctggctatgaagcggatgatataatagctactatagtgaataaatataaggatgatttaaaatatattctctctggagatttagatcttttgcaattagtctcggacaaaacctttctaatacatcctcaaaagggaattactgagtttactatttatgatccaaaagctgtaaaggataggtttggagtagagccctataagattcccttatacaaagtattagtaggggacgaatctgataatattccaggagtaaatggaataggtcctaaaaaggcctcaaagattcttgagaaaatttcaagtgtagatgaatttaaaagtaaaataaaagttttggatagtgatttaagggagcttattgagaaaaattggaatattattgaaagaaatttagaacttgttactttaaaaaatatagataaggatcttattcttaaacccttcgagattaaaagagatgaaaaagtaatagattttttgaagagatatgaacttaagagtattcttcaaaagttatttcctgatcttcaagaggaagaaaatatagagattaaagatgtcgaagagatcaattttaatgaggtagaaaaagaaggctactttgcctttaaatgtcttggagatagggcttttgagggtatttctctttccttcaaggagggggaaggatattttatatctccttttgatttcaataatgagataagaaagaagattgaaaatataatttcttcagagaatgttaaaaaaattggctcttatattcaaagagatttacattttttaaactgtaaaataaagggcgatgtatttgatgttagtctcgcatcttatcttttgaaccctgaaagacaaaatcactctcttgatattttgataggagagtatctaaataaaacctcttttattcctcaaaaatacgctggttatctttttccgttaaagtctattcttgaggagaggataaagaatgaagggttagaatttgtactttataacatagagattccattaatccctgtactttactccatggagaagtgggggataaaggtagataaggaatatttaaaacagctttctgatgaattctgcgagagaattaaaaaattggaagaagagatatatgaacttgcaggaaccagatttaatctcaattctccaaaacaactttctgaagttttatttgagaggttaaaacttccttctggtaagaaaggaaaaacaggatattctacgtcgtcttctgtgcttcaaaacttaataaatgctcatcctatagtgagaaaaatcctccaatatagagaactctataaattgaagagtacttatgtggatgctattcctaatctggttaatccacaaacaggtagagttcatacaaaatttaatcctacaggtacagctacaggaagaataagtagtagtgaacctaatcttcagaatattcctataaaaagtgaagaaggtagaaagataagaagagccttcgtgtcagaagatggatattttcttgtatctcttgattattctcagatagagctaaggattatggctcatctttctcaggagcctaaattaatatctgccttccaaaaaggagaggatattcatagaagaacagcatcggagatttttggagtgccagaggaagaagttgatgatcttttaaggtcaagggcaaaggccgttaattttggaattatttatggtatctcttcttttggactttctgagactgtaagtattacaccagaagaggcagagaaatttatagactcgtattttaagcactatccaagagtgaagctttttatagataagactattcatgaggcaagagaaaaactgtacgttaaaaccttatttggcagaaaaagatatattcctgagattaagagcgctaataaacaggtaaggaatgcctatgaaaggatagcaataaatgcgccaattcagggaacagctgctgatattataaaacttgccatgatagaaatttacaaggagattgaaaataaaaatctcaagtcaagaatactccttcaaattcatgatgagcttattcttgaagtgccagaggaggagatggaatttactcctttaatggcaaaggaaaaaatggaaaaggtggtagaactttcggttcctcttgtagttgaaatctcggtaggtaaaaatcttgctgaattaaaatgagctataagattggtcgac

SEQ ID NO: 2063 - DNA, 2673 bp, Artificial Sequence
  Description of Artificial Sequence: Synthetic DNA sequence of Dictyoglomus thermophilum DNA I787R
atgaaatacctgctgccgaccgctgctgctggtctgctgctcctcgctgcccagccggcgatggccatggatatcggaattaattcggatccgaaatctctgtgggatctttttcaagaaaataccgagaaagagtccaaaaggaagattctgattattgatggctcaagcctcatatacagggtttattacgcccttccccctttaaagacaaaaaatggtgaattaactaatgctctttatggcttcataagaatacttttaaaggccgtagaagattttaatcctgatcttgtaggcgttgcctttgatagacctgaacctacttttaggcatgtgatttataaagagtataaggctaagagaccacctatgaaggatgatttgaaagcgcagataccatggataagagaatttctaaggttaaatgatatacctctattggaagagcctggctatgaagcggatgatataatagctactatagtgaataaatataaggatgatttaaaatatattctctctggagatttagatcttttgcaattagtctcggacaaaacctttctaatacatcctcaaaagggaattactgagtttactatttatgatccaaaagctgtaaaggataggtttggagtagagccctataagattcccttatacaaagtattagtaggggacgaatctgataatattccaggagtaaatggaataggtcctaaaaaggcctcaaagattcttgagaaaatttcaagtgtagatgaatttaaaagtaaaataaaagttttggatagtgatttaagggagcttattgagaaaaattggaatattattgaaagaaatttagaacttgttactttaaaaaatatagataaggatcttattcttaaacccttcgagattaaaagagatgaaaaagtaatagattttttgaagagatatgaacttaagagtattcttcaaaagttatttcctgatcttcaagaggaagaaaatatagagattaaagatgtcgaagagatcaattttaatgaggtagaaaaagaaggctactttgcctttaaatgtcttggagatagggcttttgagggtatttctctttccttcaaggagggggaaggatattttatatctccttttgatttcaataatgagataagaaagaagattgaaaatataatttcttcagagaatgttaaaaaaattggctcttatattcaaagagatttacattttttaaactgtaaaataaagggcgatgtatttgatgttagtctcgcatcttatcttttgaaccctgaaagacaaaatcactctcttgatattttgataggagagtatctaaataaaacctcttttattcctcaaaaatacgctggttatctttttccgttaaagtctattcttgaggagaggataaagaatgaagggttagaatttgtactttataacatagagattccattaatccctgtactttactccatggagaagtgggggataaaggtagataaggaatatttaaaacagctttctgatgaattctgcgagagaattaaaaaattggaagaagagatatatgaacttgcaggaaccagatttaatctcaattctccaaaacaactttctgaagttttatttgagaggttaaaacttccttctggtaagaaaggaaaaacaggatattctacgtcgtcttctgtgcttcaaaacttaataaatgctcatcctatagtgagaaaaatcctccaatatagagaactctataaattgaagagtacttatgtggatgctattcctaatctggttaatccacaaacaggtagagttcatacaaaatttaatcctacaggtacagctacaggaagaataagtagtagtgaacctaatcttcagaatattcctataaaaagtgaagaaggtagaaagataagaagagccttcgtgtcagaagatggatattttcttgtatctcttgattattctcagatagagctaaggattatggctcatctttctcaggagcctaaattaatatctgccttccaaaaaggagaggatattcatagaagaacagcatcggagatttttggagtgccagaggaagaagttgatgatcttttaaggtcaagggcaaaggccgttaattttggaattatttatggtatctcttcttttggactttctgagactgtaagtattacaccagaagaggcagagaaatttatagactcgtattttaagcactatccaagagtgaagctttttatagataagactattcatgaggcaagagaaaaactgtacgttaaaaccttatttggcagaaaaagatatattcctgagattaagagccgtaataaacaggtaaggaatgcctatgaaaggatagcaataaatgcgccaattcagggaacagctgctgatattataaaacttgccatgatagaaatttacaaggagattgaaaataaaaatctcaagtcaagaatactccttcaaattcatgatgagcttattcttgaagtgccagaggaggagatggaatttactcctttaatggcaaaggaaaaaatggaaaaggtggtagaactttcggttcctcttgtagttgaaatctcggtaggtaaaaatcttgctgaattaaaatgagctataagattggtcgac

SEQ ID NO: 2064 - DNA, 2673 bp, Artificial Sequence
  Description of Artificial Sequence: Synthetic DNA sequence of Dictyoglomus thermophilum DNA I787N
atgaaatacctgctgccgaccgctgctgctggtctgctgctcctcgctgcccagccggcgatggccatggatatcggaattaattcggatccgaaatctctgtgggatctttttcaagaaaataccgagaaagagtccaaaaggaagattctgattattgatggctcaagcctcatatacagggtttattacgcccttccccctttaaagacaaaaaatggtgaattaactaatgctctttatggcttcataagaatacttttaaaggccgtagaagattttaatcctgatcttgtaggcgttgcctttgatagacctgaacctacttttaggcatgtgatttataaagagtataaggctaagagaccacctatgaaggatgatttgaaagcgcagataccatggataagagaatttctaaggttaaatgatatacctctattggaagagcctggctatgaagcggatgatataatagctactatagtgaataaatataaggatgatttaaaatatattctctctggagatttagatcttttgcaattagtctcggacaaaacctttctaatacatcctcaaaagggaattactgagtttactatttatgatccaaaagctgtaaaggataggtttggagtagagccctataagattcccttatacaaagtattagtaggggacgaatctgataatattccaggagtaaatggaataggtcctaaaaaggcctcaaagattcttgagaaaatttcaagtgtagatgaatttaaaagtaaaataaaagttttggatagtgatttaagggagcttattgagaaaaattggaatattattgaaagaaatttagaacttgttactttaaaaaatatagataaggatcttattcttaaacccttcgagattaaaagagatgaaaaagtaatagattttttgaagagatatgaacttaagagtattcttcaaaagttatttcctgatcttcaagaggaagaaaatatagagattaaagatgtcgaagagatcaattttaatgaggtagaaaaagaaggctactttgcctttaaatgtcttggagatagggcttttgagggtatttctctttccttcaaggagggggaaggatattttatatctccttttgatttcaataatgagataagaaagaagattgaaaatataatttcttcagagaatgttaaaaaaattggctcttatattcaaagagatttacattttttaaactgtaaaataaagggcgatgtatttgatgttagtctcgcatcttatcttttgaaccctgaaagacaaaatcactctcttgatattttgataggagagtatctaaataaaacctcttttattcctcaaaaatacgctggttatctttttccgttaaagtctattcttgaggagaggataaagaatgaagggttagaatttgtactttataacatagagattccattaatccctgtactttactccatggagaagtgggggataaaggtagataaggaatatttaaaacagctttctgatgaattctgcgagagaattaaaaaattggaagaagagatatatgaacttgcaggaaccagatttaatctcaattctccaaaacaactttctgaagttttatttgagaggttaaaacttccttctggtaagaaaggaaaaacaggatattctacgtcgtcttctgtgcttcaaaacttaataaatgctcatcctatagtgagaaaaatcctccaatatagagaactctataaattgaagagtacttatgtggatgctattcctaatctggttaatccacaaacaggtagagttcatacaaaatttaatcctacaggtacagctacaggaagaataagtagtagtgaacctaatcttcagaatattcctataaaaagtgaagaaggtagaaagataagaagagccttcgtgtcagaagatggatattttcttgtatctcttgattattctcagatagagctaaggattatggctcatctttctcaggagcctaaattaatatctgccttccaaaaaggagaggatattcatagaagaacagcatcggagatttttggagtgccagaggaagaagttgatgatcttttaaggtcaagggcaaaggccgttaattttggaattatttatggtatctcttcttttggactttctgagactgtaagtattacaccagaagaggcagagaaatttatagactcgtattttaagcactatccaagagtgaagctttttatagataagactattcatgaggcaagagaaaaactgtacgttaaaaccttatttggcagaaaaagatatattcctgagattaagagcaataataaacaggtaaggaatgcctatgaaaggatagcaataaatgcgccaattcagggaacagctgctgatattataaaacttgccatgatagaaatttacaaggagattgaaaataaaaatctcaagtcaagaatactccttcaaattcatgatgagcttattcttgaagtgccagaggaggagatggaatttactcctttaatggcaaaggaaaaaatggaaaaggtggtagaactttcggttcctcttgtagttgaaatctcggtaggtaaaaatcttgctgaattaaaatgagctataagattggtcgac

SEQ ID NO: 2065 - DNA, 2673 bp, Artificial Sequence
  Description of Artificial Sequence: Synthetic DNA sequence of Dictyoglomus thermophilum DNA I787D
atgaaatacctgctgccgaccgctgctgctggtctgctgctcctcgctgcccagccggcgatggccatggatatcggaattaattcggatccgaaatctctgtgggatctttttcaagaaaataccgagaaagagtccaaaaggaagattctgattattgatggctcaagcctcatatacagggtttattacgcccttccccctttaaagacaaaaaatggtgaattaactaatgctctttatggcttcataagaatacttttaaaggccgtagaagattttaatcctgatcttgtaggcgttgcctttgatagacctgaacctacttttaggcatgtgatttataaagagtataaggctaagagaccacctatgaaggatgatttgaaagcgcagataccatggataagagaatttctaaggttaaatgatatacctctattggaagagcctggctatgaagcggatgatataatagctactatagtgaataaatataaggatgatttaaaatatattctctctggagatttagatcttttgcaattagtctcggacaaaacctttctaatacatcctcaaaagggaattactgagtttactatttatgatccaaaagctgtaaaggataggtttggagtagagccctataagattcccttatacaaagtattagtaggggacgaatctgataatattccaggagtaaatggaataggtcctaaaaaggcctcaaagattcttgagaaaatttcaagtgtagatgaatttaaaagtaaaataaaagttttggatagtgatttaagggagcttattgagaaaaattggaatattattgaaagaaatttagaacttgttactttaaaaaatatagataaggatcttattcttaaacccttcgagattaaaagagatgaaaaagtaatagattttttgaagagatatgaacttaagagtattcttcaaaagttatttcctgatcttcaagaggaagaaaatatagagattaaagatgtcgaagagatcaattttaatgaggtagaaaaagaaggctactttgcctttaaatgtcttggagatagggcttttgagggtatttctctttccttcaaggagggggaaggatattttatatctccttttgatttcaataatgagataagaaagaagattgaaaatataatttcttcagagaatgttaaaaaaattggctcttatattcaaagagatttacattttttaaactgtaaaataaagggcgatgtatttgatgttagtctcgcatcttatcttttgaaccctgaaagacaaaatcactctcttgatattttgataggagagtatctaaataaaacctcttttattcctcaaaaatacgctggttatctttttccgttaaagtctattcttgaggagaggataaagaatgaagggttagaatttgtactttataacatagagattccattaatccctgtactttactccatggagaagtgggggataaaggtagataaggaatatttaaaacagctttctgatgaattctgcgagagaattaaaaaattggaagaagagatatatgaacttgcaggaaccagatttaatctcaattctccaaaacaactttctgaagttttatttgagaggttaaaacttccttctggtaagaaaggaaaaacaggatattctacgtcgtcttctgtgcttcaaaacttaataaatgctcatcctatagtgagaaaaatcctccaatatagagaactctataaattgaagagtacttatgtggatgctattcctaatctggttaatccacaaacaggtagagttcatacaaaatttaatcctacaggtacagctacaggaagaataagtagtagtgaacctaatcttcagaatattcctataaaaagtgaagaaggtagaaagataagaagagccttcgtgtcagaagatggatattttcttgtatctcttgattattctcagatagagctaaggattatggctcatctttctcaggagcctaaattaatatctgccttccaaaaaggagaggatattcatagaagaacagcatcggagatttttggagtgccagaggaagaagttgatgatcttttaaggtcaagggcaaaggccgttaattttggaattatttatggtatctcttcttttggactttctgagactgtaagtattacaccagaagaggcagagaaatttatagactcgtattttaagcactatccaagagtgaagctttttatagataagactattcatgaggcaagagaaaaactgtacgttaaaaccttatttggcagaaaaagatatattcctgagattaagagcgataataaacaggtaaggaatgcctatgaaaggatagcaataaatgcgccaattcagggaacagctgctgatattataaaacttgccatgatagaaatttacaaggagattgaaaataaaaatctcaagtcaagaatactccttcaaattcatgatgagcttattcttgaagtgccagaggaggagatggaatttactcctttaatggcaaaggaaaaaatggaaaaggtggtagaactttcggttcctcttgtagttgaaatctcggtaggtaaaaatcttgctgaattaaaatgagctataagattggtcgac

SEQ ID NO: 2066 - DNA, 2673 bp, Artificial Sequence
  Description of Artificial Sequence: Synthetic DNA sequence of Dictyoglomus thermophilum DNA I787C
atgaaatacctgctgccgaccgctgctgctggtctgctgctcctcgctgcccagccggcgatggccatggatatcggaattaattcggatccgaaatctctgtgggatctttttcaagaaaataccgagaaagagtccaaaaggaagattctgattattgatggctcaagcctcatatacagggtttattacgcccttccccctttaaagacaaaaaatggtgaattaactaatgctctttatggcttcataagaatacttttaaaggccgtagaagattttaatcctgatcttgtaggcgttgcctttgatagacctgaacctacttttaggcatgtgatttataaagagtataaggctaagagaccacctatgaaggatgatttgaaagcgcagataccatggataagagaatttctaaggttaaatgatatacctctattggaagagcctggctatgaagcggatgatataatagctactatagtgaataaatataaggatgatttaaaatatattctctctggagatttagatcttttgcaattagtctcggacaaaacctttctaatacatcctcaaaagggaattactgagtttactatttatgatccaaaagctgtaaaggataggtttggagtagagccctataagattcccttatacaaagtattagtaggggacgaatctgataatattccaggagtaaatggaataggtcctaaaaaggcctcaaagattcttgagaaaatttcaagtgtagatgaatttaaaagtaaaataaaagttttggatagtgatttaagggagcttattgagaaaaattggaatattattgaaagaaatttagaacttgttactttaaaaaatatagataaggatcttattcttaaacccttcgagattaaaagagatgaaaaagtaatagattttttgaagagatatgaacttaagagtattcttcaaaagttatttcctgatcttcaagaggaagaaaatatagagattaaagatgtcgaagagatcaattttaatgaggtagaaaaagaaggctactttgcctttaaatgtcttggagatagggcttttgagggtatttctctttccttcaaggagggggaaggatattttatatctccttttgatttcaataatgagataagaaagaagattgaaaatataatttcttcagagaatgttaaaaaaattggctcttatattcaaagagatttacattttttaaactgtaaaataaagggcgatgtatttgatgttagtctcgcatcttatcttttgaaccctgaaagacaaaatcactctcttgatattttgataggagagtatctaaataaaacctcttttattcctcaaaaatacgctggttatctttttccgttaaagtctattcttgaggagaggataaagaatgaagggttagaatttgtactttataacatagagattccattaatccctgtactttactccatggagaagtgggggataaaggtagataaggaatatttaaaacagctttctgatgaattctgcgagagaattaaaaaattggaagaagagatatatgaacttgcaggaaccagatttaatctcaattctccaaaacaactttctgaagttttatttgagaggttaaaacttccttctggtaagaaaggaaaaacaggatattctacgtcgtcttctgtgcttcaaaacttaataaatgctcatcctatagtgagaaaaatcctccaatatagagaactctataaattgaagagtacttatgtggatgctattcctaatctggttaatccacaaacaggtagagttcatacaaaatttaatcctacaggtacagctacaggaagaataagtagtagtgaacctaatcttcagaatattcctataaaaagtgaagaaggtagaaagataagaagagccttcgtgtcagaagatggatattttcttgtatctcttgattattctcagatagagctaaggattatggctcatctttctcaggagcctaaattaatatctgccttccaaaaaggagaggatattcatagaagaacagcatcggagatttttggagtgccagaggaagaagttgatgatcttttaaggtcaagggcaaaggccgttaattttggaattatttatggtatctcttcttttggactttctgagactgtaagtattacaccagaagaggcagagaaatttatagactcgtattttaagcactatccaagagtgaagctttttatagataagactattcatgaggcaagagaaaaactgtacgttaaaaccttatttggcagaaaaagatatattcctgagattaagagctgtaataaacaggtaaggaatgcctatgaaaggatagcaataaatgcgccaattcagggaacagctgctgatattataaaacttgccatgatagaaatttacaaggagattgaaaataaaaatctcaagtcaagaatactccttcaaattcatgatgagcttattcttgaagtgccagaggaggagatggaatttactcctttaatggcaaaggaaaaaatggaaaaggtggtagaactttcggttcctcttgtagttgaaatctcggtaggtaaaaatcttgctgaattaaaatgagctataagattggtcgac

SEQ ID NO: 2067 - DNA, 2673 bp, Artificial Sequence
  Description of Artificial Sequence: Synthetic DNA sequence of Dictyoglomus thermophilum DNA I787E
atgaaatacctgctgccgaccgctgctgctggtctgctgctcctcgctgcccagccggcgatggccatggatatcggaattaattcggatccgaaatctctgtgggatctttttcaagaaaataccgagaaagagtccaaaaggaagattctgattattgatggctcaagcctcatatacagggtttattacgcccttccccctttaaagacaaaaaatggtgaattaactaatgctctttatggcttcataagaatacttttaaaggccgtagaagattttaatcctgatcttgtaggcgttgcctttgatagacctgaacctacttttaggcatgtgatttataaagagtataaggctaagagaccacctatgaaggatgatttgaaagcgcagataccatggataagagaatttctaaggttaaatgatatacctctattggaagagcctggctatgaagcggatgatataatagctactatagtgaataaatataaggatgatttaaaatatattctctctggagatttagatcttttgcaattagtctcggacaaaacctttctaatacatcctcaaaagggaattactgagtttactatttatgatccaaaagctgtaaaggataggtttggagtagagccctataagattcccttatacaaagtattagtaggggacgaatctgataatattccaggagtaaatggaataggtcctaaaaaggcctcaaagattcttgagaaaatttcaagtgtagatgaatttaaaagtaaaataaaagttttggatagtgatttaagggagcttattgagaaaaattggaatattattgaaagaaatttagaacttgttactttaaaaaatatagataaggatcttattcttaaacccttcgagattaaaagagatgaaaaagtaatagattttttgaagagatatgaacttaagagtattcttcaaaagttatttcctgatcttcaagaggaagaaaatatagagattaaagatgtcgaagagatcaattttaatgaggtagaaaaagaaggctactttgcctttaaatgtcttggagatagggcttttgagggtatttctctttccttcaaggagggggaaggatattttatatctccttttgatttcaataatgagataagaaagaagattgaaaatataatttcttcagagaatgttaaaaaaattggctcttatattcaaagagatttacattttttaaactgtaaaataaagggcgatgtatttgatgttagtctcgcatcttatcttttgaaccctgaaagacaaaatcactctcttgatattttgataggagagtatctaaataaaacctcttttattcctcaaaaatacgctggttatctttttccgttaaagtctattcttgaggagaggataaagaatgaagggttagaatttgtactttataacatagagattccattaatccctgtactttactccatggagaagtgggggataaaggtagataaggaatatttaaaacagctttctgatgaattctgcgagagaattaaaaaattggaagaagagatatatgaacttgcaggaaccagatttaatctcaattctccaaaacaactttctgaagttttatttgagaggttaaaacttccttctggtaagaaaggaaaaacaggatattctacgtcgtcttctgtgcttcaaaacttaataaatgctcatcctatagtgagaaaaatcctccaatatagagaactctataaattgaagagtacttatgtggatgctattcctaatctggttaatccacaaacaggtagagttcatacaaaatttaatcctacaggtacagctacaggaagaataagtagtagtgaacctaatcttcagaatattcctataaaaagtgaagaaggtagaaagataagaagagccttcgtgtcagaagatggatattttcttgtatctcttgattattctcagatagagctaaggattatggctcatctttctcaggagcctaaattaatatctgccttccaaaaaggagaggatattcatagaagaacagcatcggagatttttggagtgccagaggaagaagttgatgatcttttaaggtcaagggcaaaggccgttaattttggaattatttatggtatctcttcttttggactttctgagactgtaagtattacaccagaagaggcagagaaatttatagactcgtattttaagcactatccaagagtgaagctttttatagataagactattcatgaggcaagagaaaaactgtacgttaaaaccttatttggcagaaaaagatatattcctgagattaagagcgaaaataaacaggtaaggaatgcctatgaaaggatagcaataaatgcgccaattcagggaacagctgctgatattataaaacttgccatgatagaaatttacaaggagattgaaaataaaaatctcaagtcaagaatactccttcaaattcatgatgagcttattcttgaagtgccagaggaggagatggaatttactcctttaatggcaaaggaaaaaatggaaaaggtggtagaactttcggttcctcttgtagttgaaatctcggtaggtaaaaatcttgctgaattaaaatgagctataagattggtcgac

SEQ ID NO: 2068 - DNA, 2673 bp, Artificial Sequence
  Description of Artificial Sequence: Synthetic DNA sequence of Dictyoglomus thermophilum DNA I787Q
atgaaatacctgctgccgaccgctgctgctggtctgctgctcctcgctgcccagccggcgatggccatggatatcggaattaattcggatccgaaatctctgtgggatctttttcaagaaaataccgagaaagagtccaaaaggaagattctgattattgatggctcaagcctcatatacagggtttattacgcccttccccctttaaagacaaaaaatggtgaattaactaatgctctttatggcttcataagaatacttttaaaggccgtagaagattttaatcctgatcttgtaggcgttgcctttgatagacctgaacctacttttaggcatgtgatttataaagagtataaggctaagagaccacctatgaaggatgatttgaaagcgcagataccatggataagagaatttctaaggttaaatgatatacctctattggaagagcctggctatgaagcggatgatataatagctactatagtgaataaatataaggatgatttaaaatatattctctctggagatttagatcttttgcaattagtctcggacaaaacctttctaatacatcctcaaaagggaattactgagtttactatttatgatccaaaagctgtaaaggataggtttggagtagagccctataagattcccttatacaaagtattagtaggggacgaatctgataatattccaggagtaaatggaataggtcctaaaaaggcctcaaagattcttgagaaaatttcaagtgtagatgaatttaaaagtaaaataaaagttttggatagtgatttaagggagcttattgagaaaaattggaatattattgaaagaaatttagaacttgttactttaaaaaatatagataaggatcttattcttaaacccttcgagattaaaagagatgaaaaagtaatagattttttgaagagatatgaacttaagagtattcttcaaaagttatttcctgatcttcaagaggaagaaaatatagagattaaagatgtcgaagagatcaattttaatgaggtagaaaaagaaggctactttgcctttaaatgtcttggagatagggcttttgagggtatttctctttccttcaaggagggggaaggatattttatatctccttttgatttcaataatgagataagaaagaagattgaaaatataatttcttcagagaatgttaaaaaaattggctcttatattcaaagagatttacattttttaaactgtaaaataaagggcgatgtatttgatgttagtctcgcatcttatcttttgaaccctgaaagacaaaatcactctcttgatattttgataggagagtatctaaataaaacctcttttattcctcaaaaatacgctggttatctttttccgttaaagtctattcttgaggagaggataaagaatgaagggttagaatttgtactttataacatagagattccattaatccctgtactttactccatggagaagtgggggataaaggtagataaggaatatttaaaacagctttctgatgaattctgcgagagaattaaaaaattggaagaagagatatatgaacttgcaggaaccagatttaatctcaattctccaaaacaactttctgaagttttatttgagaggttaaaacttccttctggtaagaaaggaaaaacaggatattctacgtcgtcttctgtgcttcaaaacttaataaatgctcatcctatagtgagaaaaatcctccaatatagagaactctataaattgaagagtacttatgtggatgctattcctaatctggttaatccacaaacaggtagagttcatacaaaatttaatcctacaggtacagctacaggaagaataagtagtagtgaacctaatcttcagaatattcctataaaaagtgaagaaggtagaaagataagaagagccttcgtgtcagaagatggatattttcttgtatctcttgattattctcagatagagctaaggattatggctcatctttctcaggagcctaaattaatatctgccttccaaaaaggagaggatattcatagaagaacagcatcggagatttttggagtgccagaggaagaagttgatgatcttttaaggtcaagggcaaaggccgttaattttggaattatttatggtatctcttcttttggactttctgagactgtaagtattacaccagaagaggcagagaaatttatagactcgtattttaagcactatccaagagtgaagctttttatagataagactattcatgaggcaagagaaaaactgtacgttaaaaccttatttggcagaaaaagatatattcctgagattaagagccaaaataaacaggtaaggaatgcctatgaaaggatagcaataaatgcgccaattcagggaacagctgctgatattataaaacttgccatgatagaaatttacaaggagattgaaaataaaaatctcaagtcaagaatactccttcaaattcatgatgagcttattcttgaagtgccagaggaggagatggaatttactcctttaatggcaaaggaaaaaatggaaaaggtggtagaactttcggttcctcttgtagttgaaatctcggtaggtaaaaatcttgctgaattaaaatgagctataagattggtcgac

SEQ ID NO: 2069 - DNA, 2673 bp, Artificial Sequence
  Description of Artificial Sequence: Synthetic DNA sequence of Dictyoglomus thermophilum DNA I787G
atgaaatacctgctgccgaccgctgctgctggtctgctgctcctcgctgcccagccggcgatggccatggatatcggaattaattcggatccgaaatctctgtgggatctttttcaagaaaataccgagaaagagtccaaaaggaagattctgattattgatggctcaagcctcatatacagggtttattacgcccttccccctttaaagacaaaaaatggtgaattaactaatgctctttatggcttcataagaatacttttaaaggccgtagaagattttaatcctgatcttgtaggcgttgcctttgatagacctgaacctacttttaggcatgtgatttataaagagtataaggctaagagaccacctatgaaggatgatttgaaagcgcagataccatggataagagaatttctaaggttaaatgatatacctctattggaagagcctggctatgaagcggatgatataatagctactatagtgaataaatataaggatgatttaaaatatattctctctggagatttagatcttttgcaattagtctcggacaaaacctttctaatacatcctcaaaagggaattactgagtttactatttatgatccaaaagctgtaaaggataggtttggagtagagccctataagattcccttatacaaagtattagtaggggacgaatctgataatattccaggagtaaatggaataggtcctaaaaaggcctcaaagattcttgagaaaatttcaagtgtagatgaatttaaaagtaaaataaaagttttggatagtgatttaagggagcttattgagaaaaattggaatattattgaaagaaatttagaacttgttactttaaaaaatatagataaggatcttattcttaaacccttcgagattaaaagagatgaaaaagtaatagattttttgaagagatatgaacttaagagtattcttcaaaagttatttcctgatcttcaagaggaagaaaatatagagattaaagatgtcgaagagatcaattttaatgaggtagaaaaagaaggctactttgcctttaaatgtcttggagatagggcttttgagggtatttctctttccttcaaggagggggaaggatattttatatctccttttgatttcaataatgagataagaaagaagattgaaaatataatttcttcagagaatgttaaaaaaattggctcttatattcaaagagatttacattttttaaactgtaaaataaagggcgatgtatttgatgttagtctcgcatcttatcttttgaaccctgaaagacaaaatcactctcttgatattttgataggagagtatctaaataaaacctcttttattcctcaaaaatacgctggttatctttttccgttaaagtctattcttgaggagaggataaagaatgaagggttagaatttgtactttataacatagagattccattaatccctgtactttactccatggagaagtgggggataaaggtagataaggaatatttaaaacagctttctgatgaattctgcgagagaattaaaaaattggaagaagagatatatgaacttgcaggaaccagatttaatctcaattctccaaaacaactttctgaagttttatttgagaggttaaaacttccttctggtaagaaaggaaaaacaggatattctacgtcgtcttctgtgcttcaaaacttaataaatgctcatcctatagtgagaaaaatcctccaatatagagaactctataaattgaagagtacttatgtggatgctattcctaatctggttaatccacaaacaggtagagttcatacaaaatttaatcctacaggtacagctacaggaagaataagtagtagtgaacctaatcttcagaatattcctataaaaagtgaagaaggtagaaagataagaagagccttcgtgtcagaagatggatattttcttgtatctcttgattattctcagatagagctaaggattatggctcatctttctcaggagcctaaattaatatctgccttccaaaaaggagaggatattcatagaagaacagcatcggagatttttggagtgccagaggaagaagttgatgatcttttaaggtcaagggcaaaggccgttaattttggaattatttatggtatctcttcttttggactttctgagactgtaagtattacaccagaagaggcagagaaatttatagactcgtattttaagcactatccaagagtgaagctttttatagataagactattcatgaggcaagagaaaaactgtacgttaaaaccttatttggcagaaaaagatatattcctgagattaagagcggtaataaacaggtaaggaatgcctatgaaaggatagcaataaatgcgccaattcagggaacagctgctgatattataaaacttgccatgatagaaatttacaaggagattgaaaataaaaatctcaagtcaagaatactccttcaaattcatgatgagcttattcttgaagtgccagaggaggagatggaatttactcctttaatggcaaaggaaaaaatggaaaaggtggtagaactttcggttcctcttgtagttgaaatctcggtaggtaaaaatcttgctgaattaaaatgagctataagattggtcgac

SEQ ID NO: 2070 - DNA, 2673 bp, Artificial Sequence
  Description of Artificial Sequence: Synthetic DNA sequence of Dictyoglomus thermophilum DNA I787H
atgaaatacctgctgccgaccgctgctgctggtctgctgctcctcgctgcccagccggcgatggccatggatatcggaattaattcggatccgaaatctctgtgggatctttttcaagaaaataccgagaaagagtccaaaaggaagattctgattattgatggctcaagcctcatatacagggtttattacgcccttccccctttaaagacaaaaaatggtgaattaactaatgctctttatggcttcataagaatacttttaaaggccgtagaagattttaatcctgatcttgtaggcgttgcctttgatagacctgaacctacttttaggcatgtgatttataaagagtataaggctaagagaccacctatgaaggatgatttgaaagcgcagataccatggataagagaatttctaaggttaaatgatatacctctattggaagagcctggctatgaagcggatgatataatagctactatagtgaataaatataaggatgatttaaaatatattctctctggagatttagatcttttgcaattagtctcggacaaaacctttctaatacatcctcaaaagggaattactgagtttactatttatgatccaaaagctgtaaaggataggtttggagtagagccctataagattcccttatacaaagtattagtaggggacgaatctgataatattccaggagtaaatggaataggtcctaaaaaggcctcaaagattcttgagaaaatttcaagtgtagatgaatttaaaagtaaaataaaagttttggatagtgatttaagggagcttattgagaaaaattggaatattattgaaagaaatttagaacttgttactttaaaaaatatagataaggatcttattcttaaacccttcgagattaaaagagatgaaaaagtaatagattttttgaagagatatgaacttaagagtattcttcaaaagttatttcctgatcttcaagaggaagaaaatatagagattaaagatgtcgaagagatcaattttaatgaggtagaaaaagaaggctactttgcctttaaatgtcttggagatagggcttttgagggtatttctctttccttcaaggagggggaaggatattttatatctccttttgatttcaataatgagataagaaagaagattgaaaatataatttcttcagagaatgttaaaaaaattggctcttatattcaaagagatttacattttttaaactgtaaaataaagggcgatgtatttgatgttagtctcgcatcttatcttttgaaccctgaaagacaaaatcactctcttgatattttgataggagagtatctaaataaaacctcttttattcctcaaaaatacgctggttatctttttccgttaaagtctattcttgaggagaggataaagaatgaagggttagaatttgtactttataacatagagattccattaatccctgtactttactccatggagaagtgggggataaaggtagataaggaatatttaaaacagctttctgatgaattctgcgagagaattaaaaaattggaagaagagatatatgaacttgcaggaaccagatttaatctcaattctccaaaacaactttctgaagttttatttgagaggttaaaacttccttctggtaagaaaggaaaaacaggatattctacgtcgtcttctgtgcttcaaaacttaataaatgctcatcctatagtgagaaaaatcctccaatatagagaactctataaattgaagagtacttatgtggatgctattcctaatctggttaatccacaaacaggtagagttcatacaaaatttaatcctacaggtacagctacaggaagaataagtagtagtgaacctaatcttcagaatattcctataaaaagtgaagaaggtagaaagataagaagagccttcgtgtcagaagatggatattttcttgtatctcttgattattctcagatagagctaaggattatggctcatctttctcaggagcctaaattaatatctgccttccaaaaaggagaggatattcatagaagaacagcatcggagatttttggagtgccagaggaagaagttgatgatcttttaaggtcaagggcaaaggccgttaattttggaattatttatggtatctcttcttttggactttctgagactgtaagtattacaccagaagaggcagagaaatttatagactcgtattttaagcactatccaagagtgaagctttttatagataagactattcatgaggcaagagaaaaactgtacgttaaaaccttatttggcagaaaaagatatattcctgagattaagagccataataaacaggtaaggaatgcctatgaaaggatagcaataaatgcgccaattcagggaacagctgctgatattataaaacttgccatgatagaaatttacaaggagattgaaaataaaaatctcaagtcaagaatactccttcaaattcatgatgagcttattcttgaagtgccagaggaggagatggaatttactcctttaatggcaaaggaaaaaatggaaaaggtggtagaactttcggttcctcttgtagttgaaatctcggtaggtaaaaatcttgctgaattaaaatgagctataagattggtcgac

SEQ ID NO: 2071 - DNA, 2673 bp, Artificial Sequence
  Description of Artificial Sequence: Synthetic DNA sequence of Dictyoglomus thermophilum DNA I787L
atgaaatacctgctgccgaccgctgctgctggtctgctgctcctcgctgcccagccggcgatggccatggatatcggaattaattcggatccgaaatctctgtgggatctttttcaagaaaataccgagaaagagtccaaaaggaagattctgattattgatggctcaagcctcatatacagggtttattacgcccttccccctttaaagacaaaaaatggtgaattaactaatgctctttatggcttcataagaatacttttaaaggccgtagaagattttaatcctgatcttgtaggcgttgcctttgatagacctgaacctacttttaggcatgtgatttataaagagtataaggctaagagaccacctatgaaggatgatttgaaagcgcagataccatggataagagaatttctaaggttaaatgatatacctctattggaagagcctggctatgaagcggatgatataatagctactatagtgaataaatataaggatgatttaaaatatattctctctggagatttagatcttttgcaattagtctcggacaaaacctttctaatacatcctcaaaagggaattactgagtttactatttatgatccaaaagctgtaaaggataggtttggagtagagccctataagattcccttatacaaagtattagtaggggacgaatctgataatattccaggagtaaatggaataggtcctaaaaaggcctcaaagattcttgagaaaatttcaagtgtagatgaatttaaaagtaaaataaaagttttggatagtgatttaagggagcttattgagaaaaattggaatattattgaaagaaatttagaacttgttactttaaaaaatatagataaggatcttattcttaaacccttcgagattaaaagagatgaaaaagtaatagattttttgaagagatatgaacttaagagtattcttcaaaagttatttcctgatcttcaagaggaagaaaatatagagattaaagatgtcgaagagatcaattttaatgaggtagaaaaagaaggctactttgcctttaaatgtcttggagatagggcttttgagggtatttctctttccttcaaggagggggaaggatattttatatctccttttgatttcaataatgagataagaaagaagattgaaaatataatttcttcagagaatgttaaaaaaattggctcttatattcaaagagatttacattttttaaactgtaaaataaagggcgatgtatttgatgttagtctcgcatcttatcttttgaaccctgaaagacaaaatcactctcttgatattttgataggagagtatctaaataaaacctcttttattcctcaaaaatacgctggttatctttttccgttaaagtctattcttgaggagaggataaagaatgaagggttagaatttgtactttataacatagagattccattaatccctgtactttactccatggagaagtgggggataaaggtagataaggaatatttaaaacagctttctgatgaattctgcgagagaattaaaaaattggaagaagagatatatgaacttgcaggaaccagatttaatctcaattctccaaaacaactttctgaagttttatttgagaggttaaaacttccttctggtaagaaaggaaaaacaggatattctacgtcgtcttctgtgcttcaaaacttaataaatgctcatcctatagtgagaaaaatcctccaatatagagaactctataaattgaagagtacttatgtggatgctattcctaatctggttaatccacaaacaggtagagttcatacaaaatttaatcctacaggtacagctacaggaagaataagtagtagtgaacctaatcttcagaatattcctataaaaagtgaagaaggtagaaagataagaagagccttcgtgtcagaagatggatattttcttgtatctcttgattattctcagatagagctaaggattatggctcatctttctcaggagcctaaattaatatctgccttccaaaaaggagaggatattcatagaagaacagcatcggagatttttggagtgccagaggaagaagttgatgatcttttaaggtcaagggcaaaggccgttaattttggaattatttatggtatctcttcttttggactttctgagactgtaagtattacaccagaagaggcagagaaatttatagactcgtattttaagcactatccaagagtgaagctttttatagataagactattcatgaggcaagagaaaaactgtacgttaaaaccttatttggcagaaaaagatatattcctgagattaagagccttaataaacaggtaaggaatgcctatgaaaggatagcaataaatgcgccaattcagggaacagctgctgatattataaaacttgccatgatagaaatttacaaggagattgaaaataaaaatctcaagtcaagaatactccttcaaattcatgatgagcttattcttgaagtgccagaggaggagatggaatttactcctttaatggcaaaggaaaaaatggaaaaggtggtagaactttcggttcctcttgtagttgaaatctcggtaggtaaaaatcttgctgaattaaaatgagctataagattggtcgac

SEQ ID NO: 2072 - DNA, 2673 bp, Artificial Sequence
  Description of Artificial Sequence: Synthetic DNA sequence of Dictyoglomus thermophilum DNA I787K
atgaaatacctgctgccgaccgctgctgctggtctgctgctcctcgctgcccagccggcgatggccatggatatcggaattaattcggatccgaaatctctgtgggatctttttcaagaaaataccgagaaagagtccaaaaggaagattctgattattgatggctcaagcctcatatacagggtttattacgcccttccccctttaaagacaaaaaatggtgaattaactaatgctctttatggcttcataagaatacttttaaaggccgtagaagattttaatcctgatcttgtaggcgttgcctttgatagacctgaacctacttttaggcatgtgatttataaagagtataaggctaagagaccacctatgaaggatgatttgaaagcgcagataccatggataagagaatttctaaggttaaatgatatacctctattggaagagcctggctatgaagcggatgatataatagctactatagtgaataaatataaggatgatttaaaatatattctctctggagatttagatcttttgcaattagtctcggacaaaacctttctaatacatcctcaaaagggaattactgagtttactatttatgatccaaaagctgtaaaggataggtttggagtagagccctataagattcccttatacaaagtattagtaggggacgaatctgataatattccaggagtaaatggaataggtcctaaaaaggcctcaaagattcttgagaaaatttcaagtgtagatgaatttaaaagtaaaataaaagttttggatagtgatttaagggagcttattgagaaaaattggaatattattgaaagaaatttagaacttgttactttaaaaaatatagataaggatcttattcttaaacccttcgagattaaaagagatgaaaaagtaatagattttttgaagagatatgaacttaagagtattcttcaaaagttatttcctgatcttcaagaggaagaaaatatagagattaaagatgtcgaagagatcaattttaatgaggtagaaaaagaaggctactttgcctttaaatgtcttggagatagggcttttgagggtatttctctttccttcaaggagggggaaggatattttatatctccttttgatttcaataatgagataagaaagaagattgaaaatataatttcttcagagaatgttaaaaaaattggctcttatattcaaagagatttacattttttaaactgtaaaataaagggcgatgtatttgatgttagtctcgcatcttatcttttgaaccctgaaagacaaaatcactctcttgatattttgataggagagtatctaaataaaacctcttttattcctcaaaaatacgctggttatctttttccgttaaagtctattcttgaggagaggataaagaatgaagggttagaatttgtactttataacatagagattccattaatccctgtactttactccatggagaagtgggggataaaggtagataaggaatatttaaaacagctttctgatgaattctgcgagagaattaaaaaattggaagaagagatatatgaacttgcaggaaccagatttaatctcaattctccaaaacaactttctgaagttttatttgagaggttaaaacttccttctggtaagaaaggaaaaacaggatattctacgtcgtcttctgtgcttcaaaacttaataaatgctcatcctatagtgagaaaaatcctccaatatagagaactctataaattgaagagtacttatgtggatgctattcctaatctggttaatccacaaacaggtagagttcatacaaaatttaatcctacaggtacagctacaggaagaataagtagtagtgaacctaatcttcagaatattcctataaaaagtgaagaaggtagaaagataagaagagccttcgtgtcagaagatggatattttcttgtatctcttgattattctcagatagagctaaggattatggctcatctttctcaggagcctaaattaatatctgccttccaaaaaggagaggatattcatagaagaacagcatcggagatttttggagtgccagaggaagaagttgatgatcttttaaggtcaagggcaaaggccgttaattttggaattatttatggtatctcttcttttggactttctgagactgtaagtattacaccagaagaggcagagaaatttatagactcgtattttaagcactatccaagagtgaagctttttatagataagactattcatgaggcaagagaaaaactgtacgttaaaaccttatttggcagaaaaagatatattcctgagattaagagcaaaaataaacaggtaaggaatgcctatgaaaggatagcaataaatgcgccaattcagggaacagctgctgatattataaaacttgccatgatagaaatttacaaggagattgaaaataaaaatctcaagtcaagaatactccttcaaattcatgatgagcttattcttgaagtgccagaggaggagatggaatttactcctttaatggcaaaggaaaaaatggaaaaggtggtagaactttcggttcctcttgtagttgaaatctcggtaggtaaaaatcttgctgaattaaaatgagctataagattggtcgac

SEQ ID NO: 2073 - DNA, 2673 bp, Artificial Sequence
  Description of Artificial Sequence: Synthetic DNA sequence of Dictyoglomus thermophilum DNA I787M
atgaaatacctgctgccgaccgctgctgctggtctgctgctcctcgctgcccagccggcgatggccatggatatcggaattaattcggatccgaaatctctgtgggatctttttcaagaaaataccgagaaagagtccaaaaggaagattctgattattgatggctcaagcctcatatacagggtttattacgcccttccccctttaaagacaaaaaatggtgaattaactaatgctctttatggcttcataagaatacttttaaaggccgtagaagattttaatcctgatcttgtaggcgttgcctttgatagacctgaacctacttttaggcatgtgatttataaagagtataaggctaagagaccacctatgaaggatgatttgaaagcgcagataccatggataagagaatttctaaggttaaatgatatacctctattggaagagcctggctatgaagcggatgatataatagctactatagtgaataaatataaggatgatttaaaatatattctctctggagatttagatcttttgcaattagtctcggacaaaacctttctaatacatcctcaaaagggaattactgagtttactatttatgatccaaaagctgtaaaggataggtttggagtagagccctataagattcccttatacaaagtattagtaggggacgaatctgataatattccaggagtaaatggaataggtcctaaaaaggcctcaaagattcttgagaaaatttcaagtgtagatgaatttaaaagtaaaataaaagttttggatagtgatttaagggagcttattgagaaaaattggaatattattgaaagaaatttagaacttgttactttaaaaaatatagataaggatcttattcttaaacccttcgagattaaaagagatgaaaaagtaatagattttttgaagagatatgaacttaagagtattcttcaaaagttatttcctgatcttcaagaggaagaaaatatagagattaaagatgtcgaagagatcaattttaatgaggtagaaaaagaaggctactttgcctttaaatgtcttggagatagggcttttgagggtatttctctttccttcaaggagggggaaggatattttatatctccttttgatttcaataatgagataagaaagaagattgaaaatataatttcttcagagaatgttaaaaaaattggctcttatattcaaagagatttacattttttaaactgtaaaataaagggcgatgtatttgatgttagtctcgcatcttatcttttgaaccctgaaagacaaaatcactctcttgatattttgataggagagtatctaaataaaacctcttttattcctcaaaaatacgctggttatctttttccgttaaagtctattcttgaggagaggataaagaatgaagggttagaatttgtactttataacatagagattccattaatccctgtactttactccatggagaagtgggggataaaggtagataaggaatatttaaaacagctttctgatgaattctgcgagagaattaaaaaattggaagaagagatatatgaacttgcaggaaccagatttaatctcaattctccaaaacaactttctgaagttttatttgagaggttaaaacttccttctggtaagaaaggaaaaacaggatattctacgtcgtcttctgtgcttcaaaacttaataaatgctcatcctatagtgagaaaaatcctccaatatagagaactctataaattgaagagtacttatgtggatgctattcctaatctggttaatccacaaacaggtagagttcatacaaaatttaatcctacaggtacagctacaggaagaataagtagtagtgaacctaatcttcagaatattcctataaaaagtgaagaaggtagaaagataagaagagccttcgtgtcagaagatggatattttcttgtatctcttgattattctcagatagagctaaggattatggctcatctttctcaggagcctaaattaatatctgccttccaaaaaggagaggatattcatagaagaacagcatcggagatttttggagtgccagaggaagaagttgatgatcttttaaggtcaagggcaaaggccgttaattttggaattatttatggtatctcttcttttggactttctgagactgtaagtattacaccagaagaggcagagaaatttatagactcgtattttaagcactatccaagagtgaagctttttatagataagactattcatgaggcaagagaaaaactgtacgttaaaaccttatttggcagaaaaagatatattcctgagattaagagcatgaataaacaggtaaggaatgcctatgaaaggatagcaataaatgcgccaattcagggaacagctgctgatattataaaacttgccatgatagaaatttacaaggagattgaaaataaaaatctcaagtcaagaatactccttcaaattcatgatgagcttattcttgaagtgccagaggaggagatggaatttactcctttaatggcaaaggaaaaaatggaaaaggtggtagaactttcggttcctcttgtagttgaaatctcggtaggtaaaaatcttgctgaattaaaatgagctataagattggtcgac

SEQ ID NO: 2074 - DNA, 2673 bp, Artificial Sequence
  Description of Artificial Sequence: Synthetic DNA sequence of Dictyoglomus thermophilum DNA I787F
atgaaatacctgctgccgaccgctgctgctggtctgctgctcctcgctgcccagccggcgatggccatggatatcggaattaattcggatccgaaatctctgtgggatctttttcaagaaaataccgagaaagagtccaaaaggaagattctgattattgatggctcaagcctcatatacagggtttattacgcccttccccctttaaagacaaaaaatggtgaattaactaatgctctttatggcttcataagaatacttttaaaggccgtagaagattttaatcctgatcttgtaggcgttgcctttgatagacctgaacctacttttaggcatgtgatttataaagagtataaggctaagagaccacctatgaaggatgatttgaaagcgcagataccatggataagagaatttctaaggttaaatgatatacctctattggaagagcctggctatgaagcggatgatataatagctactatagtgaataaatataaggatgatttaaaatatattctctctggagatttagatcttttgcaattagtctcggacaaaacctttctaatacatcctcaaaagggaattactgagtttactatttatgatccaaaagctgtaaaggataggtttggagtagagccctataagattcccttatacaaagtattagtaggggacgaatctgataatattccaggagtaaatggaataggtcctaaaaaggcctcaaagattcttgagaaaatttcaagtgtagatgaatttaaaagtaaaataaaagttttggatagtgatttaagggagcttattgagaaaaattggaatattattgaaagaaatttagaacttgttactttaaaaaatatagataaggatcttattcttaaacccttcgagattaaaagagatgaaaaagtaatagattttttgaagagatatgaacttaagagtattcttcaaaagttatttcctgatcttcaagaggaagaaaatatagagattaaagatgtcgaagagatcaattttaatgaggtagaaaaagaaggctactttgcctttaaatgtcttggagatagggcttttgagggtatttctctttccttcaaggagggggaaggatattttatatctccttttgatttcaataatgagataagaaagaagattgaaaatataatttcttcagagaatgttaaaaaaattggctcttatattcaaagagatttacattttttaaactgtaaaataaagggcgatgtatttgatgttagtctcgcatcttatcttttgaaccctgaaagacaaaatcactctcttgatattttgataggagagtatctaaataaaacctcttttattcctcaaaaatacgctggttatctttttccgttaaagtctattcttgaggagaggataaagaatgaagggttagaatttgtactttataacatagagattccattaatccctgtactttactccatggagaagtgggggataaaggtagataaggaatatttaaaacagctttctgatgaattctgcgagagaattaaaaaattggaagaagagatatatgaacttgcaggaaccagatttaatctcaattctccaaaacaactttctgaagttttatttgagaggttaaaacttccttctggtaagaaaggaaaaacaggatattctacgtcgtcttctgtgcttcaaaacttaataaatgctcatcctatagtgagaaaaatcctccaatatagagaactctataaattgaagagtacttatgtggatgctattcctaatctggttaatccacaaacaggtagagttcatacaaaatttaatcctacaggtacagctacaggaagaataagtagtagtgaacctaatcttcagaatattcctataaaaagtgaagaaggtagaaagataagaagagccttcgtgtcagaagatggatattttcttgtatctcttgattattctcagatagagctaaggattatggctcatctttctcaggagcctaaattaatatctgccttccaaaaaggagaggatattcatagaagaacagcatcggagatttttggagtgccagaggaagaagttgatgatcttttaaggtcaagggcaaaggccgttaattttggaattatttatggtatctcttcttttggactttctgagactgtaagtattacaccagaagaggcagagaaatttatagactcgtattttaagcactatccaagagtgaagctttttatagataagactattcatgaggcaagagaaaaactgtacgttaaaaccttatttggcagaaaaagatatattcctgagattaagagctttaataaacaggtaaggaatgcctatgaaaggatagcaataaatgcgccaattcagggaacagctgctgatattataaaacttgccatgatagaaatttacaaggagattgaaaataaaaatctcaagtcaagaatactccttcaaattcatgatgagcttattcttgaagtgccagaggaggagatggaatttactcctttaatggcaaaggaaaaaatggaaaaggtggtagaactttcggttcctcttgtagttgaaatctcggtaggtaaaaatcttgctgaattaaaatgagctataagattggtcgac

SEQ ID NO: 2075 - DNA, 2673 bp, Artificial Sequence
  Description of Artificial Sequence: Synthetic DNA sequence of Dictyoglomus thermophilum DNA I787P
atgaaatacctgctgccgaccgctgctgctggtctgctgctcctcgctgcccagccggcgatggccatggatatcggaattaattcggatccgaaatctctgtgggatctttttcaagaaaataccgagaaagagtccaaaaggaagattctgattattgatggctcaagcctcatatacagggtttattacgcccttccccctttaaagacaaaaaatggtgaattaactaatgctctttatggcttcataagaatacttttaaaggccgtagaagattttaatcctgatcttgtaggcgttgcctttgatagacctgaacctacttttaggcatgtgatttataaagagtataaggctaagagaccacctatgaaggatgatttgaaagcgcagataccatggataagagaatttctaaggttaaatgatatacctctattggaagagcctggctatgaagcggatgatataatagctactatagtgaataaatataaggatgatttaaaatatattctctctggagatttagatcttttgcaattagtctcggacaaaacctttctaatacatcctcaaaagggaattactgagtttactatttatgatccaaaagctgtaaaggataggtttggagtagagccctataagattcccttatacaaagtattagtaggggacgaatctgataatattccaggagtaaatggaataggtcctaaaaaggcctcaaagattcttgagaaaatttcaagtgtagatgaatttaaaagtaaaataaaagttttggatagtgatttaagggagcttattgagaaaaattggaatattattgaaagaaatttagaacttgttactttaaaaaatatagataaggatcttattcttaaacccttcgagattaaaagagatgaaaaagtaatagattttttgaagagatatgaacttaagagtattcttcaaaagttatttcctgatcttcaagaggaagaaaatatagagattaaagatgtcgaagagatcaattttaatgaggtagaaaaagaaggctactttgcctttaaatgtcttggagatagggcttttgagggtatttctctttccttcaaggagggggaaggatattttatatctccttttgatttcaataatgagataagaaagaagattgaaaatataatttcttcagagaatgttaaaaaaattggctcttatattcaaagagatttacattttttaaactgtaaaataaagggcgatgtatttgatgttagtctcgcatcttatcttttgaaccctgaaagacaaaatcactctcttgatattttgataggagagtatctaaataaaacctcttttattcctcaaaaatacgctggttatctttttccgttaaagtctattcttgaggagaggataaagaatgaagggttagaatttgtactttataacatagagattccattaatccctgtactttactccatggagaagtgggggataaaggtagataaggaatatttaaaacagctttctgatgaattctgcgagagaattaaaaaattggaagaagagatatatgaacttgcaggaaccagatttaatctcaattctccaaaacaactttctgaagttttatttgagaggttaaaacttccttctggtaagaaaggaaaaacaggatattctacgtcgtcttctgtgcttcaaaacttaataaatgctcatcctatagtgagaaaaatcctccaatatagagaactctataaattgaagagtacttatgtggatgctattcctaatctggttaatccacaaacaggtagagttcatacaaaatttaatcctacaggtacagctacaggaagaataagtagtagtgaacctaatcttcagaatattcctataaaaagtgaagaaggtagaaagataagaagagccttcgtgtcagaagatggatattttcttgtatctcttgattattctcagatagagctaaggattatggctcatctttctcaggagcctaaattaatatctgccttccaaaaaggagaggatattcatagaagaacagcatcggagatttttggagtgccagaggaagaagttgatgatcttttaaggtcaagggcaaaggccgttaattttggaattatttatggtatctcttcttttggactttctgagactgtaagtattacaccagaagaggcagagaaatttatagactcgtattttaagcactatccaagagtgaagctttttatagataagactattcatgaggcaagagaaaaactgtacgttaaaaccttatttggcagaaaaagatatattcctgagattaagagccctaataaacaggtaaggaatgcctatgaaaggatagcaataaatgcgccaattcagggaacagctgctgatattataaaacttgccatgatagaaatttacaaggagattgaaaataaaaatctcaagtcaagaatactccttcaaattcatgatgagcttattcttgaagtgccagaggaggagatggaatttactcctttaatggcaaaggaaaaaatggaaaaggtggtagaactttcggttcctcttgtagttgaaatctcggtaggtaaaaatcttgctgaattaaaatgagctataagattggtcgac

SEQ ID NO: 2076 - DNA, 2673 bp, Artificial Sequence
  Description of Artificial Sequence: Synthetic DNA sequence of Dictyoglomus thermophilum DNA I787S
atgaaatacctgctgccgaccgctgctgctggtctgctgctcctcgctgcccagccggcgatggccatggatatcggaattaattcggatccgaaatctctgtgggatctttttcaagaaaataccgagaaagagtccaaaaggaagattctgattattgatggctcaagcctcatatacagggtttattacgcccttccccctttaaagacaaaaaatggtgaattaactaatgctctttatggcttcataagaatacttttaaaggccgtagaagattttaatcctgatcttgtaggcgttgcctttgatagacctgaacctacttttaggcatgtgatttataaagagtataaggctaagagaccacctatgaaggatgatttgaaagcgcagataccatggataagagaatttctaaggttaaatgatatacctctattggaagagcctggctatgaagcggatgatataatagctactatagtgaataaatataaggatgatttaaaatatattctctctggagatttagatcttttgcaattagtctcggacaaaacctttctaatacatcctcaaaagggaattactgagtttactatttatgatccaaaagctgtaaaggataggtttggagtagagccctataagattcccttatacaaagtattagtaggggacgaatctgataatattccaggagtaaatggaataggtcctaaaaaggcctcaaagattcttgagaaaatttcaagtgtagatgaatttaaaagtaaaataaaagttttggatagtgatttaagggagcttattgagaaaaattggaatattattgaaagaaatttagaacttgttactttaaaaaatatagataaggatcttattcttaaacccttcgagattaaaagagatgaaaaagtaatagattttttgaagagatatgaacttaagagtattcttcaaaagttatttcctgatcttcaagaggaagaaaatatagagattaaagatgtcgaagagatcaattttaatgaggtagaaaaagaaggctactttgcctttaaatgtcttggagatagggcttttgagggtatttctctttccttcaaggagggggaaggatattttatatctccttttgatttcaataatgagataagaaagaagattgaaaatataatttcttcagagaatgttaaaaaaattggctcttatattcaaagagatttacattttttaaactgtaaaataaagggcgatgtatttgatgttagtctcgcatcttatcttttgaaccctgaaagacaaaatcactctcttgatattttgataggagagtatctaaataaaacctcttttattcctcaaaaatacgctggttatctttttccgttaaagtctattcttgaggagaggataaagaatgaagggttagaatttgtactttataacatagagattccattaatccctgtactttactccatggagaagtgggggataaaggtagataaggaatatttaaaacagctttctgatgaattctgcgagagaattaaaaaattggaagaagagatatatgaacttgcaggaaccagatttaatctcaattctccaaaacaactttctgaagttttatttgagaggttaaaacttccttctggtaagaaaggaaaaacaggatattctacgtcgtcttctgtgcttcaaaacttaataaatgctcatcctatagtgagaaaaatcctccaatatagagaactctataaattgaagagtacttatgtggatgctattcctaatctggttaatccacaaacaggtagagttcatacaaaatttaatcctacaggtacagctacaggaagaataagtagtagtgaacctaatcttcagaatattcctataaaaagtgaagaaggtagaaagataagaagagccttcgtgtcagaagatggatattttcttgtatctcttgattattctcagatagagctaaggattatggctcatctttctcaggagcctaaattaatatctgccttccaaaaaggagaggatattcatagaagaacagcatcggagatttttggagtgccagaggaagaagttgatgatcttttaaggtcaagggcaaaggccgttaattttggaattatttatggtatctcttcttttggactttctgagactgtaagtattacaccagaagaggcagagaaatttatagactcgtattttaagcactatccaagagtgaagctttttatagataagactattcatgaggcaagagaaaaactgtacgttaaaaccttatttggcagaaaaagatatattcctgagattaagagctctaataaacaggtaaggaatgcctatgaaaggatagcaataaatgcgccaattcagggaacagctgctgatattataaaacttgccatgatagaaatttacaaggagattgaaaataaaaatctcaagtcaagaatactccttcaaattcatgatgagcttattcttgaagtgccagaggaggagatggaatttactcctttaatggcaaaggaaaaaatggaaaaggtggtagaactttcggttcctcttgtagttgaaatctcggtaggtaaaaatcttgctgaattaaaatgagctataagattggtcgac

SEQ ID NO: 2077 - DNA, 2673 bp, Artificial Sequence
  Description of Artificial Sequence: Synthetic DNA sequence of Dictyoglomus thermophilum DNA I787T
atgaaatacctgctgccgaccgctgctgctggtctgctgctcctcgctgcccagccggcgatggccatggatatcggaattaattcggatccgaaatctctgtgggatctttttcaagaaaataccgagaaagagtccaaaaggaagattctgattattgatggctcaagcctcatatacagggtttattacgcccttccccctttaaagacaaaaaatggtgaattaactaatgctctttatggcttcataagaatacttttaaaggccgtagaagattttaatcctgatcttgtaggcgttgcctttgatagacctgaacctacttttaggcatgtgatttataaagagtataaggctaagagaccacctatgaaggatgatttgaaagcgcagataccatggataagagaatttctaaggttaaatgatatacctctattggaagagcctggctatgaagcggatgatataatagctactatagtgaataaatataaggatgatttaaaatatattctctctggagatttagatcttttgcaattagtctcggacaaaacctttctaatacatcctcaaaagggaattactgagtttactatttatgatccaaaagctgtaaaggataggtttggagtagagccctataagattcccttatacaaagtattagtaggggacgaatctgataatattccaggagtaaatggaataggtcctaaaaaggcctcaaagattcttgagaaaatttcaagtgtagatgaatttaaaagtaaaataaaagttttggatagtgatttaagggagcttattgagaaaaattggaatattattgaaagaaatttagaacttgttactttaaaaaatatagataaggatcttattcttaaacccttcgagattaaaagagatgaaaaagtaatagattttttgaagagatatgaacttaagagtattcttcaaaagttatttcctgatcttcaagaggaagaaaatatagagattaaagatgtcgaagagatcaattttaatgaggtagaaaaagaaggctactttgcctttaaatgtcttggagatagggcttttgagggtatttctctttccttcaaggagggggaaggatattttatatctccttttgatttcaataatgagataagaaagaagattgaaaatataatttcttcagagaatgttaaaaaaattggctcttatattcaaagagatttacattttttaaactgtaaaataaagggcgatgtatttgatgttagtctcgcatcttatcttttgaaccctgaaagacaaaatcactctcttgatattttgataggagagtatctaaataaaacctcttttattcctcaaaaatacgctggttatctttttccgttaaagtctattcttgaggagaggataaagaatgaagggttagaatttgtactttataacatagagattccattaatccctgtactttactccatggagaagtgggggataaaggtagataaggaatatttaaaacagctttctgatgaattctgcgagagaattaaaaaattggaagaagagatatatgaacttgcaggaaccagatttaatctcaattctccaaaacaactttctgaagttttatttgagaggttaaaacttccttctggtaagaaaggaaaaacaggatattctacgtcgtcttctgtgcttcaaaacttaataaatgctcatcctatagtgagaaaaatcctccaatatagagaactctataaattgaagagtacttatgtggatgctattcctaatctggttaatccacaaacaggtagagttcatacaaaatttaatcctacaggtacagctacaggaagaataagtagtagtgaacctaatcttcagaatattcctataaaaagtgaagaaggtagaaagataagaagagccttcgtgtcagaagatggatattttcttgtatctcttgattattctcagatagagctaaggattatggctcatctttctcaggagcctaaattaatatctgccttccaaaaaggagaggatattcatagaagaacagcatcggagatttttggagtgccagaggaagaagttgatgatcttttaaggtcaagggcaaaggccgttaattttggaattatttatggtatctcttcttttggactttctgagactgtaagtattacaccagaagaggcagagaaatttatagactcgtattttaagcactatccaagagtgaagctttttatagataagactattcatgaggcaagagaaaaactgtacgttaaaaccttatttggcagaaaaagatatattcctgagattaagagcactaataaacaggtaaggaatgcctatgaaaggatagcaataaatgcgccaattcagggaacagctgctgatattataaaacttgccatgatagaaatttacaaggagattgaaaataaaaatctcaagtcaagaatactccttcaaattcatgatgagcttattcttgaagtgccagaggaggagatggaatttactcctttaatggcaaaggaaaaaatggaaaaggtggtagaactttcggttcctcttgtagttgaaatctcggtaggtaaaaatcttgctgaattaaaatgagctataagattggtcgac

SEQ ID NO: 2078 - DNA, 2673 bp, Artificial Sequence
  Description of Artificial Sequence: Synthetic DNA sequence of Dictyoglomus thermophilum DNA I787W
atgaaatacctgctgccgaccgctgctgctggtctgctgctcctcgctgcccagccggcgatggccatggatatcggaattaattcggatccgaaatctctgtgggatctttttcaagaaaataccgagaaagagtccaaaaggaagattctgattattgatggctcaagcctcatatacagggtttattacgcccttccccctttaaagacaaaaaatggtgaattaactaatgctctttatggcttcataagaatacttttaaaggccgtagaagattttaatcctgatcttgtaggcgttgcctttgatagacctgaacctacttttaggcatgtgatttataaagagtataaggctaagagaccacctatgaaggatgatttgaaagcgcagataccatggataagagaatttctaaggttaaatgatatacctctattggaagagcctggctatgaagcggatgatataatagctactatagtgaataaatataaggatgatttaaaatatattctctctggagatttagatcttttgcaattagtctcggacaaaacctttctaatacatcctcaaaagggaattactgagtttactatttatgatccaaaagctgtaaaggataggtttggagtagagccctataagattcccttatacaaagtattagtaggggacgaatctgataatattccaggagtaaatggaataggtcctaaaaaggcctcaaagattcttgagaaaatttcaagtgtagatgaatttaaaagtaaaataaaagttttggatagtgatttaagggagcttattgagaaaaattggaatattattgaaagaaatttagaacttgttactttaaaaaatatagataaggatcttattcttaaacccttcgagattaaaagagatgaaaaagtaatagattttttgaagagatatgaacttaagagtattcttcaaaagttatttcctgatcttcaagaggaagaaaatatagagattaaagatgtcgaagagatcaattttaatgaggtagaaaaagaaggctactttgcctttaaatgtcttggagatagggcttttgagggtatttctctttccttcaaggagggggaaggatattttatatctccttttgatttcaataatgagataagaaagaagattgaaaatataatttcttcagagaatgttaaaaaaattggctcttatattcaaagagatttacattttttaaactgtaaaataaagggcgatgtatttgatgttagtctcgcatcttatcttttgaaccctgaaagacaaaatcactctcttgatattttgataggagagtatctaaataaaacctcttttattcctcaaaaatacgctggttatctttttccgttaaagtctattcttgaggagaggataaagaatgaagggttagaatttgtactttataacatagagattccattaatccctgtactttactccatggagaagtgggggataaaggtagataaggaatatttaaaacagctttctgatgaattctgcgagagaattaaaaaattggaagaagagatatatgaacttgcaggaaccagatttaatctcaattctccaaaacaactttctgaagttttatttgagaggttaaaacttccttctggtaagaaaggaaaaacaggatattctacgtcgtcttctgtgcttcaaaacttaataaatgctcatcctatagtgagaaaaatcctccaatatagagaactctataaattgaagagtacttatgtggatgctattcctaatctggttaatccacaaacaggtagagttcatacaaaatttaatcctacaggtacagctacaggaagaataagtagtagtgaacctaatcttcagaatattcctataaaaagtgaagaaggtagaaagataagaagagccttcgtgtcagaagatggatattttcttgtatctcttgattattctcagatagagctaaggattatggctcatctttctcaggagcctaaattaatatctgccttccaaaaaggagaggatattcatagaagaacagcatcggagatttttggagtgccagaggaagaagttgatgatcttttaaggtcaagggcaaaggccgttaattttggaattatttatggtatctcttcttttggactttctgagactgtaagtattacaccagaagaggcagagaaatttatagactcgtattttaagcactatccaagagtgaagctttttatagataagactattcatgaggcaagagaaaaactgtacgttaaaaccttatttggcagaaaaagatatattcctgagattaagagctggaataaacaggtaaggaatgcctatgaaaggatagcaataaatgcgccaattcagggaacagctgctgatattataaaacttgccatgatagaaatttacaaggagattgaaaataaaaatctcaagtcaagaatactccttcaaattcatgatgagcttattcttgaagtgccagaggaggagatggaatttactcctttaatggcaaaggaaaaaatggaaaaggtggtagaactttcggttcctcttgtagttgaaatctcggtaggtaaaaatcttgctgaattaaaatgagctataagattggtcgac

SEQ ID NO: 2079 - DNA, 2673 bp, Artificial Sequence
  Description of Artificial Sequence: Synthetic DNA sequence of Dictyoglomus thermophilum DNA I787Y
atgaaatacctgctgccgaccgctgctgctggtctgctgctcctcgctgcccagccggcgatggccatggatatcggaattaattcggatccgaaatctctgtgggatctttttcaagaaaataccgagaaagagtccaaaaggaagattctgattattgatggctcaagcctcatatacagggtttattacgcccttccccctttaaagacaaaaaatggtgaattaactaatgctctttatggcttcataagaatacttttaaaggccgtagaagattttaatcctgatcttgtaggcgttgcctttgatagacctgaacctacttttaggcatgtgatttataaagagtataaggctaagagaccacctatgaaggatgatttgaaagcgcagataccatggataagagaatttctaaggttaaatgatatacctctattggaagagcctggctatgaagcggatgatataatagctactatagtgaataaatataaggatgatttaaaatatattctctctggagatttagatcttttgcaattagtctcggacaaaacctttctaatacatcctcaaaagggaattactgagtttactatttatgatccaaaagctgtaaaggataggtttggagtagagccctataagattcccttatacaaagtattagtaggggacgaatctgataatattccaggagtaaatggaataggtcctaaaaaggcctcaaagattcttgagaaaatttcaagtgtagatgaatttaaaagtaaaataaaagttttggatagtgatttaagggagcttattgagaaaaattggaatattattgaaagaaatttagaacttgttactttaaaaaatatagataaggatcttattcttaaacccttcgagattaaaagagatgaaaaagtaatagattttttgaagagatatgaacttaagagtattcttcaaaagttatttcctgatcttcaagaggaagaaaatatagagattaaagatgtcgaagagatcaattttaatgaggtagaaaaagaaggctactttgcctttaaatgtcttggagatagggcttttgagggtatttctctttccttcaaggagggggaaggatattttatatctccttttgatttcaataatgagataagaaagaagattgaaaatataatttcttcagagaatgttaaaaaaattggctcttatattcaaagagatttacattttttaaactgtaaaataaagggcgatgtatttgatgttagtctcgcatcttatcttttgaaccctgaaagacaaaatcactctcttgatattttgataggagagtatctaaataaaacctcttttattcctcaaaaatacgctggttatctttttccgttaaagtctattcttgaggagaggataaagaatgaagggttagaatttgtactttataacatagagattccattaatccctgtactttactccatggagaagtgggggataaaggtagataaggaatatttaaaacagctttctgatgaattctgcgagagaattaaaaaattggaagaagagatatatgaacttgcaggaaccagatttaatctcaattctccaaaacaactttctgaagttttatttgagaggttaaaacttccttctggtaagaaaggaaaaacaggatattctacgtcgtcttctgtgcttcaaaacttaataaatgctcatcctatagtgagaaaaatcctccaatatagagaactctataaattgaagagtacttatgtggatgctattcctaatctggttaatccacaaacaggtagagttcatacaaaatttaatcctacaggtacagctacaggaagaataagtagtagtgaacctaatcttcagaatattcctataaaaagtgaagaaggtagaaagataagaagagccttcgtgtcagaagatggatattttcttgtatctcttgattattctcagatagagctaaggattatggctcatctttctcaggagcctaaattaatatctgccttccaaaaaggagaggatattcatagaagaacagcatcggagatttttggagtgccagaggaagaagttgatgatcttttaaggtcaagggcaaaggccgttaattttggaattatttatggtatctcttcttttggactttctgagactgtaagtattacaccagaagaggcagagaaatttatagactcgtattttaagcactatccaagagtgaagctttttatagataagactattcatgaggcaagagaaaaactgtacgttaaaaccttatttggcagaaaaagatatattcctgagattaagagctataataaacaggtaaggaatgcctatgaaaggatagcaataaatgcgccaattcagggaacagctgctgatattataaaacttgccatgatagaaatttacaaggagattgaaaataaaaatctcaagtcaagaatactccttcaaattcatgatgagcttattcttgaagtgccagaggaggagatggaatttactcctttaatggcaaaggaaaaaatggaaaaggtggtagaactttcggttcctcttgtagttgaaatctcggtaggtaaaaatcttgctgaattaaaatgagctataagattggtcgac

SEQ ID NO: 2080 - DNA, 2673 bp, Artificial Sequence
  Description of Artificial Sequence: Synthetic DNA sequence of Dictyoglomus thermophilum DNA I787V
atgaaatacctgctgccgaccgctgctgctggtctgctgctcctcgctgcccagccggcgatggccatggatatcggaattaattcggatccgaaatctctgtgggatctttttcaagaaaataccgagaaagagtccaaaaggaagattctgattattgatggctcaagcctcatatacagggtttattacgcccttccccctttaaagacaaaaaatggtgaattaactaatgctctttatggcttcataagaatacttttaaaggccgtagaagattttaatcctgatcttgtaggcgttgcctttgatagacctgaacctacttttaggcatgtgatttataaagagtataaggctaagagaccacctatgaaggatgatttgaaagcgcagataccatggataagagaatttctaaggttaaatgatatacctctattggaagagcctggctatgaagcggatgatataatagctactatagtgaataaatataaggatgatttaaaatatattctctctggagatttagatcttttgcaattagtctcggacaaaacctttctaatacatcctcaaaagggaattactgagtttactatttatgatccaaaagctgtaaaggataggtttggagtagagccctataagattcccttatacaaagtattagtaggggacgaatctgataatattccaggagtaaatggaataggtcctaaaaaggcctcaaagattcttgagaaaatttcaagtgtagatgaatttaaaagtaaaataaaagttttggatagtgatttaagggagcttattgagaaaaattggaatattattgaaagaaatttagaacttgttactttaaaaaatatagataaggatcttattcttaaacccttcgagattaaaagagatgaaaaagtaatagattttttgaagagatatgaacttaagagtattcttcaaaagttatttcctgatcttcaagaggaagaaaatatagagattaaagatgtcgaagagatcaattttaatgaggtagaaaaagaaggctactttgcctttaaatgtcttggagatagggcttttgagggtatttctctttccttcaaggagggggaaggatattttatatctccttttgatttcaataatgagataagaaagaagattgaaaatataatttcttcagagaatgttaaaaaaattggctcttatattcaaagagatttacattttttaaactgtaaaataaagggcgatgtatttgatgttagtctcgcatcttatcttttgaaccctgaaagacaaaatcactctcttgatattttgataggagagtatctaaataaaacctcttttattcctcaaaaatacgctggttatctttttccgttaaagtctattcttgaggagaggataaagaatgaagggttagaatttgtactttataacatagagattccattaatccctgtactttactccatggagaagtgggggataaaggtagataaggaatatttaaaacagctttctgatgaattctgcgagagaattaaaaaattggaagaagagatatatgaacttgcaggaaccagatttaatctcaattctccaaaacaactttctgaagttttatttgagaggttaaaacttccttctggtaagaaaggaaaaacaggatattctacgtcgtcttctgtgcttcaaaacttaataaatgctcatcctatagtgagaaaaatcctccaatatagagaactctataaattgaagagtacttatgtggatgctattcctaatctggttaatccacaaacaggtagagttcatacaaaatttaatcctacaggtacagctacaggaagaataagtagtagtgaacctaatcttcagaatattcctataaaaagtgaagaaggtagaaagataagaagagccttcgtgtcagaagatggatattttcttgtatctcttgattattctcagatagagctaaggattatggctcatctttctcaggagcctaaattaatatctgccttccaaaaaggagaggatattcatagaagaacagcatcggagatttttggagtgccagaggaagaagttgatgatcttttaaggtcaagggcaaaggccgttaattttggaattatttatggtatctcttcttttggactttctgagactgtaagtattacaccagaagaggcagagaaatttatagactcgtattttaagcactatccaagagtgaagctttttatagataagactattcatgaggcaagagaaaaactgtacgttaaaaccttatttggcagaaaaagatatattcctgagattaagagcgttaataaacaggtaaggaatgcctatgaaaggatagcaataaatgcgccaattcagggaacagctgctgatattataaaacttgccatgatagaaatttacaaggagattgaaaataaaaatctcaagtcaagaatactccttcaaattcatgatgagcttattcttgaagtgccagaggaggagatggaatttactcctttaatggcaaaggaaaaaatggaaaaggtggtagaactttcggttcctcttgtagttgaaatctcggtaggtaaaaatcttgctgaattaaaatgagctataagattggtcgac

SEQ ID NO: 2081 - DNA, 2673 bp, Artificial Sequence
  Description of Artificial Sequence: Synthetic DNA sequence of Dictyoglomus thermophilum DNA N788A
atgaaatacctgctgccgaccgctgctgctggtctgctgctcctcgctgcccagccggcgatggccatggatatcggaattaattcggatccgaaatctctgtgggatctttttcaagaaaataccgagaaagagtccaaaaggaagattctgattattgatggctcaagcctcatatacagggtttattacgcccttccccctttaaagacaaaaaatggtgaattaactaatgctctttatggcttcataagaatacttttaaaggccgtagaagattttaatcctgatcttgtaggcgttgcctttgatagacctgaacctacttttaggcatgtgatttataaagagtataaggctaagagaccacctatgaaggatgatttgaaagcgcagataccatggataagagaatttctaaggttaaatgatatacctctattggaagagcctggctatgaagcggatgatataatagctactatagtgaataaatataaggatgatttaaaatatattctctctggagatttagatcttttgcaattagtctcggacaaaacctttctaatacatcctcaaaagggaattactgagtttactatttatgatccaaaagctgtaaaggataggtttggagtagagccctataagattcccttatacaaagtattagtaggggacgaatctgataatattccaggagtaaatggaataggtcctaaaaaggcctcaaagattcttgagaaaatttcaagtgtagatgaatttaaaagtaaaataaaagttttggatagtgatttaagggagcttattgagaaaaattggaatattattgaaagaaatttagaacttgttactttaaaaaatatagataaggatcttattcttaaacccttcgagattaaaagagatgaaaaagtaatagattttttgaagagatatgaacttaagagtattcttcaaaagttatttcctgatcttcaagaggaagaaaatatagagattaaagatgtcgaagagatcaattttaatgaggtagaaaaagaaggctactttgcctttaaatgtcttggagatagggcttttgagggtatttctctttccttcaaggagggggaaggatattttatatctccttttgatttcaataatgagataagaaagaagattgaaaatataatttcttcagagaatgttaaaaaaattggctcttatattcaaagagatttacattttttaaactgtaaaataaagggcgatgtatttgatgttagtctcgcatcttatcttttgaaccctgaaagacaaaatcactctcttgatattttgataggagagtatctaaataaaacctcttttattcctcaaaaatacgctggttatctttttccgttaaagtctattcttgaggagaggataaagaatgaagggttagaatttgtactttataacatagagattccattaatccctgtactttactccatggagaagtgggggataaaggtagataaggaatatttaaaacagctttctgatgaattctgcgagagaattaaaaaattggaagaagagatatatgaacttgcaggaaccagatttaatctcaattctccaaaacaactttctgaagttttatttgagaggttaaaacttccttctggtaagaaaggaaaaacaggatattctacgtcgtcttctgtgcttcaaaacttaataaatgctcatcctatagtgagaaaaatcctccaatatagagaactctataaattgaagagtacttatgtggatgctattcctaatctggttaatccacaaacaggtagagttcatacaaaatttaatcctacaggtacagctacaggaagaataagtagtagtgaacctaatcttcagaatattcctataaaaagtgaagaaggtagaaagataagaagagccttcgtgtcagaagatggatattttcttgtatctcttgattattctcagatagagctaaggattatggctcatctttctcaggagcctaaattaatatctgccttccaaaaaggagaggatattcatagaagaacagcatcggagatttttggagtgccagaggaagaagttgatgatcttttaaggtcaagggcaaaggccgttaattttggaattatttatggtatctcttcttttggactttctgagactgtaagtattacaccagaagaggcagagaaatttatagactcgtattttaagcactatccaagagtgaagctttttatagataagactattcatgaggcaagagaaaaactgtacgttaaaaccttatttggcagaaaaagatatattcctgagattaagagcatagctaaacaggtaaggaatgcctatgaaaggatagcaataaatgcgccaattcagggaacagctgctgatattataaaacttgccatgatagaaatttacaaggagattgaaaataaaaatctcaagtcaagaatactccttcaaattcatgatgagcttattcttgaagtgccagaggaggagatggaatttactcctttaatggcaaaggaaaaaatggaaaaggtggtagaactttcggttcctcttgtagttgaaatctcggtaggtaaaaatcttgctgaattaaaatgagctataagattggtcgac

SEQ ID NO: 2082 - DNA, 2673 bp, Artificial Sequence
  Description of Artificial Sequence: Synthetic DNA sequence of Dictyoglomus thermophilum DNA N788R
atgaaatacctgctgccgaccgctgctgctggtctgctgctcctcgctgcccagccggcgatggccatggatatcggaattaattcggatccgaaatctctgtgggatctttttcaagaaaataccgagaaagagtccaaaaggaagattctgattattgatggctcaagcctcatatacagggtttattacgcccttccccctttaaagacaaaaaatggtgaattaactaatgctctttatggcttcataagaatacttttaaaggccgtagaagattttaatcctgatcttgtaggcgttgcctttgatagacctgaacctacttttaggcatgtgatttataaagagtataaggctaagagaccacctatgaaggatgatttgaaagcgcagataccatggataagagaatttctaaggttaaatgatatacctctattggaagagcctggctatgaagcggatgatataatagctactatagtgaataaatataaggatgatttaaaatatattctctctggagatttagatcttttgcaattagtctcggacaaaacctttctaatacatcctcaaaagggaattactgagtttactatttatgatccaaaagctgtaaaggataggtttggagtagagccctataagattcccttatacaaagtattagtaggggacgaatctgataatattccaggagtaaatggaataggtcctaaaaaggcctcaaagattcttgagaaaatttcaagtgtagatgaatttaaaagtaaaataaaagttttggatagtgatttaagggagcttattgagaaaaattggaatattattgaaagaaatttagaacttgttactttaaaaaatatagataaggatcttattcttaaacccttcgagattaaaagagatgaaaaagtaatagattttttgaagagatatgaacttaagagtattcttcaaaagttatttcctgatcttcaagaggaagaaaatatagagattaaagatgtcgaagagatcaattttaatgaggtagaaaaagaaggctactttgcctttaaatgtcttggagatagggcttttgagggtatttctctttccttcaaggagggggaaggatattttatatctccttttgatttcaataatgagataagaaagaagattgaaaatataatttcttcagagaatgttaaaaaaattggctcttatattcaaagagatttacattttttaaactgtaaaataaagggcgatgtatttgatgttagtctcgcatcttatcttttgaaccctgaaagacaaaatcactctcttgatattttgataggagagtatctaaataaaacctcttttattcctcaaaaatacgctggttatctttttccgttaaagtctattcttgaggagaggataaagaatgaagggttagaatttgtactttataacatagagattccattaatccctgtactttactccatggagaagtgggggataaaggtagataaggaatatttaaaacagctttctgatgaattctgcgagagaattaaaaaattggaagaagagatatatgaacttgcaggaaccagatttaatctcaattctccaaaacaactttctgaagttttatttgagaggttaaaacttccttctggtaagaaaggaaaaacaggatattctacgtcgtcttctgtgcttcaaaacttaataaatgctcatcctatagtgagaaaaatcctccaatatagagaactctataaattgaagagtacttatgtggatgctattcctaatctggttaatccacaaacaggtagagttcatacaaaatttaatcctacaggtacagctacaggaagaataagtagtagtgaacctaatcttcagaatattcctataaaaagtgaagaaggtagaaagataagaagagccttcgtgtcagaagatggatattttcttgtatctcttgattattctcagatagagctaaggattatggctcatctttctcaggagcctaaattaatatctgccttccaaaaaggagaggatattcatagaagaacagcatcggagatttttggagtgccagaggaagaagttgatgatcttttaaggtcaagggcaaaggccgttaattttggaattatttatggtatctcttcttttggactttctgagactgtaagtattacaccagaagaggcagagaaatttatagactcgtattttaagcactatccaagagtgaagctttttatagataagactattcatgaggcaagagaaaaactgtacgttaaaaccttatttggcagaaaaagatatattcctgagattaagagcatacgtaaacaggtaaggaatgcctatgaaaggatagcaataaatgcgccaattcagggaacagctgctgatattataaaacttgccatgatagaaatttacaaggagattgaaaataaaaatctcaagtcaagaatactccttcaaattcatgatgagcttattcttgaagtgccagaggaggagatggaatttactcctttaatggcaaaggaaaaaatggaaaaggtggtagaactttcggttcctcttgtagttgaaatctcggtaggtaaaaatcttgctgaattaaaatgagctataagattggtcgac

SEQ ID NO: 2083 - DNA, 2673 bp, Artificial Sequence
  Description of Artificial Sequence: Synthetic DNA sequence of Dictyoglomus thermophilum DNA N788D
atgaaatacctgctgccgaccgctgctgctggtctgctgctcctcgctgcccagccggcgatggccatggatatcggaattaattcggatccgaaatctctgtgggatctttttcaagaaaataccgagaaagagtccaaaaggaagattctgattattgatggctcaagcctcatatacagggtttattacgcccttccccctttaaagacaaaaaatggtgaattaactaatgctctttatggcttcataagaatacttttaaaggccgtagaagattttaatcctgatcttgtaggcgttgcctttgatagacctgaacctacttttaggcatgtgatttataaagagtataaggctaagagaccacctatgaaggatgatttgaaagcgcagataccatggataagagaatttctaaggttaaatgatatacctctattggaagagcctggctatgaagcggatgatataatagctactatagtgaataaatataaggatgatttaaaatatattctctctggagatttagatcttttgcaattagtctcggacaaaacctttctaatacatcctcaaaagggaattactgagtttactatttatgatccaaaagctgtaaaggataggtttggagtagagccctataagattcccttatacaaagtattagtaggggacgaatctgataatattccaggagtaaatggaataggtcctaaaaaggcctcaaagattcttgagaaaatttcaagtgtagatgaatttaaaagtaaaataaaagttttggatagtgatttaagggagcttattgagaaaaattggaatattattgaaagaaatttagaacttgttactttaaaaaatatagataaggatcttattcttaaacccttcgagattaaaagagatgaaaaagtaatagattttttgaagagatatgaacttaagagtattcttcaaaagttatttcctgatcttcaagaggaagaaaatatagagattaaagatgtcgaagagatcaattttaatgaggtagaaaaagaaggctactttgcctttaaatgtcttggagatagggcttttgagggtatttctctttccttcaaggagggggaaggatattttatatctccttttgatttcaataatgagataagaaagaagattgaaaatataatttcttcagagaatgttaaaaaaattggctcttatattcaaagagatttacattttttaaactgtaaaataaagggcgatgtatttgatgttagtctcgcatcttatcttttgaaccctgaaagacaaaatcactctcttgatattttgataggagagtatctaaataaaacctcttttattcctcaaaaatacgctggttatctttttccgttaaagtctattcttgaggagaggataaagaatgaagggttagaatttgtactttataacatagagattccattaatccctgtactttactccatggagaagtgggggataaaggtagataaggaatatttaaaacagctttctgatgaattctgcgagagaattaaaaaattggaagaagagatatatgaacttgcaggaaccagatttaatctcaattctccaaaacaactttctgaagttttatttgagaggttaaaacttccttctggtaagaaaggaaaaacaggatattctacgtcgtcttctgtgcttcaaaacttaataaatgctcatcctatagtgagaaaaatcctccaatatagagaactctataaattgaagagtacttatgtggatgctattcctaatctggttaatccacaaacaggtagagttcatacaaaatttaatcctacaggtacagctacaggaagaataagtagtagtgaacctaatcttcagaatattcctataaaaagtgaagaaggtagaaagataagaagagccttcgtgtcagaagatggatattttcttgtatctcttgattattctcagatagagctaaggattatggctcatctttctcaggagcctaaattaatatctgccttccaaaaaggagaggatattcatagaagaacagcatcggagatttttggagtgccagaggaagaagttgatgatcttttaaggtcaagggcaaaggccgttaattttggaattatttatggtatctcttcttttggactttctgagactgtaagtattacaccagaagaggcagagaaatttatagactcgtattttaagcactatccaagagtgaagctttttatagataagactattcatgaggcaagagaaaaactgtacgttaaaaccttatttggcagaaaaagatatattcctgagattaagagcatagataaacaggtaaggaatgcctatgaaaggatagcaataaatgcgccaattcagggaacagctgctgatattataaaacttgccatgatagaaatttacaaggagattgaaaataaaaatctcaagtcaagaatactccttcaaattcatgatgagcttattcttgaagtgccagaggaggagatggaatttactcctttaatggcaaaggaaaaaatggaaaaggtggtagaactttcggttcctcttgtagttgaaatctcggtaggtaaaaatcttgctgaattaaaatgagctataagattggtcgac

SEQ ID NO: 2084 - DNA, 2673 bp, Artificial Sequence
  Description of Artificial Sequence: Synthetic DNA sequence of Dictyoglomus thermophilum DNA N788C
atgaaatacctgctgccgaccgctgctgctggtctgctgctcctcgctgcccagccggcgatggccatggatatcggaattaattcggatccgaaatctctgtgggatctttttcaagaaaataccgagaaagagtccaaaaggaagattctgattattgatggctcaagcctcatatacagggtttattacgcccttccccctttaaagacaaaaaatggtgaattaactaatgctctttatggcttcataagaatacttttaaaggccgtagaagattttaatcctgatcttgtaggcgttgcctttgatagacctgaacctacttttaggcatgtgatttataaagagtataaggctaagagaccacctatgaaggatgatttgaaagcgcagataccatggataagagaatttctaaggttaaatgatatacctctattggaagagcctggctatgaagcggatgatataatagctactatagtgaataaatataaggatgatttaaaatatattctctctggagatttagatcttttgcaattagtctcggacaaaacctttctaatacatcctcaaaagggaattactgagtttactatttatgatccaaaagctgtaaaggataggtttggagtagagccctataagattcccttatacaaagtattagtaggggacgaatctgataatattccaggagtaaatggaataggtcctaaaaaggcctcaaagattcttgagaaaatttcaagtgtagatgaatttaaaagtaaaataaaagttttggatagtgatttaagggagcttattgagaaaaattggaatattattgaaagaaatttagaacttgttactttaaaaaatatagataaggatcttattcttaaacccttcgagattaaaagagatgaaaaagtaatagattttttgaagagatatgaacttaagagtattcttcaaaagttatttcctgatcttcaagaggaagaaaatatagagattaaagatgtcgaagagatcaattttaatgaggtagaaaaagaaggctactttgcctttaaatgtcttggagatagggcttttgagggtatttctctttccttcaaggagggggaaggatattttatatctccttttgatttcaataatgagataagaaagaagattgaaaatataatttcttcagagaatgttaaaaaaattggctcttatattcaaagagatttacattttttaaactgtaaaataaagggcgatgtatttgatgttagtctcgcatcttatcttttgaaccctgaaagacaaaatcactctcttgatattttgataggagagtatctaaataaaacctcttttattcctcaaaaatacgctggttatctttttccgttaaagtctattcttgaggagaggataaagaatgaagggttagaatttgtactttataacatagagattccattaatccctgtactttactccatggagaagtgggggataaaggtagataaggaatatttaaaacagctttctgatgaattctgcgagagaattaaaaaattggaagaagagatatatgaacttgcaggaaccagatttaatctcaattctccaaaacaactttctgaagttttatttgagaggttaaaacttccttctggtaagaaaggaaaaacaggatattctacgtcgtcttctgtgcttcaaaacttaataaatgctcatcctatagtgagaaaaatcctccaatatagagaactctataaattgaagagtacttatgtggatgctattcctaatctggttaatccacaaacaggtagagttcatacaaaatttaatcctacaggtacagctacaggaagaataagtagtagtgaacctaatcttcagaatattcctataaaaagtgaagaaggtagaaagataagaagagccttcgtgtcagaagatggatattttcttgtatctcttgattattctcagatagagctaaggattatggctcatctttctcaggagcctaaattaatatctgccttccaaaaaggagaggatattcatagaagaacagcatcggagatttttggagtgccagaggaagaagttgatgatcttttaaggtcaagggcaaaggccgttaattttggaattatttatggtatctcttcttttggactttctgagactgtaagtattacaccagaagaggcagagaaatttatagactcgtattttaagcactatccaagagtgaagctttttatagataagactattcatgaggcaagagaaaaactgtacgttaaaaccttatttggcagaaaaagatatattcctgagattaagagcatatgtaaacaggtaaggaatgcctatgaaaggatagcaataaatgcgccaattcagggaacagctgctgatattataaaacttgccatgatagaaatttacaaggagattgaaaataaaaatctcaagtcaagaatactccttcaaattcatgatgagcttattcttgaagtgccagaggaggagatggaatttactcctttaatggcaaaggaaaaaatggaaaaggtggtagaactttcggttcctcttgtagttgaaatctcggtaggtaaaaatcttgctgaattaaaatgagctataagattggtcgac

SEQ ID NO: 2085 - DNA, 2673 bp, Artificial Sequence
  Description of Artificial Sequence: Synthetic DNA sequence of Dictyoglomus thermophilum DNA N788E
atgaaatacctgctgccgaccgctgctgctggtctgctgctcctcgctgcccagccggcgatggccatggatatcggaattaattcggatccgaaatctctgtgggatctttttcaagaaaataccgagaaagagtccaaaaggaagattctgattattgatggctcaagcctcatatacagggtttattacgcccttccccctttaaagacaaaaaatggtgaattaactaatgctctttatggcttcataagaatacttttaaaggccgtagaagattttaatcctgatcttgtaggcgttgcctttgatagacctgaacctacttttaggcatgtgatttataaagagtataaggctaagagaccacctatgaaggatgatttgaaagcgcagataccatggataagagaatttctaaggttaaatgatatacctctattggaagagcctggctatgaagcggatgatataatagctactatagtgaataaatataaggatgatttaaaatatattctctctggagatttagatcttttgcaattagtctcggacaaaacctttctaatacatcctcaaaagggaattactgagtttactatttatgatccaaaagctgtaaaggataggtttggagtagagccctataagattcccttatacaaagtattagtaggggacgaatctgataatattccaggagtaaatggaataggtcctaaaaaggcctcaaagattcttgagaaaatttcaagtgtagatgaatttaaaagtaaaataaaagttttggatagtgatttaagggagcttattgagaaaaattggaatattattgaaagaaatttagaacttgttactttaaaaaatatagataaggatcttattcttaaacccttcgagattaaaagagatgaaaaagtaatagattttttgaagagatatgaacttaagagtattcttcaaaagttatttcctgatcttcaagaggaagaaaatatagagattaaagatgtcgaagagatcaattttaatgaggtagaaaaagaaggctactttgcctttaaatgtcttggagatagggcttttgagggtatttctctttccttcaaggagggggaaggatattttatatctccttttgatttcaataatgagataagaaagaagattgaaaatataatttcttcagagaatgttaaaaaaattggctcttatattcaaagagatttacattttttaaactgtaaaataaagggcgatgtatttgatgttagtctcgcatcttatcttttgaaccctgaaagacaaaatcactctcttgatattttgataggagagtatctaaataaaacctcttttattcctcaaaaatacgctggttatctttttccgttaaagtctattcttgaggagaggataaagaatgaagggttagaatttgtactttataacatagagattccattaatccctgtactttactccatggagaagtgggggataaaggtagataaggaatatttaaaacagctttctgatgaattctgcgagagaattaaaaaattggaagaagagatatatgaacttgcaggaaccagatttaatctcaattctccaaaacaactttctgaagttttatttgagaggttaaaacttccttctggtaagaaaggaaaaacaggatattctacgtcgtcttctgtgcttcaaaacttaataaatgctcatcctatagtgagaaaaatcctccaatatagagaactctataaattgaagagtacttatgtggatgctattcctaatctggttaatccacaaacaggtagagttcatacaaaatttaatcctacaggtacagctacaggaagaataagtagtagtgaacctaatcttcagaatattcctataaaaagtgaagaaggtagaaagataagaagagccttcgtgtcagaagatggatattttcttgtatctcttgattattctcagatagagctaaggattatggctcatctttctcaggagcctaaattaatatctgccttccaaaaaggagaggatattcatagaagaacagcatcggagatttttggagtgccagaggaagaagttgatgatcttttaaggtcaagggcaaaggccgttaattttggaattatttatggtatctcttcttttggactttctgagactgtaagtattacaccagaagaggcagagaaatttatagactcgtattttaagcactatccaagagtgaagctttttatagataagactattcatgaggcaagagaaaaactgtacgttaaaaccttatttggcagaaaaagatatattcctgagattaagagcatagaaaaacaggtaaggaatgcctatgaaaggatagcaataaatgcgccaattcagggaacagctgctgatattataaaacttgccatgatagaaatttacaaggagattgaaaataaaaatctcaagtcaagaatactccttcaaattcatgatgagcttattcttgaagtgccagaggaggagatggaatttactcctttaatggcaaaggaaaaaatggaaaaggtggtagaactttcggttcctcttgtagttgaaatctcggtaggtaaaaatcttgctgaattaaaatgagctataagattggtcgac

SEQ ID NO: 2086 - DNA, 2673 bp, Artificial Sequence
  Description of Artificial Sequence: Synthetic DNA sequence of Dictyoglomus thermophilum DNA N788Q
atgaaatacctgctgccgaccgctgctgctggtctgctgctcctcgctgcccagccggcgatggccatggatatcggaattaattcggatccgaaatctctgtgggatctttttcaagaaaataccgagaaagagtccaaaaggaagattctgattattgatggctcaagcctcatatacagggtttattacgcccttccccctttaaagacaaaaaatggtgaattaactaatgctctttatggcttcataagaatacttttaaaggccgtagaagattttaatcctgatcttgtaggcgttgcctttgatagacctgaacctacttttaggcatgtgatttataaagagtataaggctaagagaccacctatgaaggatgatttgaaagcgcagataccatggataagagaatttctaaggttaaatgatatacctctattggaagagcctggctatgaagcggatgatataatagctactatagtgaataaatataaggatgatttaaaatatattctctctggagatttagatcttttgcaattagtctcggacaaaacctttctaatacatcctcaaaagggaattactgagtttactatttatgatccaaaagctgtaaaggataggtttggagtagagccctataagattcccttatacaaagtattagtaggggacgaatctgataatattccaggagtaaatggaataggtcctaaaaaggcctcaaagattcttgagaaaatttcaagtgtagatgaatttaaaagtaaaataaaagttttggatagtgatttaagggagcttattgagaaaaattggaatattattgaaagaaatttagaacttgttactttaaaaaatatagataaggatcttattcttaaacccttcgagattaaaagagatgaaaaagtaatagattttttgaagagatatgaacttaagagtattcttcaaaagttatttcctgatcttcaagaggaagaaaatatagagattaaagatgtcgaagagatcaattttaatgaggtagaaaaagaaggctactttgcctttaaatgtcttggagatagggcttttgagggtatttctctttccttcaaggagggggaaggatattttatatctccttttgatttcaataatgagataagaaagaagattgaaaatataatttcttcagagaatgttaaaaaaattggctcttatattcaaagagatttacattttttaaactgtaaaataaagggcgatgtatttgatgttagtctcgcatcttatcttttgaaccctgaaagacaaaatcactctcttgatattttgataggagagtatctaaataaaacctcttttattcctcaaaaatacgctggttatctttttccgttaaagtctattcttgaggagaggataaagaatgaagggttagaatttgtactttataacatagagattccattaatccctgtactttactccatggagaagtgggggataaaggtagataaggaatatttaaaacagctttctgatgaattctgcgagagaattaaaaaattggaagaagagatatatgaacttgcaggaaccagatttaatctcaattctccaaaacaactttctgaagttttatttgagaggttaaaacttccttctggtaagaaaggaaaaacaggatattctacgtcgtcttctgtgcttcaaaacttaataaatgctcatcctatagtgagaaaaatcctccaatatagagaactctataaattgaagagtacttatgtggatgctattcctaatctggttaatccacaaacaggtagagttcatacaaaatttaatcctacaggtacagctacaggaagaataagtagtagtgaacctaatcttcagaatattcctataaaaagtgaagaaggtagaaagataagaagagccttcgtgtcagaagatggatattttcttgtatctcttgattattctcagatagagctaaggattatggctcatctttctcaggagcctaaattaatatctgccttccaaaaaggagaggatattcatagaagaacagcatcggagatttttggagtgccagaggaagaagttgatgatcttttaaggtcaagggcaaaggccgttaattttggaattatttatggtatctcttcttttggactttctgagactgtaagtattacaccagaagaggcagagaaatttatagactcgtattttaagcactatccaagagtgaagctttttatagataagactattcatgaggcaagagaaaaactgtacgttaaaaccttatttggcagaaaaagatatattcctgagattaagagcatacaaaaacaggtaaggaatgcctatgaaaggatagcaataaatgcgccaattcagggaacagctgctgatattataaaacttgccatgatagaaatttacaaggagattgaaaataaaaatctcaagtcaagaatactccttcaaattcatgatgagcttattcttgaagtgccagaggaggagatggaatttactcctttaatggcaaaggaaaaaatggaaaaggtggtagaactttcggttcctcttgtagttgaaatctcggtaggtaaaaatcttgctgaattaaaatgagctataagattggtcgac

SEQ ID NO: 2087 - DNA, 2673 bp, Artificial Sequence
  Description of Artificial Sequence: Synthetic DNA sequence of Dictyoglomus thermophilum DNA N788G
atgaaatacctgctgccgaccgctgctgctggtctgctgctcctcgctgcccagccggcgatggccatggatatcggaattaattcggatccgaaatctctgtgggatctttttcaagaaaataccgagaaagagtccaaaaggaagattctgattattgatggctcaagcctcatatacagggtttattacgcccttccccctttaaagacaaaaaatggtgaattaactaatgctctttatggcttcataagaatacttttaaaggccgtagaagattttaatcctgatcttgtaggcgttgcctttgatagacctgaacctacttttaggcatgtgatttataaagagtataaggctaagagaccacctatgaaggatgatttgaaagcgcagataccatggataagagaatttctaaggttaaatgatatacctctattggaagagcctggctatgaagcggatgatataatagctactatagtgaataaatataaggatgatttaaaatatattctctctggagatttagatcttttgcaattagtctcggacaaaacctttctaatacatcctcaaaagggaattactgagtttactatttatgatccaaaagctgtaaaggataggtttggagtagagccctataagattcccttatacaaagtattagtaggggacgaatctgataatattccaggagtaaatggaataggtcctaaaaaggcctcaaagattcttgagaaaatttcaagtgtagatgaatttaaaagtaaaataaaagttttggatagtgatttaagggagcttattgagaaaaattggaatattattgaaagaaatttagaacttgttactttaaaaaatatagataaggatcttattcttaaacccttcgagattaaaagagatgaaaaagtaatagattttttgaagagatatgaacttaagagtattcttcaaaagttatttcctgatcttcaagaggaagaaaatatagagattaaagatgtcgaagagatcaattttaatgaggtagaaaaagaaggctactttgcctttaaatgtcttggagatagggcttttgagggtatttctctttccttcaaggagggggaaggatattttatatctccttttgatttcaataatgagataagaaagaagattgaaaatataatttcttcagagaatgttaaaaaaattggctcttatattcaaagagatttacattttttaaactgtaaaataaagggcgatgtatttgatgttagtctcgcatcttatcttttgaaccctgaaagacaaaatcactctcttgatattttgataggagagtatctaaataaaacctcttttattcctcaaaaatacgctggttatctttttccgttaaagtctattcttgaggagaggataaagaatgaagggttagaatttgtactttataacatagagattccattaatccctgtactttactccatggagaagtgggggataaaggtagataaggaatatttaaaacagctttctgatgaattctgcgagagaattaaaaaattggaagaagagatatatgaacttgcaggaaccagatttaatctcaattctccaaaacaactttctgaagttttatttgagaggttaaaacttccttctggtaagaaaggaaaaacaggatattctacgtcgtcttctgtgcttcaaaacttaataaatgctcatcctatagtgagaaaaatcctccaatatagagaactctataaattgaagagtacttatgtggatgctattcctaatctggttaatccacaaacaggtagagttcatacaaaatttaatcctacaggtacagctacaggaagaataagtagtagtgaacctaatcttcagaatattcctataaaaagtgaagaaggtagaaagataagaagagccttcgtgtcagaagatggatattttcttgtatctcttgattattctcagatagagctaaggattatggctcatctttctcaggagcctaaattaatatctgccttccaaaaaggagaggatattcatagaagaacagcatcggagatttttggagtgccagaggaagaagttgatgatcttttaaggtcaagggcaaaggccgttaattttggaattatttatggtatctcttcttttggactttctgagactgtaagtattacaccagaagaggcagagaaatttatagactcgtattttaagcactatccaagagtgaagctttttatagataagactattcatgaggcaagagaaaaactgtacgttaaaaccttatttggcagaaaaagatatattcctgagattaagagcataggtaaacaggtaaggaatgcctatgaaaggatagcaataaatgcgccaattcagggaacagctgctgatattataaaacttgccatgatagaaatttacaaggagattgaaaataaaaatctcaagtcaagaatactccttcaaattcatgatgagcttattcttgaagtgccagaggaggagatggaatttactcctttaatggcaaaggaaaaaatggaaaaggtggtagaactttcggttcctcttgtagttgaaatctcggtaggtaaaaatcttgctgaattaaaatgagctataagattggtcgac

SEQ ID NO: 2088 - DNA, 2673 bp, Artificial Sequence
  Description of Artificial Sequence: Synthetic DNA sequence of Dictyoglomus thermophilum DNA N788H
atgaaatacctgctgccgaccgctgctgctggtctgctgctcctcgctgcccagccggcgatggccatggatatcggaattaattcggatccgaaatctctgtgggatctttttcaagaaaataccgagaaagagtccaaaaggaagattctgattattgatggctcaagcctcatatacagggtttattacgcccttccccctttaaagacaaaaaatggtgaattaactaatgctctttatggcttcataagaatacttttaaaggccgtagaagattttaatcctgatcttgtaggcgttgcctttgatagacctgaacctacttttaggcatgtgatttataaagagtataaggctaagagaccacctatgaaggatgatttgaaagcgcagataccatggataagagaatttctaaggttaaatgatatacctctattggaagagcctggctatgaagcggatgatataatagctactatagtgaataaatataaggatgatttaaaatatattctctctggagatttagatcttttgcaattagtctcggacaaaacctttctaatacatcctcaaaagggaattactgagtttactatttatgatccaaaagctgtaaaggataggtttggagtagagccctataagattcccttatacaaagtattagtaggggacgaatctgataatattccaggagtaaatggaataggtcctaaaaaggcctcaaagattcttgagaaaatttcaagtgtagatgaatttaaaagtaaaataaaagttttggatagtgatttaagggagcttattgagaaaaattggaatattattgaaagaaatttagaacttgttactttaaaaaatatagataaggatcttattcttaaacccttcgagattaaaagagatgaaaaagtaatagattttttgaagagatatgaacttaagagtattcttcaaaagttatttcctgatcttcaagaggaagaaaatatagagattaaagatgtcgaagagatcaattttaatgaggtagaaaaagaaggctactttgcctttaaatgtcttggagatagggcttttgagggtatttctctttccttcaaggagggggaaggatattttatatctccttttgatttcaataatgagataagaaagaagattgaaaatataatttcttcagagaatgttaaaaaaattggctcttatattcaaagagatttacattttttaaactgtaaaataaagggcgatgtatttgatgttagtctcgcatcttatcttttgaaccctgaaagacaaaatcactctcttgatattttgataggagagtatctaaataaaacctcttttattcctcaaaaatacgctggttatctttttccgttaaagtctattcttgaggagaggataaagaatgaagggttagaatttgtactttataacatagagattccattaatccctgtactttactccatggagaagtgggggataaaggtagataaggaatatttaaaacagctttctgatgaattctgcgagagaattaaaaaattggaagaagagatatatgaacttgcaggaaccagatttaatctcaattctccaaaacaactttctgaagttttatttgagaggttaaaacttccttctggtaagaaaggaaaaacaggatattctacgtcgtcttctgtgcttcaaaacttaataaatgctcatcctatagtgagaaaaatcctccaatatagagaactctataaattgaagagtacttatgtggatgctattcctaatctggttaatccacaaacaggtagagttcatacaaaatttaatcctacaggtacagctacaggaagaataagtagtagtgaacctaatcttcagaatattcctataaaaagtgaagaaggtagaaagataagaagagccttcgtgtcagaagatggatattttcttgtatctcttgattattctcagatagagctaaggattatggctcatctttctcaggagcctaaattaatatctgccttccaaaaaggagaggatattcatagaagaacagcatcggagatttttggagtgccagaggaagaagttgatgatcttttaaggtcaagggcaaaggccgttaattttggaattatttatggtatctcttcttttggactttctgagactgtaagtattacaccagaagaggcagagaaatttatagactcgtattttaagcactatccaagagtgaagctttttatagataagactattcatgaggcaagagaaaaactgtacgttaaaaccttatttggcagaaaaagatatattcctgagattaagagcatacataaacaggtaaggaatgcctatgaaaggatagcaataaatgcgccaattcagggaacagctgctgatattataaaacttgccatgatagaaatttacaaggagattgaaaataaaaatctcaagtcaagaatactccttcaaattcatgatgagcttattcttgaagtgccagaggaggagatggaatttactcctttaatggcaaaggaaaaaatggaaaaggtggtagaactttcggttcctcttgtagttgaaatctcggtaggtaaaaatcttgctgaattaaaatgagctataagattggtcgac

SEQ ID NO: 2089 - DNA, 2673 bp, Artificial Sequence
  Description of Artificial Sequence: Synthetic DNA sequence of Dictyoglomus thermophilum DNA N788I
atgaaatacctgctgccgaccgctgctgctggtctgctgctcctcgctgcccagccggcgatggccatggatatcggaattaattcggatccgaaatctctgtgggatctttttcaagaaaataccgagaaagagtccaaaaggaagattctgattattgatggctcaagcctcatatacagggtttattacgcccttccccctttaaagacaaaaaatggtgaattaactaatgctctttatggcttcataagaatacttttaaaggccgtagaagattttaatcctgatcttgtaggcgttgcctttgatagacctgaacctacttttaggcatgtgatttataaagagtataaggctaagagaccacctatgaaggatgatttgaaagcgcagataccatggataagagaatttctaaggttaaatgatatacctctattggaagagcctggctatgaagcggatgatataatagctactatagtgaataaatataaggatgatttaaaatatattctctctggagatttagatcttttgcaattagtctcggacaaaacctttctaatacatcctcaaaagggaattactgagtttactatttatgatccaaaagctgtaaaggataggtttggagtagagccctataagattcccttatacaaagtattagtaggggacgaatctgataatattccaggagtaaatggaataggtcctaaaaaggcctcaaagattcttgagaaaatttcaagtgtagatgaatttaaaagtaaaataaaagttttggatagtgatttaagggagcttattgagaaaaattggaatattattgaaagaaatttagaacttgttactttaaaaaatatagataaggatcttattcttaaacccttcgagattaaaagagatgaaaaagtaatagattttttgaagagatatgaacttaagagtattcttcaaaagttatttcctgatcttcaagaggaagaaaatatagagattaaagatgtcgaagagatcaattttaatgaggtagaaaaagaaggctactttgcctttaaatgtcttggagatagggcttttgagggtatttctctttccttcaaggagggggaaggatattttatatctccttttgatttcaataatgagataagaaagaagattgaaaatataatttcttcagagaatgttaaaaaaattggctcttatattcaaagagatttacattttttaaactgtaaaataaagggcgatgtatttgatgttagtctcgcatcttatcttttgaaccctgaaagacaaaatcactctcttgatattttgataggagagtatctaaataaaacctcttttattcctcaaaaatacgctggttatctttttccgttaaagtctattcttgaggagaggataaagaatgaagggttagaatttgtactttataacatagagattccattaatccctgtactttactccatggagaagtgggggataaaggtagataaggaatatttaaaacagctttctgatgaattctgcgagagaattaaaaaattggaagaagagatatatgaacttgcaggaaccagatttaatctcaattctccaaaacaactttctgaagttttatttgagaggttaaaacttccttctggtaagaaaggaaaaacaggatattctacgtcgtcttctgtgcttcaaaacttaataaatgctcatcctatagtgagaaaaatcctccaatatagagaactctataaattgaagagtacttatgtggatgctattcctaatctggttaatccacaaacaggtagagttcatacaaaatttaatcctacaggtacagctacaggaagaataagtagtagtgaacctaatcttcagaatattcctataaaaagtgaagaaggtagaaagataagaagagccttcgtgtcagaagatggatattttcttgtatctcttgattattctcagatagagctaaggattatggctcatctttctcaggagcctaaattaatatctgccttccaaaaaggagaggatattcatagaagaacagcatcggagatttttggagtgccagaggaagaagttgatgatcttttaaggtcaagggcaaaggccgttaattttggaattatttatggtatctcttcttttggactttctgagactgtaagtattacaccagaagaggcagagaaatttatagactcgtattttaagcactatccaagagtgaagctttttatagataagactattcatgaggcaagagaaaaactgtacgttaaaaccttatttggcagaaaaagatatattcctgagattaagagcataattaaacaggtaaggaatgcctatgaaaggatagcaataaatgcgccaattcagggaacagctgctgatattataaaacttgccatgatagaaatttacaaggagattgaaaataaaaatctcaagtcaagaatactccttcaaattcatgatgagcttattcttgaagtgccagaggaggagatggaatttactcctttaatggcaaaggaaaaaatggaaaaggtggtagaactttcggttcctcttgtagttgaaatctcggtaggtaaaaatcttgctgaattaaaatgagctataagattggtcgac

SEQ ID NO: 2090 - DNA, 2673 bp, Artificial Sequence
  Description of Artificial Sequence: Synthetic DNA sequence of Dictyoglomus thermophilum DNA N788L
atgaaatacctgctgccgaccgctgctgctggtctgctgctcctcgctgcccagccggcgatggccatggatatcggaattaattcggatccgaaatctctgtgggatctttttcaagaaaataccgagaaagagtccaaaaggaagattctgattattgatggctcaagcctcatatacagggtttattacgcccttccccctttaaagacaaaaaatggtgaattaactaatgctctttatggcttcataagaatacttttaaaggccgtagaagattttaatcctgatcttgtaggcgttgcctttgatagacctgaacctacttttaggcatgtgatttataaagagtataaggctaagagaccacctatgaaggatgatttgaaagcgcagataccatggataagagaatttctaaggttaaatgatatacctctattggaagagcctggctatgaagcggatgatataatagctactatagtgaataaatataaggatgatttaaaatatattctctctggagatttagatcttttgcaattagtctcggacaaaacctttctaatacatcctcaaaagggaattactgagtttactatttatgatccaaaagctgtaaaggataggtttggagtagagccctataagattcccttatacaaagtattagtaggggacgaatctgataatattccaggagtaaatggaataggtcctaaaaaggcctcaaagattcttgagaaaatttcaagtgtagatgaatttaaaagtaaaataaaagttttggatagtgatttaagggagcttattgagaaaaattggaatattattgaaagaaatttagaacttgttactttaaaaaatatagataaggatcttattcttaaacccttcgagattaaaagagatgaaaaagtaatagattttttgaagagatatgaacttaagagtattcttcaaaagttatttcctgatcttcaagaggaagaaaatatagagattaaagatgtcgaagagatcaattttaatgaggtagaaaaagaaggctactttgcctttaaatgtcttggagatagggcttttgagggtatttctctttccttcaaggagggggaaggatattttatatctccttttgatttcaataatgagataagaaagaagattgaaaatataatttcttcagagaatgttaaaaaaattggctcttatattcaaagagatttacattttttaaactgtaaaataaagggcgatgtatttgatgttagtctcgcatcttatcttttgaaccctgaaagacaaaatcactctcttgatattttgataggagagtatctaaataaaacctcttttattcctcaaaaatacgctggttatctttttccgttaaagtctattcttgaggagaggataaagaatgaagggttagaatttgtactttataacatagagattccattaatccctgtactttactccatggagaagtgggggataaaggtagataaggaatatttaaaacagctttctgatgaattctgcgagagaattaaaaaattggaagaagagatatatgaacttgcaggaaccagatttaatctcaattctccaaaacaactttctgaagttttatttgagaggttaaaacttccttctggtaagaaaggaaaaacaggatattctacgtcgtcttctgtgcttcaaaacttaataaatgctcatcctatagtgagaaaaatcctccaatatagagaactctataaattgaagagtacttatgtggatgctattcctaatctggttaatccacaaacaggtagagttcatacaaaatttaatcctacaggtacagctacaggaagaataagtagtagtgaacctaatcttcagaatattcctataaaaagtgaagaaggtagaaagataagaagagccttcgtgtcagaagatggatattttcttgtatctcttgattattctcagatagagctaaggattatggctcatctttctcaggagcctaaattaatatctgccttccaaaaaggagaggatattcatagaagaacagcatcggagatttttggagtgccagaggaagaagttgatgatcttttaaggtcaagggcaaaggccgttaattttggaattatttatggtatctcttcttttggactttctgagactgtaagtattacaccagaagaggcagagaaatttatagactcgtattttaagcactatccaagagtgaagctttttatagataagactattcatgaggcaagagaaaaactgtacgttaaaaccttatttggcagaaaaagatatattcctgagattaagagcatacttaaacaggtaaggaatgcctatgaaaggatagcaataaatgcgccaattcagggaacagctgctgatattataaaacttgccatgatagaaatttacaaggagattgaaaataaaaatctcaagtcaagaatactccttcaaattcatgatgagcttattcttgaagtgccagaggaggagatggaatttactcctttaatggcaaaggaaaaaatggaaaaggtggtagaactttcggttcctcttgtagttgaaatctcggtaggtaaaaatcttgctgaattaaaatgagctataagattggtcgac

SEQ ID NO: 2091 - DNA, 2673 bp, Artificial Sequence
  Description of Artificial Sequence: Synthetic DNA sequence of Dictyoglomus thermophilum DNA N788K
atgaaatacctgctgccgaccgctgctgctggtctgctgctcctcgctgcccagccggcgatggccatggatatcggaattaattcggatccgaaatctctgtgggatctttttcaagaaaataccgagaaagagtccaaaaggaagattctgattattgatggctcaagcctcatatacagggtttattacgcccttccccctttaaagacaaaaaatggtgaattaactaatgctctttatggcttcataagaatacttttaaaggccgtagaagattttaatcctgatcttgtaggcgttgcctttgatagacctgaacctacttttaggcatgtgatttataaagagtataaggctaagagaccacctatgaaggatgatttgaaagcgcagataccatggataagagaatttctaaggttaaatgatatacctctattggaagagcctggctatgaagcggatgatataatagctactatagtgaataaatataaggatgatttaaaatatattctctctggagatttagatcttttgcaattagtctcggacaaaacctttctaatacatcctcaaaagggaattactgagtttactatttatgatccaaaagctgtaaaggataggtttggagtagagccctataagattcccttatacaaagtattagtaggggacgaatctgataatattccaggagtaaatggaataggtcctaaaaaggcctcaaagattcttgagaaaatttcaagtgtagatgaatttaaaagtaaaataaaagttttggatagtgatttaagggagcttattgagaaaaattggaatattattgaaagaaatttagaacttgttactttaaaaaatatagataaggatcttattcttaaacccttcgagattaaaagagatgaaaaagtaatagattttttgaagagatatgaacttaagagtattcttcaaaagttatttcctgatcttcaagaggaagaaaatatagagattaaagatgtcgaagagatcaattttaatgaggtagaaaaagaaggctactttgcctttaaatgtcttggagatagggcttttgagggtatttctctttccttcaaggagggggaaggatattttatatctccttttgatttcaataatgagataagaaagaagattgaaaatataatttcttcagagaatgttaaaaaaattggctcttatattcaaagagatttacattttttaaactgtaaaataaagggcgatgtatttgatgttagtctcgcatcttatcttttgaaccctgaaagacaaaatcactctcttgatattttgataggagagtatctaaataaaacctcttttattcctcaaaaatacgctggttatctttttccgttaaagtctattcttgaggagaggataaagaatgaagggttagaatttgtactttataacatagagattccattaatccctgtactttactccatggagaagtgggggataaaggtagataaggaatatttaaaacagctttctgatgaattctgcgagagaattaaaaaattggaagaagagatatatgaacttgcaggaaccagatttaatctcaattctccaaaacaactttctgaagttttatttgagaggttaaaacttccttctggtaagaaaggaaaaacaggatattctacgtcgtcttctgtgcttcaaaacttaataaatgctcatcctatagtgagaaaaatcctccaatatagagaactctataaattgaagagtacttatgtggatgctattcctaatctggttaatccacaaacaggtagagttcatacaaaatttaatcctacaggtacagctacaggaagaataagtagtagtgaacctaatcttcagaatattcctataaaaagtgaagaaggtagaaagataagaagagccttcgtgtcagaagatggatattttcttgtatctcttgattattctcagatagagctaaggattatggctcatctttctcaggagcctaaattaatatctgccttccaaaaaggagaggatattcatagaagaacagcatcggagatttttggagtgccagaggaagaagttgatgatcttttaaggtcaagggcaaaggccgttaattttggaattatttatggtatctcttcttttggactttctgagactgtaagtattacaccagaagaggcagagaaatttatagactcgtattttaagcactatccaagagtgaagctttttatagataagactattcatgaggcaagagaaaaactgtacgttaaaaccttatttggcagaaaaagatatattcctgagattaagagcataaaaaaacaggtaaggaatgcctatgaaaggatagcaataaatgcgccaattcagggaacagctgctgatattataaaacttgccatgatagaaatttacaaggagattgaaaataaaaatctcaagtcaagaatactccttcaaattcatgatgagcttattcttgaagtgccagaggaggagatggaatttactcctttaatggcaaaggaaaaaatggaaaaggtggtagaactttcggttcctcttgtagttgaaatctcggtaggtaaaaatcttgctgaattaaaatgagctataagattggtcgac

SEQ ID NO: 2092 - DNA, 2673 bp, Artificial Sequence
  Description of Artificial Sequence: Synthetic DNA sequence of Dictyoglomus thermophilum DNA N788M
atgaaatacctgctgccgaccgctgctgctggtctgctgctcctcgctgcccagccggcgatggccatggatatcggaattaattcggatccgaaatctctgtgggatctttttcaagaaaataccgagaaagagtccaaaaggaagattctgattattgatggctcaagcctcatatacagggtttattacgcccttccccctttaaagacaaaaaatggtgaattaactaatgctctttatggcttcataagaatacttttaaaggccgtagaagattttaatcctgatcttgtaggcgttgcctttgatagacctgaacctacttttaggcatgtgatttataaagagtataaggctaagagaccacctatgaaggatgatttgaaagcgcagataccatggataagagaatttctaaggttaaatgatatacctctattggaagagcctggctatgaagcggatgatataatagctactatagtgaataaatataaggatgatttaaaatatattctctctggagatttagatcttttgcaattagtctcggacaaaacctttctaatacatcctcaaaagggaattactgagtttactatttatgatccaaaagctgtaaaggataggtttggagtagagccctataagattcccttatacaaagtattagtaggggacgaatctgataatattccaggagtaaatggaataggtcctaaaaaggcctcaaagattcttgagaaaatttcaagtgtagatgaatttaaaagtaaaataaaagttttggatagtgatttaagggagcttattgagaaaaattggaatattattgaaagaaatttagaacttgttactttaaaaaatatagataaggatcttattcttaaacccttcgagattaaaagagatgaaaaagtaatagattttttgaagagatatgaacttaagagtattcttcaaaagttatttcctgatcttcaagaggaagaaaatatagagattaaagatgtcgaagagatcaattttaatgaggtagaaaaagaaggctactttgcctttaaatgtcttggagatagggcttttgagggtatttctctttccttcaaggagggggaaggatattttatatctccttttgatttcaataatgagataagaaagaagattgaaaatataatttcttcagagaatgttaaaaaaattggctcttatattcaaagagatttacattttttaaactgtaaaataaagggcgatgtatttgatgttagtctcgcatcttatcttttgaaccctgaaagacaaaatcactctcttgatattttgataggagagtatctaaataaaacctcttttattcctcaaaaatacgctggttatctttttccgttaaagtctattcttgaggagaggataaagaatgaagggttagaatttgtactttataacatagagattccattaatccctgtactttactccatggagaagtgggggataaaggtagataaggaatatttaaaacagctttctgatgaattctgcgagagaattaaaaaattggaagaagagatatatgaacttgcaggaaccagatttaatctcaattctccaaaacaactttctgaagttttatttgagaggttaaaacttccttctggtaagaaaggaaaaacaggatattctacgtcgtcttctgtgcttcaaaacttaataaatgctcatcctatagtgagaaaaatcctccaatatagagaactctataaattgaagagtacttatgtggatgctattcctaatctggttaatccacaaacaggtagagttcatacaaaatttaatcctacaggtacagctacaggaagaataagtagtagtgaacctaatcttcagaatattcctataaaaagtgaagaaggtagaaagataagaagagccttcgtgtcagaagatggatattttcttgtatctcttgattattctcagatagagctaaggattatggctcatctttctcaggagcctaaattaatatctgccttccaaaaaggagaggatattcatagaagaacagcatcggagatttttggagtgccagaggaagaagttgatgatcttttaaggtcaagggcaaaggccgttaattttggaattatttatggtatctcttcttttggactttctgagactgtaagtattacaccagaagaggcagagaaatttatagactcgtattttaagcactatccaagagtgaagctttttatagataagactattcatgaggcaagagaaaaactgtacgttaaaaccttatttggcagaaaaagatatattcctgagattaagagcataatgaaacaggtaaggaatgcctatgaaaggatagcaataaatgcgccaattcagggaacagctgctgatattataaaacttgccatgatagaaatttacaaggagattgaaaataaaaatctcaagtcaagaatactccttcaaattcatgatgagcttattcttgaagtgccagaggaggagatggaatttactcctttaatggcaaaggaaaaaatggaaaaggtggtagaactttcggttcctcttgtagttgaaatctcggtaggtaaaaatcttgctgaattaaaatgagctataagattggtcgac

SEQ ID NO: 2093 - DNA, 2673 bp, Artificial Sequence
  Description of Artificial Sequence: Synthetic DNA sequence of Dictyoglomus thermophilum DNA N788F
atgaaatacctgctgccgaccgctgctgctggtctgctgctcctcgctgcccagccggcgatggccatggatatcggaattaattcggatccgaaatctctgtgggatctttttcaagaaaataccgagaaagagtccaaaaggaagattctgattattgatggctcaagcctcatatacagggtttattacgcccttccccctttaaagacaaaaaatggtgaattaactaatgctctttatggcttcataagaatacttttaaaggccgtagaagattttaatcctgatcttgtaggcgttgcctttgatagacctgaacctacttttaggcatgtgatttataaagagtataaggctaagagaccacctatgaaggatgatttgaaagcgcagataccatggataagagaatttctaaggttaaatgatatacctctattggaagagcctggctatgaagcggatgatataatagctactatagtgaataaatataaggatgatttaaaatatattctctctggagatttagatcttttgcaattagtctcggacaaaacctttctaatacatcctcaaaagggaattactgagtttactatttatgatccaaaagctgtaaaggataggtttggagtagagccctataagattcccttatacaaagtattagtaggggacgaatctgataatattccaggagtaaatggaataggtcctaaaaaggcctcaaagattcttgagaaaatttcaagtgtagatgaatttaaaagtaaaataaaagttttggatagtgatttaagggagcttattgagaaaaattggaatattattgaaagaaatttagaacttgttactttaaaaaatatagataaggatcttattcttaaacccttcgagattaaaagagatgaaaaagtaatagattttttgaagagatatgaacttaagagtattcttcaaaagttatttcctgatcttcaagaggaagaaaatatagagattaaagatgtcgaagagatcaattttaatgaggtagaaaaagaaggctactttgcctttaaatgtcttggagatagggcttttgagggtatttctctttccttcaaggagggggaaggatattttatatctccttttgatttcaataatgagataagaaagaagattgaaaatataatttcttcagagaatgttaaaaaaattggctcttatattcaaagagatttacattttttaaactgtaaaataaagggcgatgtatttgatgttagtctcgcatcttatcttttgaaccctgaaagacaaaatcactctcttgatattttgataggagagtatctaaataaaacctcttttattcctcaaaaatacgctggttatctttttccgttaaagtctattcttgaggagaggataaagaatgaagggttagaatttgtactttataacatagagattccattaatccctgtactttactccatggagaagtgggggataaaggtagataaggaatatttaaaacagctttctgatgaattctgcgagagaattaaaaaattggaagaagagatatatgaacttgcaggaaccagatttaatctcaattctccaaaacaactttctgaagttttatttgagaggttaaaacttccttctggtaagaaaggaaaaacaggatattctacgtcgtcttctgtgcttcaaaacttaataaatgctcatcctatagtgagaaaaatcctccaatatagagaactctataaattgaagagtacttatgtggatgctattcctaatctggttaatccacaaacaggtagagttcatacaaaatttaatcctacaggtacagctacaggaagaataagtagtagtgaacctaatcttcagaatattcctataaaaagtgaagaaggtagaaagataagaagagccttcgtgtcagaagatggatattttcttgtatctcttgattattctcagatagagctaaggattatggctcatctttctcaggagcctaaattaatatctgccttccaaaaaggagaggatattcatagaagaacagcatcggagatttttggagtgccagaggaagaagttgatgatcttttaaggtcaagggcaaaggccgttaattttggaattatttatggtatctcttcttttggactttctgagactgtaagtattacaccagaagaggcagagaaatttatagactcgtattttaagcactatccaagagtgaagctttttatagataagactattcatgaggcaagagaaaaactgtacgttaaaaccttatttggcagaaaaagatatattcctgagattaagagcatatttaaacaggtaaggaatgcctatgaaaggatagcaataaatgcgccaattcagggaacagctgctgatattataaaacttgccatgatagaaatttacaaggagattgaaaataaaaatctcaagtcaagaatactccttcaaattcatgatgagcttattcttgaagtgccagaggaggagatggaatttactcctttaatggcaaaggaaaaaatggaaaaggtggtagaactttcggttcctcttgtagttgaaatctcggtaggtaaaaatcttgctgaattaaaatgagctataagattggtcgac

SEQ ID NO: 2094 - DNA, 2673 bp, Artificial Sequence
  Description of Artificial Sequence: Synthetic DNA sequence of Dictyoglomus thermophilum DNA N788P
atgaaatacctgctgccgaccgctgctgctggtctgctgctcctcgctgcccagccggcgatggccatggatatcggaattaattcggatccgaaatctctgtgggatctttttcaagaaaataccgagaaagagtccaaaaggaagattctgattattgatggctcaagcctcatatacagggtttattacgcccttccccctttaaagacaaaaaatggtgaattaactaatgctctttatggcttcataagaatacttttaaaggccgtagaagattttaatcctgatcttgtaggcgttgcctttgatagacctgaacctacttttaggcatgtgatttataaagagtataaggctaagagaccacctatgaaggatgatttgaaagcgcagataccatggataagagaatttctaaggttaaatgatatacctctattggaagagcctggctatgaagcggatgatataatagctactatagtgaataaatataaggatgatttaaaatatattctctctggagatttagatcttttgcaattagtctcggacaaaacctttctaatacatcctcaaaagggaattactgagtttactatttatgatccaaaagctgtaaaggataggtttggagtagagccctataagattcccttatacaaagtattagtaggggacgaatctgataatattccaggagtaaatggaataggtcctaaaaaggcctcaaagattcttgagaaaatttcaagtgtagatgaatttaaaagtaaaataaaagttttggatagtgatttaagggagcttattgagaaaaattggaatattattgaaagaaatttagaacttgttactttaaaaaatatagataaggatcttattcttaaacccttcgagattaaaagagatgaaaaagtaatagattttttgaagagatatgaacttaagagtattcttcaaaagttatttcctgatcttcaagaggaagaaaatatagagattaaagatgtcgaagagatcaattttaatgaggtagaaaaagaaggctactttgcctttaaatgtcttggagatagggcttttgagggtatttctctttccttcaaggagggggaaggatattttatatctccttttgatttcaataatgagataagaaagaagattgaaaatataatttcttcagagaatgttaaaaaaattggctcttatattcaaagagatttacattttttaaactgtaaaataaagggcgatgtatttgatgttagtctcgcatcttatcttttgaaccctgaaagacaaaatcactctcttgatattttgataggagagtatctaaataaaacctcttttattcctcaaaaatacgctggttatctttttccgttaaagtctattcttgaggagaggataaagaatgaagggttagaatttgtactttataacatagagattccattaatccctgtactttactccatggagaagtgggggataaaggtagataaggaatatttaaaacagctttctgatgaattctgcgagagaattaaaaaattggaagaagagatatatgaacttgcaggaaccagatttaatctcaattctccaaaacaactttctgaagttttatttgagaggttaaaacttccttctggtaagaaaggaaaaacaggatattctacgtcgtcttctgtgcttcaaaacttaataaatgctcatcctatagtgagaaaaatcctccaatatagagaactctataaattgaagagtacttatgtggatgctattcctaatctggttaatccacaaacaggtagagttcatacaaaatttaatcctacaggtacagctacaggaagaataagtagtagtgaacctaatcttcagaatattcctataaaaagtgaagaaggtagaaagataagaagagccttcgtgtcagaagatggatattttcttgtatctcttgattattctcagatagagctaaggattatggctcatctttctcaggagcctaaattaatatctgccttccaaaaaggagaggatattcatagaagaacagcatcggagatttttggagtgccagaggaagaagttgatgatcttttaaggtcaagggcaaaggccgttaattttggaattatttatggtatctcttcttttggactttctgagactgtaagtattacaccagaagaggcagagaaatttatagactcgtattttaagcactatccaagagtgaagctttttatagataagactattcatgaggcaagagaaaaactgtacgttaaaaccttatttggcagaaaaagatatattcctgagattaagagcatacctaaacaggtaaggaatgcctatgaaaggatagcaataaatgcgccaattcagggaacagctgctgatattataaaacttgccatgatagaaatttacaaggagattgaaaataaaaatctcaagtcaagaatactccttcaaattcatgatgagcttattcttgaagtgccagaggaggagatggaatttactcctttaatggcaaaggaaaaaatggaaaaggtggtagaactttcggttcctcttgtagttgaaatctcggtaggtaaaaatcttgctgaattaaaatgagctataagattggtcgac

SEQ ID NO: 2095 - DNA, 2673 bp, Artificial Sequence
  Description of Artificial Sequence: Synthetic DNA sequence of Dictyoglomus thermophilum DNA N788S
atgaaatacctgctgccgaccgctgctgctggtctgctgctcctcgctgcccagccggcgatggccatggatatcggaattaattcggatccgaaatctctgtgggatctttttcaagaaaataccgagaaagagtccaaaaggaagattctgattattgatggctcaagcctcatatacagggtttattacgcccttccccctttaaagacaaaaaatggtgaattaactaatgctctttatggcttcataagaatacttttaaaggccgtagaagattttaatcctgatcttgtaggcgttgcctttgatagacctgaacctacttttaggcatgtgatttataaagagtataaggctaagagaccacctatgaaggatgatttgaaagcgcagataccatggataagagaatttctaaggttaaatgatatacctctattggaagagcctggctatgaagcggatgatataatagctactatagtgaataaatataaggatgatttaaaatatattctctctggagatttagatcttttgcaattagtctcggacaaaacctttctaatacatcctcaaaagggaattactgagtttactatttatgatccaaaagctgtaaaggataggtttggagtagagccctataagattcccttatacaaagtattagtaggggacgaatctgataatattccaggagtaaatggaataggtcctaaaaaggcctcaaagattcttgagaaaatttcaagtgtagatgaatttaaaagtaaaataaaagttttggatagtgatttaagggagcttattgagaaaaattggaatattattgaaagaaatttagaacttgttactttaaaaaatatagataaggatcttattcttaaacccttcgagattaaaagagatgaaaaagtaatagattttttgaagagatatgaacttaagagtattcttcaaaagttatttcctgatcttcaagaggaagaaaatatagagattaaagatgtcgaagagatcaattttaatgaggtagaaaaagaaggctactttgcctttaaatgtcttggagatagggcttttgagggtatttctctttccttcaaggagggggaaggatattttatatctccttttgatttcaataatgagataagaaagaagattgaaaatataatttcttcagagaatgttaaaaaaattggctcttatattcaaagagatttacattttttaaactgtaaaataaagggcgatgtatttgatgttagtctcgcatcttatcttttgaaccctgaaagacaaaatcactctcttgatattttgataggagagtatctaaataaaacctcttttattcctcaaaaatacgctggttatctttttccgttaaagtctattcttgaggagaggataaagaatgaagggttagaatttgtactttataacatagagattccattaatccctgtactttactccatggagaagtgggggataaaggtagataaggaatatttaaaacagctttctgatgaattctgcgagagaattaaaaaattggaagaagagatatatgaacttgcaggaaccagatttaatctcaattctccaaaacaactttctgaagttttatttgagaggttaaaacttccttctggtaagaaaggaaaaacaggatattctacgtcgtcttctgtgcttcaaaacttaataaatgctcatcctatagtgagaaaaatcctccaatatagagaactctataaattgaagagtacttatgtggatgctattcctaatctggttaatccacaaacaggtagagttcatacaaaatttaatcctacaggtacagctacaggaagaataagtagtagtgaacctaatcttcagaatattcctataaaaagtgaagaaggtagaaagataagaagagccttcgtgtcagaagatggatattttcttgtatctcttgattattctcagatagagctaaggattatggctcatctttctcaggagcctaaattaatatctgccttccaaaaaggagaggatattcatagaagaacagcatcggagatttttggagtgccagaggaagaagttgatgatcttttaaggtcaagggcaaaggccgttaattttggaattatttatggtatctcttcttttggactttctgagactgtaagtattacaccagaagaggcagagaaatttatagactcgtattttaagcactatccaagagtgaagctttttatagataagactattcatgaggcaagagaaaaactgtacgttaaaaccttatttggcagaaaaagatatattcctgagattaagagcatatctaaacaggtaaggaatgcctatgaaaggatagcaataaatgcgccaattcagggaacagctgctgatattataaaacttgccatgatagaaatttacaaggagattgaaaataaaaatctcaagtcaagaatactccttcaaattcatgatgagcttattcttgaagtgccagaggaggagatggaatttactcctttaatggcaaaggaaaaaatggaaaaggtggtagaactttcggttcctcttgtagttgaaatctcggtaggtaaaaatcttgctgaattaaaatgagctataagattggtcgac

SEQ ID NO: 2096 - DNA, 2673 bp, Artificial Sequence
  Description of Artificial Sequence: Synthetic DNA sequence of Dictyoglomus thermophilum DNA N788T
atgaaatacctgctgccgaccgctgctgctggtctgctgctcctcgctgcccagccggcgatggccatggatatcggaattaattcggatccgaaatctctgtgggatctttttcaagaaaataccgagaaagagtccaaaaggaagattctgattattgatggctcaagcctcatatacagggtttattacgcccttccccctttaaagacaaaaaatggtgaattaactaatgctctttatggcttcataagaatacttttaaaggccgtagaagattttaatcctgatcttgtaggcgttgcctttgatagacctgaacctacttttaggcatgtgatttataaagagtataaggctaagagaccacctatgaaggatgatttgaaagcgcagataccatggataagagaatttctaaggttaaatgatatacctctattggaagagcctggctatgaagcggatgatataatagctactatagtgaataaatataaggatgatttaaaatatattctctctggagatttagatcttttgcaattagtctcggacaaaacctttctaatacatcctcaaaagggaattactgagtttactatttatgatccaaaagctgtaaaggataggtttggagtagagccctataagattcccttatacaaagtattagtaggggacgaatctgataatattccaggagtaaatggaataggtcctaaaaaggcctcaaagattcttgagaaaatttcaagtgtagatgaatttaaaagtaaaataaaagttttggatagtgatttaagggagcttattgagaaaaattggaatattattgaaagaaatttagaacttgttactttaaaaaatatagataaggatcttattcttaaacccttcgagattaaaagagatgaaaaagtaatagattttttgaagagatatgaacttaagagtattcttcaaaagttatttcctgatcttcaagaggaagaaaatatagagattaaagatgtcgaagagatcaattttaatgaggtagaaaaagaaggctactttgcctttaaatgtcttggagatagggcttttgagggtatttctctttccttcaaggagggggaaggatattttatatctccttttgatttcaataatgagataagaaagaagattgaaaatataatttcttcagagaatgttaaaaaaattggctcttatattcaaagagatttacattttttaaactgtaaaataaagggcgatgtatttgatgttagtctcgcatcttatcttttgaaccctgaaagacaaaatcactctcttgatattttgataggagagtatctaaataaaacctcttttattcctcaaaaatacgctggttatctttttccgttaaagtctattcttgaggagaggataaagaatgaagggttagaatttgtactttataacatagagattccattaatccctgtactttactccatggagaagtgggggataaaggtagataaggaatatttaaaacagctttctgatgaattctgcgagagaattaaaaaattggaagaagagatatatgaacttgcaggaaccagatttaatctcaattctccaaaacaactttctgaagttttatttgagaggttaaaacttccttctggtaagaaaggaaaaacaggatattctacgtcgtcttctgtgcttcaaaacttaataaatgctcatcctatagtgagaaaaatcctccaatatagagaactctataaattgaagagtacttatgtggatgctattcctaatctggttaatccacaaacaggtagagttcatacaaaatttaatcctacaggtacagctacaggaagaataagtagtagtgaacctaatcttcagaatattcctataaaaagtgaagaaggtagaaagataagaagagccttcgtgtcagaagatggatattttcttgtatctcttgattattctcagatagagctaaggattatggctcatctttctcaggagcctaaattaatatctgccttccaaaaaggagaggatattcatagaagaacagcatcggagatttttggagtgccagaggaagaagttgatgatcttttaaggtcaagggcaaaggccgttaattttggaattatttatggtatctcttcttttggactttctgagactgtaagtattacaccagaagaggcagagaaatttatagactcgtattttaagcactatccaagagtgaagctttttatagataagactattcatgaggcaagagaaaaactgtacgttaaaaccttatttggcagaaaaagatatattcctgagattaagagcataactaaacaggtaaggaatgcctatgaaaggatagcaataaatgcgccaattcagggaacagctgctgatattataaaacttgccatgatagaaatttacaaggagattgaaaataaaaatctcaagtcaagaatactccttcaaattcatgatgagcttattcttgaagtgccagaggaggagatggaatttactcctttaatggcaaaggaaaaaatggaaaaggtggtagaactttcggttcctcttgtagttgaaatctcggtaggtaaaaatcttgctgaattaaaatgagctataagattggtcgac

SEQ ID NO: 2097 - DNA, 2673 bp, Artificial Sequence
  Description of Artificial Sequence: Synthetic DNA sequence of Dictyoglomus thermophilum DNA N788W
atgaaatacctgctgccgaccgctgctgctggtctgctgctcctcgctgcccagccggcgatggccatggatatcggaattaattcggatccgaaatctctgtgggatctttttcaagaaaataccgagaaagagtccaaaaggaagattctgattattgatggctcaagcctcatatacagggtttattacgcccttccccctttaaagacaaaaaatggtgaattaactaatgctctttatggcttcataagaatacttttaaaggccgtagaagattttaatcctgatcttgtaggcgttgcctttgatagacctgaacctacttttaggcatgtgatttataaagagtataaggctaagagaccacctatgaaggatgatttgaaagcgcagataccatggataagagaatttctaaggttaaatgatatacctctattggaagagcctggctatgaagcggatgatataatagctactatagtgaataaatataaggatgatttaaaatatattctctctggagatttagatcttttgcaattagtctcggacaaaacctttctaatacatcctcaaaagggaattactgagtttactatttatgatccaaaagctgtaaaggataggtttggagtagagccctataagattcccttatacaaagtattagtaggggacgaatctgataatattccaggagtaaatggaataggtcctaaaaaggcctcaaagattcttgagaaaatttcaagtgtagatgaatttaaaagtaaaataaaagttttggatagtgatttaagggagcttattgagaaaaattggaatattattgaaagaaatttagaacttgttactttaaaaaatatagataaggatcttattcttaaacccttcgagattaaaagagatgaaaaagtaatagattttttgaagagatatgaacttaagagtattcttcaaaagttatttcctgatcttcaagaggaagaaaatatagagattaaagatgtcgaagagatcaattttaatgaggtagaaaaagaaggctactttgcctttaaatgtcttggagatagggcttttgagggtatttctctttccttcaaggagggggaaggatattttatatctccttttgatttcaataatgagataagaaagaagattgaaaatataatttcttcagagaatgttaaaaaaattggctcttatattcaaagagatttacattttttaaactgtaaaataaagggcgatgtatttgatgttagtctcgcatcttatcttttgaaccctgaaagacaaaatcactctcttgatattttgataggagagtatctaaataaaacctcttttattcctcaaaaatacgctggttatctttttccgttaaagtctattcttgaggagaggataaagaatgaagggttagaatttgtactttataacatagagattccattaatccctgtactttactccatggagaagtgggggataaaggtagataaggaatatttaaaacagctttctgatgaattctgcgagagaattaaaaaattggaagaagagatatatgaacttgcaggaaccagatttaatctcaattctccaaaacaactttctgaagttttatttgagaggttaaaacttccttctggtaagaaaggaaaaacaggatattctacgtcgtcttctgtgcttcaaaacttaataaatgctcatcctatagtgagaaaaatcctccaatatagagaactctataaattgaagagtacttatgtggatgctattcctaatctggttaatccacaaacaggtagagttcatacaaaatttaatcctacaggtacagctacaggaagaataagtagtagtgaacctaatcttcagaatattcctataaaaagtgaagaaggtagaaagataagaagagccttcgtgtcagaagatggatattttcttgtatctcttgattattctcagatagagctaaggattatggctcatctttctcaggagcctaaattaatatctgccttccaaaaaggagaggatattcatagaagaacagcatcggagatttttggagtgccagaggaagaagttgatgatcttttaaggtcaagggcaaaggccgttaattttggaattatttatggtatctcttcttttggactttctgagactgtaagtattacaccagaagaggcagagaaatttatagactcgtattttaagcactatccaagagtgaagctttttatagataagactattcatgaggcaagagaaaaactgtacgttaaaaccttatttggcagaaaaagatatattcctgagattaagagcatatggaaacaggtaaggaatgcctatgaaaggatagcaataaatgcgccaattcagggaacagctgctgatattataaaacttgccatgatagaaatttacaaggagattgaaaataaaaatctcaagtcaagaatactccttcaaattcatgatgagcttattcttgaagtgccagaggaggagatggaatttactcctttaatggcaaaggaaaaaatggaaaaggtggtagaactttcggttcctcttgtagttgaaatctcggtaggtaaaaatcttgctgaattaaaatgagctataagattggtcgac

SEQ ID NO: 2098 - DNA, 2673 bp, Artificial Sequence
  Description of Artificial Sequence: Synthetic DNA sequence of Dictyoglomus thermophilum DNA N788Y
atgaaatacctgctgccgaccgctgctgctggtctgctgctcctcgctgcccagccggcgatggccatggatatcggaattaattcggatccgaaatctctgtgggatctttttcaagaaaataccgagaaagagtccaaaaggaagattctgattattgatggctcaagcctcatatacagggtttattacgcccttccccctttaaagacaaaaaatggtgaattaactaatgctctttatggcttcataagaatacttttaaaggccgtagaagattttaatcctgatcttgtaggcgttgcctttgatagacctgaacctacttttaggcatgtgatttataaagagtataaggctaagagaccacctatgaaggatgatttgaaagcgcagataccatggataagagaatttctaaggttaaatgatatacctctattggaagagcctggctatgaagcggatgatataatagctactatagtgaataaatataaggatgatttaaaatatattctctctggagatttagatcttttgcaattagtctcggacaaaacctttctaatacatcctcaaaagggaattactgagtttactatttatgatccaaaagctgtaaaggataggtttggagtagagccctataagattcccttatacaaagtattagtaggggacgaatctgataatattccaggagtaaatggaataggtcctaaaaaggcctcaaagattcttgagaaaatttcaagtgtagatgaatttaaaagtaaaataaaagttttggatagtgatttaagggagcttattgagaaaaattggaatattattgaaagaaatttagaacttgttactttaaaaaatatagataaggatcttattcttaaacccttcgagattaaaagagatgaaaaagtaatagattttttgaagagatatgaacttaagagtattcttcaaaagttatttcctgatcttcaagaggaagaaaatatagagattaaagatgtcgaagagatcaattttaatgaggtagaaaaagaaggctactttgcctttaaatgtcttggagatagggcttttgagggtatttctctttccttcaaggagggggaaggatattttatatctccttttgatttcaataatgagataagaaagaagattgaaaatataatttcttcagagaatgttaaaaaaattggctcttatattcaaagagatttacattttttaaactgtaaaataaagggcgatgtatttgatgttagtctcgcatcttatcttttgaaccctgaaagacaaaatcactctcttgatattttgataggagagtatctaaataaaacctcttttattcctcaaaaatacgctggttatctttttccgttaaagtctattcttgaggagaggataaagaatgaagggttagaatttgtactttataacatagagattccattaatccctgtactttactccatggagaagtgggggataaaggtagataaggaatatttaaaacagctttctgatgaattctgcgagagaattaaaaaattggaagaagagatatatgaacttgcaggaaccagatttaatctcaattctccaaaacaactttctgaagttttatttgagaggttaaaacttccttctggtaagaaaggaaaaacaggatattctacgtcgtcttctgtgcttcaaaacttaataaatgctcatcctatagtgagaaaaatcctccaatatagagaactctataaattgaagagtacttatgtggatgctattcctaatctggttaatccacaaacaggtagagttcatacaaaatttaatcctacaggtacagctacaggaagaataagtagtagtgaacctaatcttcagaatattcctataaaaagtgaagaaggtagaaagataagaagagccttcgtgtcagaagatggatattttcttgtatctcttgattattctcagatagagctaaggattatggctcatctttctcaggagcctaaattaatatctgccttccaaaaaggagaggatattcatagaagaacagcatcggagatttttggagtgccagaggaagaagttgatgatcttttaaggtcaagggcaaaggccgttaattttggaattatttatggtatctcttcttttggactttctgagactgtaagtattacaccagaagaggcagagaaatttatagactcgtattttaagcactatccaagagtgaagctttttatagataagactattcatgaggcaagagaaaaactgtacgttaaaaccttatttggcagaaaaagatatattcctgagattaagagcatatataaacaggtaaggaatgcctatgaaaggatagcaataaatgcgccaattcagggaacagctgctgatattataaaacttgccatgatagaaatttacaaggagattgaaaataaaaatctcaagtcaagaatactccttcaaattcatgatgagcttattcttgaagtgccagaggaggagatggaatttactcctttaatggcaaaggaaaaaatggaaaaggtggtagaactttcggttcctcttgtagttgaaatctcggtaggtaaaaatcttgctgaattaaaatgagctataagattggtcgac

SEQ ID NO: 2099 - DNA, 2673 bp, Artificial Sequence
  Description of Artificial Sequence: Synthetic DNA sequence of Dictyoglomus thermophilum DNA N788V
atgaaatacctgctgccgaccgctgctgctggtctgctgctcctcgctgcccagccggcgatggccatggatatcggaattaattcggatccgaaatctctgtgggatctttttcaagaaaataccgagaaagagtccaaaaggaagattctgattattgatggctcaagcctcatatacagggtttattacgcccttccccctttaaagacaaaaaatggtgaattaactaatgctctttatggcttcataagaatacttttaaaggccgtagaagattttaatcctgatcttgtaggcgttgcctttgatagacctgaacctacttttaggcatgtgatttataaagagtataaggctaagagaccacctatgaaggatgatttgaaagcgcagataccatggataagagaatttctaaggttaaatgatatacctctattggaagagcctggctatgaagcggatgatataatagctactatagtgaataaatataaggatgatttaaaatatattctctctggagatttagatcttttgcaattagtctcggacaaaacctttctaatacatcctcaaaagggaattactgagtttactatttatgatccaaaagctgtaaaggataggtttggagtagagccctataagattcccttatacaaagtattagtaggggacgaatctgataatattccaggagtaaatggaataggtcctaaaaaggcctcaaagattcttgagaaaatttcaagtgtagatgaatttaaaagtaaaataaaagttttggatagtgatttaagggagcttattgagaaaaattggaatattattgaaagaaatttagaacttgttactttaaaaaatatagataaggatcttattcttaaacccttcgagattaaaagagatgaaaaagtaatagattttttgaagagatatgaacttaagagtattcttcaaaagttatttcctgatcttcaagaggaagaaaatatagagattaaagatgtcgaagagatcaattttaatgaggtagaaaaagaaggctactttgcctttaaatgtcttggagatagggcttttgagggtatttctctttccttcaaggagggggaaggatattttatatctccttttgatttcaataatgagataagaaagaagattgaaaatataatttcttcagagaatgttaaaaaaattggctcttatattcaaagagatttacattttttaaactgtaaaataaagggcgatgtatttgatgttagtctcgcatcttatcttttgaaccctgaaagacaaaatcactctcttgatattttgataggagagtatctaaataaaacctcttttattcctcaaaaatacgctggttatctttttccgttaaagtctattcttgaggagaggataaagaatgaagggttagaatttgtactttataacatagagattccattaatccctgtactttactccatggagaagtgggggataaaggtagataaggaatatttaaaacagctttctgatgaattctgcgagagaattaaaaaattggaagaagagatatatgaacttgcaggaaccagatttaatctcaattctccaaaacaactttctgaagttttatttgagaggttaaaacttccttctggtaagaaaggaaaaacaggatattctacgtcgtcttctgtgcttcaaaacttaataaatgctcatcctatagtgagaaaaatcctccaatatagagaactctataaattgaagagtacttatgtggatgctattcctaatctggttaatccacaaacaggtagagttcatacaaaatttaatcctacaggtacagctacaggaagaataagtagtagtgaacctaatcttcagaatattcctataaaaagtgaagaaggtagaaagataagaagagccttcgtgtcagaagatggatattttcttgtatctcttgattattctcagatagagctaaggattatggctcatctttctcaggagcctaaattaatatctgccttccaaaaaggagaggatattcatagaagaacagcatcggagatttttggagtgccagaggaagaagttgatgatcttttaaggtcaagggcaaaggccgttaattttggaattatttatggtatctcttcttttggactttctgagactgtaagtattacaccagaagaggcagagaaatttatagactcgtattttaagcactatccaagagtgaagctttttatagataagactattcatgaggcaagagaaaaactgtacgttaaaaccttatttggcagaaaaagatatattcctgagattaagagcatagttaaacaggtaaggaatgcctatgaaaggatagcaataaatgcgccaattcagggaacagctgctgatattataaaacttgccatgatagaaatttacaaggagattgaaaataaaaatctcaagtcaagaatactccttcaaattcatgatgagcttattcttgaagtgccagaggaggagatggaatttactcctttaatggcaaaggaaaaaatggaaaaggtggtagaactttcggttcctcttgtagttgaaatctcggtaggtaaaaatcttgctgaattaaaatgagctataagattggtcgac

SEQ ID NO: 2100 - DNA, 2673 bp, Artificial Sequence
  Description of Artificial Sequence: Synthetic DNA sequence of Dictyoglomus thermophilum DNA K789A
atgaaatacctgctgccgaccgctgctgctggtctgctgctcctcgctgcccagccggcgatggccatggatatcggaattaattcggatccgaaatctctgtgggatctttttcaagaaaataccgagaaagagtccaaaaggaagattctgattattgatggctcaagcctcatatacagggtttattacgcccttccccctttaaagacaaaaaatggtgaattaactaatgctctttatggcttcataagaatacttttaaaggccgtagaagattttaatcctgatcttgtaggcgttgcctttgatagacctgaacctacttttaggcatgtgatttataaagagtataaggctaagagaccacctatgaaggatgatttgaaagcgcagataccatggataagagaatttctaaggttaaatgatatacctctattggaagagcctggctatgaagcggatgatataatagctactatagtgaataaatataaggatgatttaaaatatattctctctggagatttagatcttttgcaattagtctcggacaaaacctttctaatacatcctcaaaagggaattactgagtttactatttatgatccaaaagctgtaaaggataggtttggagtagagccctataagattcccttatacaaagtattagtaggggacgaatctgataatattccaggagtaaatggaataggtcctaaaaaggcctcaaagattcttgagaaaatttcaagtgtagatgaatttaaaagtaaaataaaagttttggatagtgatttaagggagcttattgagaaaaattggaatattattgaaagaaatttagaacttgttactttaaaaaatatagataaggatcttattcttaaacccttcgagattaaaagagatgaaaaagtaatagattttttgaagagatatgaacttaagagtattcttcaaaagttatttcctgatcttcaagaggaagaaaatatagagattaaagatgtcgaagagatcaattttaatgaggtagaaaaagaaggctactttgcctttaaatgtcttggagatagggcttttgagggtatttctctttccttcaaggagggggaaggatattttatatctccttttgatttcaataatgagataagaaagaagattgaaaatataatttcttcagagaatgttaaaaaaattggctcttatattcaaagagatttacattttttaaactgtaaaataaagggcgatgtatttgatgttagtctcgcatcttatcttttgaaccctgaaagacaaaatcactctcttgatattttgataggagagtatctaaataaaacctcttttattcctcaaaaatacgctggttatctttttccgttaaagtctattcttgaggagaggataaagaatgaagggttagaatttgtactttataacatagagattccattaatccctgtactttactccatggagaagtgggggataaaggtagataaggaatatttaaaacagctttctgatgaattctgcgagagaattaaaaaattggaagaagagatatatgaacttgcaggaaccagatttaatctcaattctccaaaacaactttctgaagttttatttgagaggttaaaacttccttctggtaagaaaggaaaaacaggatattctacgtcgtcttctgtgcttcaaaacttaataaatgctcatcctatagtgagaaaaatcctccaatatagagaactctataaattgaagagtacttatgtggatgctattcctaatctggttaatccacaaacaggtagagttcatacaaaatttaatcctacaggtacagctacaggaagaataagtagtagtgaacctaatcttcagaatattcctataaaaagtgaagaaggtagaaagataagaagagccttcgtgtcagaagatggatattttcttgtatctcttgattattctcagatagagctaaggattatggctcatctttctcaggagcctaaattaatatctgccttccaaaaaggagaggatattcatagaagaacagcatcggagatttttggagtgccagaggaagaagttgatgatcttttaaggtcaagggcaaaggccgttaattttggaattatttatggtatctcttcttttggactttctgagactgtaagtattacaccagaagaggcagagaaatttatagactcgtattttaagcactatccaagagtgaagctttttatagataagactattcatgaggcaagagaaaaactgtacgttaaaaccttatttggcagaaaaagatatattcctgagattaagagcataaatgctcaggtaaggaatgcctatgaaaggatagcaataaatgcgccaattcagggaacagctgctgatattataaaacttgccatgatagaaatttacaaggagattgaaaataaaaatctcaagtcaagaatactccttcaaattcatgatgagcttattcttgaagtgccagaggaggagatggaatttactcctttaatggcaaaggaaaaaatggaaaaggtggtagaactttcggttcctcttgtagttgaaatctcggtaggtaaaaatcttgctgaattaaaatgagctataagattggtcgac

SEQ ID NO: 2101 - DNA, 2673 bp, Artificial Sequence
  Description of Artificial Sequence: Synthetic DNA sequence of Dictyoglomus thermophilum DNA K789R
atgaaatacctgctgccgaccgctgctgctggtctgctgctcctcgctgcccagccggcgatggccatggatatcggaattaattcggatccgaaatctctgtgggatctttttcaagaaaataccgagaaagagtccaaaaggaagattctgattattgatggctcaagcctcatatacagggtttattacgcccttccccctttaaagacaaaaaatggtgaattaactaatgctctttatggcttcataagaatacttttaaaggccgtagaagattttaatcctgatcttgtaggcgttgcctttgatagacctgaacctacttttaggcatgtgatttataaagagtataaggctaagagaccacctatgaaggatgatttgaaagcgcagataccatggataagagaatttctaaggttaaatgatatacctctattggaagagcctggctatgaagcggatgatataatagctactatagtgaataaatataaggatgatttaaaatatattctctctggagatttagatcttttgcaattagtctcggacaaaacctttctaatacatcctcaaaagggaattactgagtttactatttatgatccaaaagctgtaaaggataggtttggagtagagccctataagattcccttatacaaagtattagtaggggacgaatctgataatattccaggagtaaatggaataggtcctaaaaaggcctcaaagattcttgagaaaatttcaagtgtagatgaatttaaaagtaaaataaaagttttggatagtgatttaagggagcttattgagaaaaattggaatattattgaaagaaatttagaacttgttactttaaaaaatatagataaggatcttattcttaaacccttcgagattaaaagagatgaaaaagtaatagattttttgaagagatatgaacttaagagtattcttcaaaagttatttcctgatcttcaagaggaagaaaatatagagattaaagatgtcgaagagatcaattttaatgaggtagaaaaagaaggctactttgcctttaaatgtcttggagatagggcttttgagggtatttctctttccttcaaggagggggaaggatattttatatctccttttgatttcaataatgagataagaaagaagattgaaaatataatttcttcagagaatgttaaaaaaattggctcttatattcaaagagatttacattttttaaactgtaaaataaagggcgatgtatttgatgttagtctcgcatcttatcttttgaaccctgaaagacaaaatcactctcttgatattttgataggagagtatctaaataaaacctcttttattcctcaaaaatacgctggttatctttttccgttaaagtctattcttgaggagaggataaagaatgaagggttagaatttgtactttataacatagagattccattaatccctgtactttactccatggagaagtgggggataaaggtagataaggaatatttaaaacagctttctgatgaattctgcgagagaattaaaaaattggaagaagagatatatgaacttgcaggaaccagatttaatctcaattctccaaaacaactttctgaagttttatttgagaggttaaaacttccttctggtaagaaaggaaaaacaggatattctacgtcgtcttctgtgcttcaaaacttaataaatgctcatcctatagtgagaaaaatcctccaatatagagaactctataaattgaagagtacttatgtggatgctattcctaatctggttaatccacaaacaggtagagttcatacaaaatttaatcctacaggtacagctacaggaagaataagtagtagtgaacctaatcttcagaatattcctataaaaagtgaagaaggtagaaagataagaagagccttcgtgtcagaagatggatattttcttgtatctcttgattattctcagatagagctaaggattatggctcatctttctcaggagcctaaattaatatctgccttccaaaaaggagaggatattcatagaagaacagcatcggagatttttggagtgccagaggaagaagttgatgatcttttaaggtcaagggcaaaggccgttaattttggaattatttatggtatctcttcttttggactttctgagactgtaagtattacaccagaagaggcagagaaatttatagactcgtattttaagcactatccaagagtgaagctttttatagataagactattcatgaggcaagagaaaaactgtacgttaaaaccttatttggcagaaaaagatatattcctgagattaagagcataaatcgtcaggtaaggaatgcctatgaaaggatagcaataaatgcgccaattcagggaacagctgctgatattataaaacttgccatgatagaaatttacaaggagattgaaaataaaaatctcaagtcaagaatactccttcaaattcatgatgagcttattcttgaagtgccagaggaggagatggaatttactcctttaatggcaaaggaaaaaatggaaaaggtggtagaactttcggttcctcttgtagttgaaatctcggtaggtaaaaatcttgctgaattaaaatgagctataagattggtcgac

SEQ ID NO: 2102 - DNA, 2673 bp, Artificial Sequence
  Description of Artificial Sequence: Synthetic DNA sequence of Dictyoglomus thermophilum DNA K789N
atgaaatacctgctgccgaccgctgctgctggtctgctgctcctcgctgcccagccggcgatggccatggatatcggaattaattcggatccgaaatctctgtgggatctttttcaagaaaataccgagaaagagtccaaaaggaagattctgattattgatggctcaagcctcatatacagggtttattacgcccttccccctttaaagacaaaaaatggtgaattaactaatgctctttatggcttcataagaatacttttaaaggccgtagaagattttaatcctgatcttgtaggcgttgcctttgatagacctgaacctacttttaggcatgtgatttataaagagtataaggctaagagaccacctatgaaggatgatttgaaagcgcagataccatggataagagaatttctaaggttaaatgatatacctctattggaagagcctggctatgaagcggatgatataatagctactatagtgaataaatataaggatgatttaaaatatattctctctggagatttagatcttttgcaattagtctcggacaaaacctttctaatacatcctcaaaagggaattactgagtttactatttatgatccaaaagctgtaaaggataggtttggagtagagccctataagattcccttatacaaagtattagtaggggacgaatctgataatattccaggagtaaatggaataggtcctaaaaaggcctcaaagattcttgagaaaatttcaagtgtagatgaatttaaaagtaaaataaaagttttggatagtgatttaagggagcttattgagaaaaattggaatattattgaaagaaatttagaacttgttactttaaaaaatatagataaggatcttattcttaaacccttcgagattaaaagagatgaaaaagtaatagattttttgaagagatatgaacttaagagtattcttcaaaagttatttcctgatcttcaagaggaagaaaatatagagattaaagatgtcgaagagatcaattttaatgaggtagaaaaagaaggctactttgcctttaaatgtcttggagatagggcttttgagggtatttctctttccttcaaggagggggaaggatattttatatctccttttgatttcaataatgagataagaaagaagattgaaaatataatttcttcagagaatgttaaaaaaattggctcttatattcaaagagatttacattttttaaactgtaaaataaagggcgatgtatttgatgttagtctcgcatcttatcttttgaaccctgaaagacaaaatcactctcttgatattttgataggagagtatctaaataaaacctcttttattcctcaaaaatacgctggttatctttttccgttaaagtctattcttgaggagaggataaagaatgaagggttagaatttgtactttataacatagagattccattaatccctgtactttactccatggagaagtgggggataaaggtagataaggaatatttaaaacagctttctgatgaattctgcgagagaattaaaaaattggaagaagagatatatgaacttgcaggaaccagatttaatctcaattctccaaaacaactttctgaagttttatttgagaggttaaaacttccttctggtaagaaaggaaaaacaggatattctacgtcgtcttctgtgcttcaaaacttaataaatgctcatcctatagtgagaaaaatcctccaatatagagaactctataaattgaagagtacttatgtggatgctattcctaatctggttaatccacaaacaggtagagttcatacaaaatttaatcctacaggtacagctacaggaagaataagtagtagtgaacctaatcttcagaatattcctataaaaagtgaagaaggtagaaagataagaagagccttcgtgtcagaagatggatattttcttgtatctcttgattattctcagatagagctaaggattatggctcatctttctcaggagcctaaattaatatctgccttccaaaaaggagaggatattcatagaagaacagcatcggagatttttggagtgccagaggaagaagttgatgatcttttaaggtcaagggcaaaggccgttaattttggaattatttatggtatctcttcttttggactttctgagactgtaagtattacaccagaagaggcagagaaatttatagactcgtattttaagcactatccaagagtgaagctttttatagataagactattcatgaggcaagagaaaaactgtacgttaaaaccttatttggcagaaaaagatatattcctgagattaagagcataaataatcaggtaaggaatgcctatgaaaggatagcaataaatgcgccaattcagggaacagctgctgatattataaaacttgccatgatagaaatttacaaggagattgaaaataaaaatctcaagtcaagaatactccttcaaattcatgatgagcttattcttgaagtgccagaggaggagatggaatttactcctttaatggcaaaggaaaaaatggaaaaggtggtagaactttcggttcctcttgtagttgaaatctcggtaggtaaaaatcttgctgaattaaaatgagctataagattggtcgac

SEQ ID NO: 2103 - DNA, 2673 bp, Artificial Sequence
  Description of Artificial Sequence: Synthetic DNA sequence of Dictyoglomus thermophilum DNA K789D
atgaaatacctgctgccgaccgctgctgctggtctgctgctcctcgctgcccagccggcgatggccatggatatcggaattaattcggatccgaaatctctgtgggatctttttcaagaaaataccgagaaagagtccaaaaggaagattctgattattgatggctcaagcctcatatacagggtttattacgcccttccccctttaaagacaaaaaatggtgaattaactaatgctctttatggcttcataagaatacttttaaaggccgtagaagattttaatcctgatcttgtaggcgttgcctttgatagacctgaacctacttttaggcatgtgatttataaagagtataaggctaagagaccacctatgaaggatgatttgaaagcgcagataccatggataagagaatttctaaggttaaatgatatacctctattggaagagcctggctatgaagcggatgatataatagctactatagtgaataaatataaggatgatttaaaatatattctctctggagatttagatcttttgcaattagtctcggacaaaacctttctaatacatcctcaaaagggaattactgagtttactatttatgatccaaaagctgtaaaggataggtttggagtagagccctataagattcccttatacaaagtattagtaggggacgaatctgataatattccaggagtaaatggaataggtcctaaaaaggcctcaaagattcttgagaaaatttcaagtgtagatgaatttaaaagtaaaataaaagttttggatagtgatttaagggagcttattgagaaaaattggaatattattgaaagaaatttagaacttgttactttaaaaaatatagataaggatcttattcttaaacccttcgagattaaaagagatgaaaaagtaatagattttttgaagagatatgaacttaagagtattcttcaaaagttatttcctgatcttcaagaggaagaaaatatagagattaaagatgtcgaagagatcaattttaatgaggtagaaaaagaaggctactttgcctttaaatgtcttggagatagggcttttgagggtatttctctttccttcaaggagggggaaggatattttatatctccttttgatttcaataatgagataagaaagaagattgaaaatataatttcttcagagaatgttaaaaaaattggctcttatattcaaagagatttacattttttaaactgtaaaataaagggcgatgtatttgatgttagtctcgcatcttatcttttgaaccctgaaagacaaaatcactctcttgatattttgataggagagtatctaaataaaacctcttttattcctcaaaaatacgctggttatctttttccgttaaagtctattcttgaggagaggataaagaatgaagggttagaatttgtactttataacatagagattccattaatccctgtactttactccatggagaagtgggggataaaggtagataaggaatatttaaaacagctttctgatgaattctgcgagagaattaaaaaattggaagaagagatatatgaacttgcaggaaccagatttaatctcaattctccaaaacaactttctgaagttttatttgagaggttaaaacttccttctggtaagaaaggaaaaacaggatattctacgtcgtcttctgtgcttcaaaacttaataaatgctcatcctatagtgagaaaaatcctccaatatagagaactctataaattgaagagtacttatgtggatgctattcctaatctggttaatccacaaacaggtagagttcatacaaaatttaatcctacaggtacagctacaggaagaataagtagtagtgaacctaatcttcagaatattcctataaaaagtgaagaaggtagaaagataagaagagccttcgtgtcagaagatggatattttcttgtatctcttgattattctcagatagagctaaggattatggctcatctttctcaggagcctaaattaatatctgccttccaaaaaggagaggatattcatagaagaacagcatcggagatttttggagtgccagaggaagaagttgatgatcttttaaggtcaagggcaaaggccgttaattttggaattatttatggtatctcttcttttggactttctgagactgtaagtattacaccagaagaggcagagaaatttatagactcgtattttaagcactatccaagagtgaagctttttatagataagactattcatgaggcaagagaaaaactgtacgttaaaaccttatttggcagaaaaagatatattcctgagattaagagcataaatgatcaggtaaggaatgcctatgaaaggatagcaataaatgcgccaattcagggaacagctgctgatattataaaacttgccatgatagaaatttacaaggagattgaaaataaaaatctcaagtcaagaatactccttcaaattcatgatgagcttattcttgaagtgccagaggaggagatggaatttactcctttaatggcaaaggaaaaaatggaaaaggtggtagaactttcggttcctcttgtagttgaaatctcggtaggtaaaaatcttgctgaattaaaatgagctataagattggtcgac

SEQ ID NO: 2104 - DNA, 2673 bp, Artificial Sequence
  Description of Artificial Sequence: Synthetic DNA sequence of Dictyoglomus thermophilum DNA K789C
atgaaatacctgctgccgaccgctgctgctggtctgctgctcctcgctgcccagccggcgatggccatggatatcggaattaattcggatccgaaatctctgtgggatctttttcaagaaaataccgagaaagagtccaaaaggaagattctgattattgatggctcaagcctcatatacagggtttattacgcccttccccctttaaagacaaaaaatggtgaattaactaatgctctttatggcttcataagaatacttttaaaggccgtagaagattttaatcctgatcttgtaggcgttgcctttgatagacctgaacctacttttaggcatgtgatttataaagagtataaggctaagagaccacctatgaaggatgatttgaaagcgcagataccatggataagagaatttctaaggttaaatgatatacctctattggaagagcctggctatgaagcggatgatataatagctactatagtgaataaatataaggatgatttaaaatatattctctctggagatttagatcttttgcaattagtctcggacaaaacctttctaatacatcctcaaaagggaattactgagtttactatttatgatccaaaagctgtaaaggataggtttggagtagagccctataagattcccttatacaaagtattagtaggggacgaatctgataatattccaggagtaaatggaataggtcctaaaaaggcctcaaagattcttgagaaaatttcaagtgtagatgaatttaaaagtaaaataaaagttttggatagtgatttaagggagcttattgagaaaaattggaatattattgaaagaaatttagaacttgttactttaaaaaatatagataaggatcttattcttaaacccttcgagattaaaagagatgaaaaagtaatagattttttgaagagatatgaacttaagagtattcttcaaaagttatttcctgatcttcaagaggaagaaaatatagagattaaagatgtcgaagagatcaattttaatgaggtagaaaaagaaggctactttgcctttaaatgtcttggagatagggcttttgagggtatttctctttccttcaaggagggggaaggatattttatatctccttttgatttcaataatgagataagaaagaagattgaaaatataatttcttcagagaatgttaaaaaaattggctcttatattcaaagagatttacattttttaaactgtaaaataaagggcgatgtatttgatgttagtctcgcatcttatcttttgaaccctgaaagacaaaatcactctcttgatattttgataggagagtatctaaataaaacctcttttattcctcaaaaatacgctggttatctttttccgttaaagtctattcttgaggagaggataaagaatgaagggttagaatttgtactttataacatagagattccattaatccctgtactttactccatggagaagtgggggataaaggtagataaggaatatttaaaacagctttctgatgaattctgcgagagaattaaaaaattggaagaagagatatatgaacttgcaggaaccagatttaatctcaattctccaaaacaactttctgaagttttatttgagaggttaaaacttccttctggtaagaaaggaaaaacaggatattctacgtcgtcttctgtgcttcaaaacttaataaatgctcatcctatagtgagaaaaatcctccaatatagagaactctataaattgaagagtacttatgtggatgctattcctaatctggttaatccacaaacaggtagagttcatacaaaatttaatcctacaggtacagctacaggaagaataagtagtagtgaacctaatcttcagaatattcctataaaaagtgaagaaggtagaaagataagaagagccttcgtgtcagaagatggatattttcttgtatctcttgattattctcagatagagctaaggattatggctcatctttctcaggagcctaaattaatatctgccttccaaaaaggagaggatattcatagaagaacagcatcggagatttttggagtgccagaggaagaagttgatgatcttttaaggtcaagggcaaaggccgttaattttggaattatttatggtatctcttcttttggactttctgagactgtaagtattacaccagaagaggcagagaaatttatagactcgtattttaagcactatccaagagtgaagctttttatagataagactattcatgaggcaagagaaaaactgtacgttaaaaccttatttggcagaaaaagatatattcctgagattaagagcataaattgtcaggtaaggaatgcctatgaaaggatagcaataaatgcgccaattcagggaacagctgctgatattataaaacttgccatgatagaaatttacaaggagattgaaaataaaaatctcaagtcaagaatactccttcaaattcatgatgagcttattcttgaagtgccagaggaggagatggaatttactcctttaatggcaaaggaaaaaatggaaaaggtggtagaactttcggttcctcttgtagttgaaatctcggtaggtaaaaatcttgctgaattaaaatgagctataagattggtcgac

SEQ ID NO: 2105 - DNA, 2673 bp, Artificial Sequence
  Description of Artificial Sequence: Synthetic DNA sequence of Dictyoglomus thermophilum DNA K789E
atgaaatacctgctgccgaccgctgctgctggtctgctgctcctcgctgcccagccggcgatggccatggatatcggaattaattcggatccgaaatctctgtgggatctttttcaagaaaataccgagaaagagtccaaaaggaagattctgattattgatggctcaagcctcatatacagggtttattacgcccttccccctttaaagacaaaaaatggtgaattaactaatgctctttatggcttcataagaatacttttaaaggccgtagaagattttaatcctgatcttgtaggcgttgcctttgatagacctgaacctacttttaggcatgtgatttataaagagtataaggctaagagaccacctatgaaggatgatttgaaagcgcagataccatggataagagaatttctaaggttaaatgatatacctctattggaagagcctggctatgaagcggatgatataatagctactatagtgaataaatataaggatgatttaaaatatattctctctggagatttagatcttttgcaattagtctcggacaaaacctttctaatacatcctcaaaagggaattactgagtttactatttatgatccaaaagctgtaaaggataggtttggagtagagccctataagattcccttatacaaagtattagtaggggacgaatctgataatattccaggagtaaatggaataggtcctaaaaaggcctcaaagattcttgagaaaatttcaagtgtagatgaatttaaaagtaaaataaaagttttggatagtgatttaagggagcttattgagaaaaattggaatattattgaaagaaatttagaacttgttactttaaaaaatatagataaggatcttattcttaaacccttcgagattaaaagagatgaaaaagtaatagattttttgaagagatatgaacttaagagtattcttcaaaagttatttcctgatcttcaagaggaagaaaatatagagattaaagatgtcgaagagatcaattttaatgaggtagaaaaagaaggctactttgcctttaaatgtcttggagatagggcttttgagggtatttctctttccttcaaggagggggaaggatattttatatctccttttgatttcaataatgagataagaaagaagattgaaaatataatttcttcagagaatgttaaaaaaattggctcttatattcaaagagatttacattttttaaactgtaaaataaagggcgatgtatttgatgttagtctcgcatcttatcttttgaaccctgaaagacaaaatcactctcttgatattttgataggagagtatctaaataaaacctcttttattcctcaaaaatacgctggttatctttttccgttaaagtctattcttgaggagaggataaagaatgaagggttagaatttgtactttataacatagagattccattaatccctgtactttactccatggagaagtgggggataaaggtagataaggaatatttaaaacagctttctgatgaattctgcgagagaattaaaaaattggaagaagagatatatgaacttgcaggaaccagatttaatctcaattctccaaaacaactttctgaagttttatttgagaggttaaaacttccttctggtaagaaaggaaaaacaggatattctacgtcgtcttctgtgcttcaaaacttaataaatgctcatcctatagtgagaaaaatcctccaatatagagaactctataaattgaagagtacttatgtggatgctattcctaatctggttaatccacaaacaggtagagttcatacaaaatttaatcctacaggtacagctacaggaagaataagtagtagtgaacctaatcttcagaatattcctataaaaagtgaagaaggtagaaagataagaagagccttcgtgtcagaagatggatattttcttgtatctcttgattattctcagatagagctaaggattatggctcatctttctcaggagcctaaattaatatctgccttccaaaaaggagaggatattcatagaagaacagcatcggagatttttggagtgccagaggaagaagttgatgatcttttaaggtcaagggcaaaggccgttaattttggaattatttatggtatctcttcttttggactttctgagactgtaagtattacaccagaagaggcagagaaatttatagactcgtattttaagcactatccaagagtgaagctttttatagataagactattcatgaggcaagagaaaaactgtacgttaaaaccttatttggcagaaaaagatatattcctgagattaagagcataaatgaacaggtaaggaatgcctatgaaaggatagcaataaatgcgccaattcagggaacagctgctgatattataaaacttgccatgatagaaatttacaaggagattgaaaataaaaatctcaagtcaagaatactccttcaaattcatgatgagcttattcttgaagtgccagaggaggagatggaatttactcctttaatggcaaaggaaaaaatggaaaaggtggtagaactttcggttcctcttgtagttgaaatctcggtaggtaaaaatcttgctgaattaaaatgagctataagattggtcgac

SEQ ID NO: 2106 - DNA, 2673 bp, Artificial Sequence
  Description of Artificial Sequence: Synthetic DNA sequence of Dictyoglomus thermophilum DNA K789Q
atgaaatacctgctgccgaccgctgctgctggtctgctgctcctcgctgcccagccggcgatggccatggatatcggaattaattcggatccgaaatctctgtgggatctttttcaagaaaataccgagaaagagtccaaaaggaagattctgattattgatggctcaagcctcatatacagggtttattacgcccttccccctttaaagacaaaaaatggtgaattaactaatgctctttatggcttcataagaatacttttaaaggccgtagaagattttaatcctgatcttgtaggcgttgcctttgatagacctgaacctacttttaggcatgtgatttataaagagtataaggctaagagaccacctatgaaggatgatttgaaagcgcagataccatggataagagaatttctaaggttaaatgatatacctctattggaagagcctggctatgaagcggatgatataatagctactatagtgaataaatataaggatgatttaaaatatattctctctggagatttagatcttttgcaattagtctcggacaaaacctttctaatacatcctcaaaagggaattactgagtttactatttatgatccaaaagctgtaaaggataggtttggagtagagccctataagattcccttatacaaagtattagtaggggacgaatctgataatattccaggagtaaatggaataggtcctaaaaaggcctcaaagattcttgagaaaatttcaagtgtagatgaatttaaaagtaaaataaaagttttggatagtgatttaagggagcttattgagaaaaattggaatattattgaaagaaatttagaacttgttactttaaaaaatatagataaggatcttattcttaaacccttcgagattaaaagagatgaaaaagtaatagattttttgaagagatatgaacttaagagtattcttcaaaagttatttcctgatcttcaagaggaagaaaatatagagattaaagatgtcgaagagatcaattttaatgaggtagaaaaagaaggctactttgcctttaaatgtcttggagatagggcttttgagggtatttctctttccttcaaggagggggaaggatattttatatctccttttgatttcaataatgagataagaaagaagattgaaaatataatttcttcagagaatgttaaaaaaattggctcttatattcaaagagatttacattttttaaactgtaaaataaagggcgatgtatttgatgttagtctcgcatcttatcttttgaaccctgaaagacaaaatcactctcttgatattttgataggagagtatctaaataaaacctcttttattcctcaaaaatacgctggttatctttttccgttaaagtctattcttgaggagaggataaagaatgaagggttagaatttgtactttataacatagagattccattaatccctgtactttactccatggagaagtgggggataaaggtagataaggaatatttaaaacagctttctgatgaattctgcgagagaattaaaaaattggaagaagagatatatgaacttgcaggaaccagatttaatctcaattctccaaaacaactttctgaagttttatttgagaggttaaaacttccttctggtaagaaaggaaaaacaggatattctacgtcgtcttctgtgcttcaaaacttaataaatgctcatcctatagtgagaaaaatcctccaatatagagaactctataaattgaagagtacttatgtggatgctattcctaatctggttaatccacaaacaggtagagttcatacaaaatttaatcctacaggtacagctacaggaagaataagtagtagtgaacctaatcttcagaatattcctataaaaagtgaagaaggtagaaagataagaagagccttcgtgtcagaagatggatattttcttgtatctcttgattattctcagatagagctaaggattatggctcatctttctcaggagcctaaattaatatctgccttccaaaaaggagaggatattcatagaagaacagcatcggagatttttggagtgccagaggaagaagttgatgatcttttaaggtcaagggcaaaggccgttaattttggaattatttatggtatctcttcttttggactttctgagactgtaagtattacaccagaagaggcagagaaatttatagactcgtattttaagcactatccaagagtgaagctttttatagataagactattcatgaggcaagagaaaaactgtacgttaaaaccttatttggcagaaaaagatatattcctgagattaagagcataaatcaacaggtaaggaatgcctatgaaaggatagcaataaatgcgccaattcagggaacagctgctgatattataaaacttgccatgatagaaatttacaaggagattgaaaataaaaatctcaagtcaagaatactccttcaaattcatgatgagcttattcttgaagtgccagaggaggagatggaatttactcctttaatggcaaaggaaaaaatggaaaaggtggtagaactttcggttcctcttgtagttgaaatctcggtaggtaaaaatcttgctgaattaaaatgagctataagattggtcgac

SEQ ID NO: 2107 - DNA, 2673 bp, Artificial Sequence
  Description of Artificial Sequence: Synthetic DNA sequence of Dictyoglomus thermophilum DNA K789G
atgaaatacctgctgccgaccgctgctgctggtctgctgctcctcgctgcccagccggcgatggccatggatatcggaattaattcggatccgaaatctctgtgggatctttttcaagaaaataccgagaaagagtccaaaaggaagattctgattattgatggctcaagcctcatatacagggtttattacgcccttccccctttaaagacaaaaaatggtgaattaactaatgctctttatggcttcataagaatacttttaaaggccgtagaagattttaatcctgatcttgtaggcgttgcctttgatagacctgaacctacttttaggcatgtgatttataaagagtataaggctaagagaccacctatgaaggatgatttgaaagcgcagataccatggataagagaatttctaaggttaaatgatatacctctattggaagagcctggctatgaagcggatgatataatagctactatagtgaataaatataaggatgatttaaaatatattctctctggagatttagatcttttgcaattagtctcggacaaaacctttctaatacatcctcaaaagggaattactgagtttactatttatgatccaaaagctgtaaaggataggtttggagtagagccctataagattcccttatacaaagtattagtaggggacgaatctgataatattccaggagtaaatggaataggtcctaaaaaggcctcaaagattcttgagaaaatttcaagtgtagatgaatttaaaagtaaaataaaagttttggatagtgatttaagggagcttattgagaaaaattggaatattattgaaagaaatttagaacttgttactttaaaaaatatagataaggatcttattcttaaacccttcgagattaaaagagatgaaaaagtaatagattttttgaagagatatgaacttaagagtattcttcaaaagttatttcctgatcttcaagaggaagaaaatatagagattaaagatgtcgaagagatcaattttaatgaggtagaaaaagaaggctactttgcctttaaatgtcttggagatagggcttttgagggtatttctctttccttcaaggagggggaaggatattttatatctccttttgatttcaataatgagataagaaagaagattgaaaatataatttcttcagagaatgttaaaaaaattggctcttatattcaaagagatttacattttttaaactgtaaaataaagggcgatgtatttgatgttagtctcgcatcttatcttttgaaccctgaaagacaaaatcactctcttgatattttgataggagagtatctaaataaaacctcttttattcctcaaaaatacgctggttatctttttccgttaaagtctattcttgaggagaggataaagaatgaagggttagaatttgtactttataacatagagattccattaatccctgtactttactccatggagaagtgggggataaaggtagataaggaatatttaaaacagctttctgatgaattctgcgagagaattaaaaaattggaagaagagatatatgaacttgcaggaaccagatttaatctcaattctccaaaacaactttctgaagttttatttgagaggttaaaacttccttctggtaagaaaggaaaaacaggatattctacgtcgtcttctgtgcttcaaaacttaataaatgctcatcctatagtgagaaaaatcctccaatatagagaactctataaattgaagagtacttatgtggatgctattcctaatctggttaatccacaaacaggtagagttcatacaaaatttaatcctacaggtacagctacaggaagaataagtagtagtgaacctaatcttcagaatattcctataaaaagtgaagaaggtagaaagataagaagagccttcgtgtcagaagatggatattttcttgtatctcttgattattctcagatagagctaaggattatggctcatctttctcaggagcctaaattaatatctgccttccaaaaaggagaggatattcatagaagaacagcatcggagatttttggagtgccagaggaagaagttgatgatcttttaaggtcaagggcaaaggccgttaattttggaattatttatggtatctcttcttttggactttctgagactgtaagtattacaccagaagaggcagagaaatttatagactcgtattttaagcactatccaagagtgaagctttttatagataagactattcatgaggcaagagaaaaactgtacgttaaaaccttatttggcagaaaaagatatattcctgagattaagagcataaatggtcaggtaaggaatgcctatgaaaggatagcaataaatgcgccaattcagggaacagctgctgatattataaaacttgccatgatagaaatttacaaggagattgaaaataaaaatctcaagtcaagaatactccttcaaattcatgatgagcttattcttgaagtgccagaggaggagatggaatttactcctttaatggcaaaggaaaaaatggaaaaggtggtagaactttcggttcctcttgtagttgaaatctcggtaggtaaaaatcttgctgaattaaaatgagctataagattggtcgac

SEQ ID NO: 2108 - DNA, 2673 bp, Artificial Sequence
  Description of Artificial Sequence: Synthetic DNA sequence of Dictyoglomus thermophilum DNA K789H
atgaaatacctgctgccgaccgctgctgctggtctgctgctcctcgctgcccagccggcgatggccatggatatcggaattaattcggatccgaaatctctgtgggatctttttcaagaaaataccgagaaagagtccaaaaggaagattctgattattgatggctcaagcctcatatacagggtttattacgcccttccccctttaaagacaaaaaatggtgaattaactaatgctctttatggcttcataagaatacttttaaaggccgtagaagattttaatcctgatcttgtaggcgttgcctttgatagacctgaacctacttttaggcatgtgatttataaagagtataaggctaagagaccacctatgaaggatgatttgaaagcgcagataccatggataagagaatttctaaggttaaatgatatacctctattggaagagcctggctatgaagcggatgatataatagctactatagtgaataaatataaggatgatttaaaatatattctctctggagatttagatcttttgcaattagtctcggacaaaacctttctaatacatcctcaaaagggaattactgagtttactatttatgatccaaaagctgtaaaggataggtttggagtagagccctataagattcccttatacaaagtattagtaggggacgaatctgataatattccaggagtaaatggaataggtcctaaaaaggcctcaaagattcttgagaaaatttcaagtgtagatgaatttaaaagtaaaataaaagttttggatagtgatttaagggagcttattgagaaaaattggaatattattgaaagaaatttagaacttgttactttaaaaaatatagataaggatcttattcttaaacccttcgagattaaaagagatgaaaaagtaatagattttttgaagagatatgaacttaagagtattcttcaaaagttatttcctgatcttcaagaggaagaaaatatagagattaaagatgtcgaagagatcaattttaatgaggtagaaaaagaaggctactttgcctttaaatgtcttggagatagggcttttgagggtatttctctttccttcaaggagggggaaggatattttatatctccttttgatttcaataatgagataagaaagaagattgaaaatataatttcttcagagaatgttaaaaaaattggctcttatattcaaagagatttacattttttaaactgtaaaataaagggcgatgtatttgatgttagtctcgcatcttatcttttgaaccctgaaagacaaaatcactctcttgatattttgataggagagtatctaaataaaacctcttttattcctcaaaaatacgctggttatctttttccgttaaagtctattcttgaggagaggataaagaatgaagggttagaatttgtactttataacatagagattccattaatccctgtactttactccatggagaagtgggggataaaggtagataaggaatatttaaaacagctttctgatgaattctgcgagagaattaaaaaattggaagaagagatatatgaacttgcaggaaccagatttaatctcaattctccaaaacaactttctgaagttttatttgagaggttaaaacttccttctggtaagaaaggaaaaacaggatattctacgtcgtcttctgtgcttcaaaacttaataaatgctcatcctatagtgagaaaaatcctccaatatagagaactctataaattgaagagtacttatgtggatgctattcctaatctggttaatccacaaacaggtagagttcatacaaaatttaatcctacaggtacagctacaggaagaataagtagtagtgaacctaatcttcagaatattcctataaaaagtgaagaaggtagaaagataagaagagccttcgtgtcagaagatggatattttcttgtatctcttgattattctcagatagagctaaggattatggctcatctttctcaggagcctaaattaatatctgccttccaaaaaggagaggatattcatagaagaacagcatcggagatttttggagtgccagaggaagaagttgatgatcttttaaggtcaagggcaaaggccgttaattttggaattatttatggtatctcttcttttggactttctgagactgtaagtattacaccagaagaggcagagaaatttatagactcgtattttaagcactatccaagagtgaagctttttatagataagactattcatgaggcaagagaaaaactgtacgttaaaaccttatttggcagaaaaagatatattcctgagattaagagcataaatcatcaggtaaggaatgcctatgaaaggatagcaataaatgcgccaattcagggaacagctgctgatattataaaacttgccatgatagaaatttacaaggagattgaaaataaaaatctcaagtcaagaatactccttcaaattcatgatgagcttattcttgaagtgccagaggaggagatggaatttactcctttaatggcaaaggaaaaaatggaaaaggtggtagaactttcggttcctcttgtagttgaaatctcggtaggtaaaaatcttgctgaattaaaatgagctataagattggtcgac

SEQ ID NO: 2109 - DNA, 2673 bp, Artificial Sequence
  Description of Artificial Sequence: Synthetic DNA sequence of Dictyoglomus thermophilum DNA K789I
atgaaatacctgctgccgaccgctgctgctggtctgctgctcctcgctgcccagccggcgatggccatggatatcggaattaattcggatccgaaatctctgtgggatctttttcaagaaaataccgagaaagagtccaaaaggaagattctgattattgatggctcaagcctcatatacagggtttattacgcccttccccctttaaagacaaaaaatggtgaattaactaatgctctttatggcttcataagaatacttttaaaggccgtagaagattttaatcctgatcttgtaggcgttgcctttgatagacctgaacctacttttaggcatgtgatttataaagagtataaggctaagagaccacctatgaaggatgatttgaaagcgcagataccatggataagagaatttctaaggttaaatgatatacctctattggaagagcctggctatgaagcggatgatataatagctactatagtgaataaatataaggatgatttaaaatatattctctctggagatttagatcttttgcaattagtctcggacaaaacctttctaatacatcctcaaaagggaattactgagtttactatttatgatccaaaagctgtaaaggataggtttggagtagagccctataagattcccttatacaaagtattagtaggggacgaatctgataatattccaggagtaaatggaataggtcctaaaaaggcctcaaagattcttgagaaaatttcaagtgtagatgaatttaaaagtaaaataaaagttttggatagtgatttaagggagcttattgagaaaaattggaatattattgaaagaaatttagaacttgttactttaaaaaatatagataaggatcttattcttaaacccttcgagattaaaagagatgaaaaagtaatagattttttgaagagatatgaacttaagagtattcttcaaaagttatttcctgatcttcaagaggaagaaaatatagagattaaagatgtcgaagagatcaattttaatgaggtagaaaaagaaggctactttgcctttaaatgtcttggagatagggcttttgagggtatttctctttccttcaaggagggggaaggatattttatatctccttttgatttcaataatgagataagaaagaagattgaaaatataatttcttcagagaatgttaaaaaaattggctcttatattcaaagagatttacattttttaaactgtaaaataaagggcgatgtatttgatgttagtctcgcatcttatcttttgaaccctgaaagacaaaatcactctcttgatattttgataggagagtatctaaataaaacctcttttattcctcaaaaatacgctggttatctttttccgttaaagtctattcttgaggagaggataaagaatgaagggttagaatttgtactttataacatagagattccattaatccctgtactttactccatggagaagtgggggataaaggtagataaggaatatttaaaacagctttctgatgaattctgcgagagaattaaaaaattggaagaagagatatatgaacttgcaggaaccagatttaatctcaattctccaaaacaactttctgaagttttatttgagaggttaaaacttccttctggtaagaaaggaaaaacaggatattctacgtcgtcttctgtgcttcaaaacttaataaatgctcatcctatagtgagaaaaatcctccaatatagagaactctataaattgaagagtacttatgtggatgctattcctaatctggttaatccacaaacaggtagagttcatacaaaatttaatcctacaggtacagctacaggaagaataagtagtagtgaacctaatcttcagaatattcctataaaaagtgaagaaggtagaaagataagaagagccttcgtgtcagaagatggatattttcttgtatctcttgattattctcagatagagctaaggattatggctcatctttctcaggagcctaaattaatatctgccttccaaaaaggagaggatattcatagaagaacagcatcggagatttttggagtgccagaggaagaagttgatgatcttttaaggtcaagggcaaaggccgttaattttggaattatttatggtatctcttcttttggactttctgagactgtaagtattacaccagaagaggcagagaaatttatagactcgtattttaagcactatccaagagtgaagctttttatagataagactattcatgaggcaagagaaaaactgtacgttaaaaccttatttggcagaaaaagatatattcctgagattaagagcataaatattcaggtaaggaatgcctatgaaaggatagcaataaatgcgccaattcagggaacagctgctgatattataaaacttgccatgatagaaatttacaaggagattgaaaataaaaatctcaagtcaagaatactccttcaaattcatgatgagcttattcttgaagtgccagaggaggagatggaatttactcctttaatggcaaaggaaaaaatggaaaaggtggtagaactttcggttcctcttgtagttgaaatctcggtaggtaaaaatcttgctgaattaaaatgagctataagattggtcgac

SEQ ID NO: 2110 - DNA, 2673 bp, Artificial Sequence
  Description of Artificial Sequence: Synthetic DNA sequence of Dictyoglomus thermophilum DNA K789L
atgaaatacctgctgccgaccgctgctgctggtctgctgctcctcgctgcccagccggcgatggccatggatatcggaattaattcggatccgaaatctctgtgggatctttttcaagaaaataccgagaaagagtccaaaaggaagattctgattattgatggctcaagcctcatatacagggtttattacgcccttccccctttaaagacaaaaaatggtgaattaactaatgctctttatggcttcataagaatacttttaaaggccgtagaagattttaatcctgatcttgtaggcgttgcctttgatagacctgaacctacttttaggcatgtgatttataaagagtataaggctaagagaccacctatgaaggatgatttgaaagcgcagataccatggataagagaatttctaaggttaaatgatatacctctattggaagagcctggctatgaagcggatgatataatagctactatagtgaataaatataaggatgatttaaaatatattctctctggagatttagatcttttgcaattagtctcggacaaaacctttctaatacatcctcaaaagggaattactgagtttactatttatgatccaaaagctgtaaaggataggtttggagtagagccctataagattcccttatacaaagtattagtaggggacgaatctgataatattccaggagtaaatggaataggtcctaaaaaggcctcaaagattcttgagaaaatttcaagtgtagatgaatttaaaagtaaaataaaagttttggatagtgatttaagggagcttattgagaaaaattggaatattattgaaagaaatttagaacttgttactttaaaaaatatagataaggatcttattcttaaacccttcgagattaaaagagatgaaaaagtaatagattttttgaagagatatgaacttaagagtattcttcaaaagttatttcctgatcttcaagaggaagaaaatatagagattaaagatgtcgaagagatcaattttaatgaggtagaaaaagaaggctactttgcctttaaatgtcttggagatagggcttttgagggtatttctctttccttcaaggagggggaaggatattttatatctccttttgatttcaataatgagataagaaagaagattgaaaatataatttcttcagagaatgttaaaaaaattggctcttatattcaaagagatttacattttttaaactgtaaaataaagggcgatgtatttgatgttagtctcgcatcttatcttttgaaccctgaaagacaaaatcactctcttgatattttgataggagagtatctaaataaaacctcttttattcctcaaaaatacgctggttatctttttccgttaaagtctattcttgaggagaggataaagaatgaagggttagaatttgtactttataacatagagattccattaatccctgtactttactccatggagaagtgggggataaaggtagataaggaatatttaaaacagctttctgatgaattctgcgagagaattaaaaaattggaagaagagatatatgaacttgcaggaaccagatttaatctcaattctccaaaacaactttctgaagttttatttgagaggttaaaacttccttctggtaagaaaggaaaaacaggatattctacgtcgtcttctgtgcttcaaaacttaataaatgctcatcctatagtgagaaaaatcctccaatatagagaactctataaattgaagagtacttatgtggatgctattcctaatctggttaatccacaaacaggtagagttcatacaaaatttaatcctacaggtacagctacaggaagaataagtagtagtgaacctaatcttcagaatattcctataaaaagtgaagaaggtagaaagataagaagagccttcgtgtcagaagatggatattttcttgtatctcttgattattctcagatagagctaaggattatggctcatctttctcaggagcctaaattaatatctgccttccaaaaaggagaggatattcatagaagaacagcatcggagatttttggagtgccagaggaagaagttgatgatcttttaaggtcaagggcaaaggccgttaattttggaattatttatggtatctcttcttttggactttctgagactgtaagtattacaccagaagaggcagagaaatttatagactcgtattttaagcactatccaagagtgaagctttttatagataagactattcatgaggcaagagaaaaactgtacgttaaaaccttatttggcagaaaaagatatattcctgagattaagagcataaatcttcaggtaaggaatgcctatgaaaggatagcaataaatgcgccaattcagggaacagctgctgatattataaaacttgccatgatagaaatttacaaggagattgaaaataaaaatctcaagtcaagaatactccttcaaattcatgatgagcttattcttgaagtgccagaggaggagatggaatttactcctttaatggcaaaggaaaaaatggaaaaggtggtagaactttcggttcctcttgtagttgaaatctcggtaggtaaaaatcttgctgaattaaaatgagctataagattggtcgac

SEQ ID NO: 2111 - DNA, 2673 bp, Artificial Sequence
  Description of Artificial Sequence: Synthetic DNA sequence of Dictyoglomus thermophilum DNA K789M
atgaaatacctgctgccgaccgctgctgctggtctgctgctcctcgctgcccagccggcgatggccatggatatcggaattaattcggatccgaaatctctgtgggatctttttcaagaaaataccgagaaagagtccaaaaggaagattctgattattgatggctcaagcctcatatacagggtttattacgcccttccccctttaaagacaaaaaatggtgaattaactaatgctctttatggcttcataagaatacttttaaaggccgtagaagattttaatcctgatcttgtaggcgttgcctttgatagacctgaacctacttttaggcatgtgatttataaagagtataaggctaagagaccacctatgaaggatgatttgaaagcgcagataccatggataagagaatttctaaggttaaatgatatacctctattggaagagcctggctatgaagcggatgatataatagctactatagtgaataaatataaggatgatttaaaatatattctctctggagatttagatcttttgcaattagtctcggacaaaacctttctaatacatcctcaaaagggaattactgagtttactatttatgatccaaaagctgtaaaggataggtttggagtagagccctataagattcccttatacaaagtattagtaggggacgaatctgataatattccaggagtaaatggaataggtcctaaaaaggcctcaaagattcttgagaaaatttcaagtgtagatgaatttaaaagtaaaataaaagttttggatagtgatttaagggagcttattgagaaaaattggaatattattgaaagaaatttagaacttgttactttaaaaaatatagataaggatcttattcttaaacccttcgagattaaaagagatgaaaaagtaatagattttttgaagagatatgaacttaagagtattcttcaaaagttatttcctgatcttcaagaggaagaaaatatagagattaaagatgtcgaagagatcaattttaatgaggtagaaaaagaaggctactttgcctttaaatgtcttggagatagggcttttgagggtatttctctttccttcaaggagggggaaggatattttatatctccttttgatttcaataatgagataagaaagaagattgaaaatataatttcttcagagaatgttaaaaaaattggctcttatattcaaagagatttacattttttaaactgtaaaataaagggcgatgtatttgatgttagtctcgcatcttatcttttgaaccctgaaagacaaaatcactctcttgatattttgataggagagtatctaaataaaacctcttttattcctcaaaaatacgctggttatctttttccgttaaagtctattcttgaggagaggataaagaatgaagggttagaatttgtactttataacatagagattccattaatccctgtactttactccatggagaagtgggggataaaggtagataaggaatatttaaaacagctttctgatgaattctgcgagagaattaaaaaattggaagaagagatatatgaacttgcaggaaccagatttaatctcaattctccaaaacaactttctgaagttttatttgagaggttaaaacttccttctggtaagaaaggaaaaacaggatattctacgtcgtcttctgtgcttcaaaacttaataaatgctcatcctatagtgagaaaaatcctccaatatagagaactctataaattgaagagtacttatgtggatgctattcctaatctggttaatccacaaacaggtagagttcatacaaaatttaatcctacaggtacagctacaggaagaataagtagtagtgaacctaatcttcagaatattcctataaaaagtgaagaaggtagaaagataagaagagccttcgtgtcagaagatggatattttcttgtatctcttgattattctcagatagagctaaggattatggctcatctttctcaggagcctaaattaatatctgccttccaaaaaggagaggatattcatagaagaacagcatcggagatttttggagtgccagaggaagaagttgatgatcttttaaggtcaagggcaaaggccgttaattttggaattatttatggtatctcttcttttggactttctgagactgtaagtattacaccagaagaggcagagaaatttatagactcgtattttaagcactatccaagagtgaagctttttatagataagactattcatgaggcaagagaaaaactgtacgttaaaaccttatttggcagaaaaagatatattcctgagattaagagcataaatatgcaggtaaggaatgcctatgaaaggatagcaataaatgcgccaattcagggaacagctgctgatattataaaacttgccatgatagaaatttacaaggagattgaaaataaaaatctcaagtcaagaatactccttcaaattcatgatgagcttattcttgaagtgccagaggaggagatggaatttactcctttaatggcaaaggaaaaaatggaaaaggtggtagaactttcggttcctcttgtagttgaaatctcggtaggtaaaaatcttgctgaattaaaatgagctataagattggtcgac

SEQ ID NO: 2112 - DNA, 2673 bp, Artificial Sequence
  Description of Artificial Sequence: Synthetic DNA sequence of Dictyoglomus thermophilum DNA K789F
atgaaatacctgctgccgaccgctgctgctggtctgctgctcctcgctgcccagccggcgatggccatggatatcggaattaattcggatccgaaatctctgtgggatctttttcaagaaaataccgagaaagagtccaaaaggaagattctgattattgatggctcaagcctcatatacagggtttattacgcccttccccctttaaagacaaaaaatggtgaattaactaatgctctttatggcttcataagaatacttttaaaggccgtagaagattttaatcctgatcttgtaggcgttgcctttgatagacctgaacctacttttaggcatgtgatttataaagagtataaggctaagagaccacctatgaaggatgatttgaaagcgcagataccatggataagagaatttctaaggttaaatgatatacctctattggaagagcctggctatgaagcggatgatataatagctactatagtgaataaatataaggatgatttaaaatatattctctctggagatttagatcttttgcaattagtctcggacaaaacctttctaatacatcctcaaaagggaattactgagtttactatttatgatccaaaagctgtaaaggataggtttggagtagagccctataagattcccttatacaaagtattagtaggggacgaatctgataatattccaggagtaaatggaataggtcctaaaaaggcctcaaagattcttgagaaaatttcaagtgtagatgaatttaaaagtaaaataaaagttttggatagtgatttaagggagcttattgagaaaaattggaatattattgaaagaaatttagaacttgttactttaaaaaatatagataaggatcttattcttaaacccttcgagattaaaagagatgaaaaagtaatagattttttgaagagatatgaacttaagagtattcttcaaaagttatttcctgatcttcaagaggaagaaaatatagagattaaagatgtcgaagagatcaattttaatgaggtagaaaaagaaggctactttgcctttaaatgtcttggagatagggcttttgagggtatttctctttccttcaaggagggggaaggatattttatatctccttttgatttcaataatgagataagaaagaagattgaaaatataatttcttcagagaatgttaaaaaaattggctcttatattcaaagagatttacattttttaaactgtaaaataaagggcgatgtatttgatgttagtctcgcatcttatcttttgaaccctgaaagacaaaatcactctcttgatattttgataggagagtatctaaataaaacctcttttattcctcaaaaatacgctggttatctttttccgttaaagtctattcttgaggagaggataaagaatgaagggttagaatttgtactttataacatagagattccattaatccctgtactttactccatggagaagtgggggataaaggtagataaggaatatttaaaacagctttctgatgaattctgcgagagaattaaaaaattggaagaagagatatatgaacttgcaggaaccagatttaatctcaattctccaaaacaactttctgaagttttatttgagaggttaaaacttccttctggtaagaaaggaaaaacaggatattctacgtcgtcttctgtgcttcaaaacttaataaatgctcatcctatagtgagaaaaatcctccaatatagagaactctataaattgaagagtacttatgtggatgctattcctaatctggttaatccacaaacaggtagagttcatacaaaatttaatcctacaggtacagctacaggaagaataagtagtagtgaacctaatcttcagaatattcctataaaaagtgaagaaggtagaaagataagaagagccttcgtgtcagaagatggatattttcttgtatctcttgattattctcagatagagctaaggattatggctcatctttctcaggagcctaaattaatatctgccttccaaaaaggagaggatattcatagaagaacagcatcggagatttttggagtgccagaggaagaagttgatgatcttttaaggtcaagggcaaaggccgttaattttggaattatttatggtatctcttcttttggactttctgagactgtaagtattacaccagaagaggcagagaaatttatagactcgtattttaagcactatccaagagtgaagctttttatagataagactattcatgaggcaagagaaaaactgtacgttaaaaccttatttggcagaaaaagatatattcctgagattaagagcataaattttcaggtaaggaatgcctatgaaaggatagcaataaatgcgccaattcagggaacagctgctgatattataaaacttgccatgatagaaatttacaaggagattgaaaataaaaatctcaagtcaagaatactccttcaaattcatgatgagcttattcttgaagtgccagaggaggagatggaatttactcctttaatggcaaaggaaaaaatggaaaaggtggtagaactttcggttcctcttgtagttgaaatctcggtaggtaaaaatcttgctgaattaaaatgagctataagattggtcgac
